United States Patent Application Publication US 2008/0229439 A1 - sequence listing, part 13

SEQ ID NO: 27151 - DNA, 697 bp, Glycine max
  Clone ID: TF_GmC68522_1
tcgcccctttctctctctctacactttctctctctctccaacaccaccttttatttttttttccccttgagacaaaaacaaaagtaaagaaagaggtttatttttatttgggtctttttttattagcgaaaaaaggaataaaagaaaaagataacggaaatgtcggaggcaaaagacccggcgatcaagctcttcgggaagacgatcccggtgccggagattctgccgggatccaacggagctccggcttcgtcttccggtgatgttgttgttgatgacagtgttgacgcttcttccaccaactcttcaagggagtctcataccaacacagatgcacaagagaaagattttgataaggacacattgggagaaaaaccaactgatgacaagaaggaagatggagcccccgcccaatcatcagaagaggtcaccaatcttgatactgcctctggaacctgtgaagaatccatcactctgtccaccgagagggaggctactacattgaaaactacaaagactgaagaagaacagggcgagacaagttattcacaagataagaacctaaaaaaaccagacaaaatactaccttggcctcgctgtaatagcatggacaccaagttctggtactacaataattataatgtcaaccaaccccgtcacttctgcaagaattgccagagatactggactgctgggg

SEQ ID NO: 27152 - DNA, 1866 bp, Glycine max
  Clone ID: TF_GmC1363_1
ggctcgagggtaacaagaaagaaaaataaaaaaaaaccaaagaaacagaaatgttggagtcaaaagactcgacgatgaagctcttcgggaagacgatccctgcgccggagatctccgccggagctccggcattgtcttctggtgatgctgatgctgttggtgttgttcagaaccatggttcttcaagtgtcaatggggatggtgaagagcacgagattgagcaggacataatgggagaggaaacaactgagagtgagaaggaagatgaagtgaccaatcttgatactgtctcaagaccaggggaagtgtctattaacccctctaccaagaaggaggatcttacattgaaaacttcaaaaaagaccgaacaagaacaaggtgaaaattcccaagataaaacactgagaaagccggacaaaatactgccttgcccccgctgcaatagcatggataccaagttctgctactacaataattacaatgtcaaccaaccccgccatttctgcaagaattgtcagagatactggactgccggtggagtgatgaggaatgttcctgtgggtgctggtcgcaggaagaacaagaattttacttctcagtatcgtcagataactgttcctgaagcagcactcttgagttctcagccggacttgccaaatggagtcagtcatccttccttgaactgtaatgccacactccttgcatttgggtctgatacacccttgtgtgaatcaatgacatctgttttgaaccttgctgaaaaagcagtgaacaattccacaacaaatggatttaatggctcagaagaactagaaattccttttgcttatgttgctggagaaaaagtgaatgatgattccaataaatcttctgacatgtcaacaaagccaatggaaggtgaaaccaccaataggtcccaagaacaagtcatagagaattgtcatcccttcccacctcatgctccctactttcctggtgccccttggcctttcccatggaatccagcactgtggaactccccggtaccatcaccacctgcttttttcccacaaggatttaccatgcctctctatcctgcagcagcttattggggtcttactataccgggtgcatggagcatcccatggctagcgcaaccatcattaccaaatagcacagtgtctaactctggtccagaccccattgcccgaaccatagccatgtcttgattgccacgtcccaaaaagttaacaggaggaagtggggtttcaacaagaggactcttattgctgttcaaccatattgcaatggaaagtgagggaaagtgagataaggcttctagacccaaccagttactgttgatgtctccttgatccattagccaacaaagaatagtgggtttcctcttgggggaatgtacagggcagtgggatatgcctaaggggaaaagcaaaagtggtgaggaaaagaaagtgctctatggatgtgttgaaagcaaaatgaaatgacaatgtccaagataattagcttgatgcagaagatgtgattcaaatgtgaaagctaatgaagatagggttttgcgtgactcttgtggtagtttcaaggaacaatcctaacaaaaagaaaagcgtgagccatatcagcaatactcacaagatattgtcaaacatatttcttttaacacactttatattatgagtttaatatcatattaacagtataaaataattttacattattatttaattataatttttgagggtatctcacaatagattgtggctcgacaattttactccccttttgtttcgatgcctttcttagttcttatttcttgtacataggtgattttatgtggcctagagagacacaatgtatttgttttcc

SEQ ID NO: 27153 - DNA, 1790 bp, Glycine max
  Clone ID: TF_GmC584_2
ctccactgtgtgtgttgttatcataccctagaacaacgccacttaaactggatctcccttaatttgtatattttattgtattaatttttcttaattaccctctaaatattttcatcatcaggtggatgatcacaaggtcttgatgggttccaatggtggaagtagtaacaataataaggtaatggaaaaaccaggtcaaaatcaacttgtgcagcagcagcaacatccagaaaccctcaagtgccctcgttgtgactcatcaaacaccaagttctgctactacaacaactacagtttgtctcagcctagacacttctgcaaagcctgcaagcgctattggacaagaggtggaaccctcagaaacgttcctgttggtggaggctgcagaagaaacaagcgtgtaaagcgtccaataacaagcccttgttctgccgccattgacactgcttctaattcttctaactcttcttctgctcccactgctgctgcttcactacaaccccagatcgacactgcttcaacctcaaatcacatcaaccctttgttctatggattaccaagtagctctagcgatgtgaatcttccattgttctctaggttcggttctagaatctccagttccgggtttgatcttcagttgaataatgcccttggattaggtttttcatccggggttttgtccaatgaagctagtgataataacggttacagaagcgggtttggttcaaacaatatgcttctttcaagttatacatccactactactactactccagctatgtcttctcttttgcttcaacagaagttcatcagtggtggattgaaaaatgatgctgatagcagcaacactttccagcatggcttaagcttaacctcactagagcagttgcaaatagcaagtgatcatagcagtgaggcagggatggtggcattaaaagatgtgaaagtagaattaggacaaaacaacaacaggttggagtggaatggtggtgctttccaaagccagatccagcatgtgggcttgtacgatcctttgctttattggaataattcagcaacagctttgggtgtttggaacgatcaagctgctaatattggttcatcagtcacttctctgatctagaaaaatacaatccaatcgaatgaagaagtatggttttcaagtttgtctcccccttctgtcttgttgctgctacttttttcttttgttttgtttttcttcttttttttgggccaaaatgggaaattaaagggaggaaattaaggtgatacttgtaagaaaatgggaaagcaaaaggtgagaggagtttggatcggagcgatcatgtcagctgaatcctgcaaatatatataaatttctcttacaagattgggaaaagaattgcatatattgctctgagaggaacctgggatcctcttctctcatcttctcacagttgctgcgcagtgttctctacggaaatcctttctgttgaattaaagttccccatagttaagtaagttggtctttcattttgttatgtacatatggatgacatttcttttctttttcttatcttgtaatgaaccagctgtggttagctaggtggggtaggggatttactgggtatgatgctgtccttgaataaaggaactaatattggtttcatttttgttaactttgtgatgatttttgttttggatagggagaatgggaatatattgggtataatggtatagaagagagggggattatttacttggttttagatgattaatgagttaatgtatgtcggtggtttaatttggtg

SEQ ID NO: 27154 - DNA, 464 bp, Glycine max
  Clone ID: TF_LIB3242-349-Q1-J1-C1
tccatctttgttgcttttgactgtcttttcttctccgaaatattcatgcatggctactaccgctcactgggcaaacatggtgttcgatttttttctcttgtcttttctttgatgcacaaattccgagctgttcattctgagctggtgagatccatggaagatataggtccgaattcatgcacaaggccagtgacagagaagaaagcaagacccctagaacaattgaattgtccaaggtgcagttcaaccaacacaaagttctgttattacaacaactacagcctcacacagccaagatacttctgcaagacttgtagaaggtattggacagaaggagggtctctgagaaacgttcccgttggaggtggctctaggaaaaacaagagggtcacctcatcaaaggttcctgacttgaatccaccaattagcctctcatcagtctcagccatttcttcccaaaaccc

SEQ ID NO: 27155 - DNA, 1995 bp, Glycine max
  Clone ID: TF_GmC108_1
cccagtgccgattcttcctcccaagaaaccttcccaactcctccacttccttagacttgcccacccttttcgctgcttcttgctatctcaccctcttgctaccattcacacttctctatctaccagataattttttaccagactacaactttatattttccagattgaactgtacttgcaaaaaaagatgctcacttatcttctctctcaactttcataggcctttcttattcttccttctaagaaaccacttcaaatcatcaacttccctagacttacacaccctttgggctgtaacaagcaatctgatcctcttgttatcattcagattgatttctcttctagcacctcgatcaaagggctaaaaaaatttgctacttattgcacttttcttttcatggtttgatacatcttattgattttagtgctatttcaaggggtgaatttgagacatgggtttgagttctaagcaggtttctagcagtggacttgattggaaacaaaccttgttggaggctcagaatttggaacttccaaagcctaatctgatgaggaaacaacagcagcagcagcagcaacaacaacaacaaactcagccgaattcagagtctttgaaatgtccaagatgtgactctaccaacaccaaattttgttactacaacaactacaacaagtctcagcctcgccatttctgcagggcttgcaagacgcactggtactaaagatgaaactctactccatgtaccagtagctagttggaggatcatcttggctgctataacatcaaaaacttaactatcacacaaagtcaccaccaccacaccaatttcacatcagcattctacttggacacaaacggtcacgtaccaacttgcactttgcgttgatccattcatcatcaattagaaggccaactctacattttcgaaacctcaagcagcttgattgataccaacaatgttttcgtagtgtcaactactcttctattctccactacttctaactatgctgaggaagaatttacagaaaaaaagaaaccaagcatcaatagatttatttaatcttctacgatataatgtagtccctacaacttcacatctgccattggagatagatgaaagccaaagcgttgttttccctttctcagccttaagcagaacttttgacacaatccctggttcagtagtgtcaacctctcttagatcctccaatgtttataactatggggaggatcagtttaaagcaatagaggaaccaaacatcaatagtactactgctactatagtgcctagcacaggtggcaccaacaacacacatcatccatgggagatagcagcagcaacaagtggtgttggcttgggaacttcttcaaattcaaactattggaattgggaggattttgattcattggtttcgactgatctaaaagatccttgggatgattcagatatcaaaccctgagaaccaaacaataagcaacaacacatcatggtagtgtccatagattagttatttaattcaattggggtgttatttgtgtttcatacaggttagtaaatgatcttgttttttttcaagatggggcatgagaagtatttggagctgtcatgttttagtttcagcttcagcttcaagcaaaagggtcccaaaattcctgacaattagttgcaacccactctgtttgcctctttgttcatctctcttatcatttcctctaatctctaataataaaatggtgtattaatgtatgcaaacattgcaaagtagtgtctagcattatttatcaatataggattttgttttttttattttttattttattttttggggagttttgtgagtgctttgtgatgggagtgatatagatatggggtctgctccagcactgctgaactgacagaatgtgattggaagattctttggacatgtatatatcttggaatgatattttatcatacagttttattgctcatgattcgttatcatctccaaaaa

SEQ ID NO: 27156 - DNA, 1637 bp, Glycine max
  Clone ID: TF_GmC66473_1
ccccatcctcattctctttccaatcctaccatcatttctctttctctttctttcataaacttcaccctttgaaaatcctttctttatcttcatccatccataggcacagctcaatggccacaggatttgttggtgaaagcaatagaagctattgtggtgccaaaaacatgtccaaaggatcagcaaagtaagtcaaggccacagaaggaactcgactttatctttccatggtgtcattcaattaacaccaagttcagctactacaacaactacagtggcactcagcctaattgtttatgcaatgcttgtagatagtattggactgaaggctgaactaccttcaacatccctgtaggcggtgcctccaagaaaaaaagctattcatcatccaaggtgtcctcacattatcacaatcaccttaaacatcattcactacattctcacatactttctgaatttgtccaagagttgtataaggtatggcacactcaaaaccctaatagcaataatgctattcatcaatgccaagatctcaatctggcttttccatcctccaccccagatttcagaaaaatctctgaattggtccaacaaaacaacaacaacaacaatagtagcaacaacagcatgtcagcttcagcttcttcttcttcaaccacaactacaacttccacttctcacctttctgcattggagcttcttactgggatcacttcaagttccagtgctggtttgacttctttcatgcctgtgccggttccatctgatccaaattctatctacacatgtgggtttcctctgcaagatttcaagccaaccttgaatttctctttggatgggatcggaaacgggtacacaagccttcagaatgttcaaagtgggaggctcttgtttccatctgatgacttaagacaggtttctagctccaccatcaccacaatggatcagaaacaacaaggagattcaactgggtattggactggaatgttaggcggaggatcatggtaattaatcatcaagagagtcataaagatatatatttatttacttaatttcttctcttgctttctactaagttaattttccttttgaacttttttcttttgggttttaatgagtttccgtcagatcatgtggggacttcacttgtttggatttcttcataactggctaacagctgataggatcgattcatacatgagtttcttttcctcttctgtcaattccttatatgtatatctggctccgcttatatctcttcatgaccaagtttattttgggatcttgaaatgaagcttattttaggcaggcttcagtagtacttggaaaattaaaacaagggttacattacatttgattatatgtaatgatagaagagatcaagattaactccatttttttagggttaacaagtagctagaaaggggggccgggtaaattaagtgttattgctgttatagtatttcatgtaatttcttctatcactgaagaagggcaacatcatcaattgatttgattgtctagcttaccggattcgaaaatgtataatgtccaagaatatattattattattattaaataaattattggtatgctttttttatgattaataaattggcgtgttatgtttccattgt

SEQ ID NO: 27157 - DNA, 404 bp, Glycine max
  Clone ID: TF_LIB3167-024-P1-K1-C9
ctcaggacaatattggacttataattgtgagagtagtcatggaggggatggctcccaattcatgtgcaaggccagttgtagagaagaaagcaaggccacaagagcaactgaattgtccaaggtgcaattcaaccaatacaaagttctgctactacaacaactacagcctcacacagccaagatacttctgcaagacttgtagaaggtattggacagaaggagggtctctgagaaacgttccagttggaggtggttcaagaaagaacaagaaggtctctgtgacagcttcatcatcaccaaaggttccagacctaaacccaccaaaccactcagctatctcatcacacaaccctaaaataatgcatggtggccaagatctcaatcttgctttccagccatggaaa

SEQ ID NO: 27158 - DNA, 1099 bp, Glycine max
  unsure (1)..(1099): unsure at all n locations
  Clone ID: TF_GmC55946_1
ccacgcgtccgcggacgcgtgggttatatgtcaatccccctccccccaaattcattcccatcgatcaaattcaacgtcctttggaacgcgtgtgattcgtataaaacaaacacacatatcacataatgttcccgcagagttttaacattagtggcggtggtgccgggcttgaacaactgttgcagcctcatcacttcccatctccaatggaacaacaacaacaacgttccaggtggaaacccagcgtcgaggtggcacccaattgccctcgctgcgcctccaccaacaccaaattctgttactacaacaactacagcttgtcccagccgaggtacttctgcaaaggctgcaggcgatactggaccaaaggcggctctctccgcaacgtccctgtcggcggtggctgccgcaagaaccgccgcggaaaatcgttgcagtcgtcgtcgtcgcggcaacaacgcgcttctagcttcgtttctggggacacagagtcatcatttagtgatgcccaacagattaacaacgggtctcgtgatatagacatggctctcgtgtttgcaaaattcttgaacccaaaaccaaccactggtgaggataacaatggctcatcttcgacttccaacaattttacaccggaaagtgtagaaattgagaatgatgcagtggttcagtctcagaataaggcttcatccgatcctgttattgtagagtctgagaatttgagtttgggtgagattgatgagttggagaggttattaggtgtgtgtggcgatgaagatggtctttggtctgatgctaccttgtcttcttcggttacttgggaaccaccattgaaggagttggaatactcgatgccgttgaatgaggatgatgatgatgctcaattgttacccatcatcacttctgcatccacaatgatcagcgactcttgctggagtaattggagttcttttgatctttcaaccatggaagccttctcatcaagtccttcttaatcaattggatctgattttaattacatttactttttatttataagtttatgattttcttcttattattgtaagagaagagaagaannaganatacanncnngggg

SEQ ID NO: 27159 - DNA, 1556 bp, Glycine max
  Clone ID: TF_GmC6535_1
ccctcgctaccgcccacgcgtccgctttctctgcgtgcaagctaacctcattcatagaccatattgtacgacaaaaaccatcattatcctctccttctctctctccctccctagggattgttttgcttgctttatatatatatatatatatatatccaaacaagtcttgtggtttctattaccaacctcacttcgcaatttgcatgactcctccctccctaagatatctccattctcaaccttaatttgcactctcacgctttccctttcttctttttttcatgtcaagtactaccacttagacactcagatagatacacccacatataaaagcacgcctttgagattctaataaccttagtgtgttgtgcttagtccgattctgattgtatgaatgaatccttctagtggacaaccccagcaaatgtctagccagtcagtggagaagaagccaaagcctcatccagaacaagctctgaaatgcccaagatgtgactccaccaacacaaaattttgctactacaacaattatagtctttctcagccaagatatttctgcaagtcttgtaggagatattggacaaaaggaggaacactgaggaatgttccagtgggaggaggatgcaggaagaagagatcatcatcattaaagagggctcaagatcaaacattgacacccaatcttaatccactcactacactccctcatttgtcttatgactccaatgacttcactctagcagtagctaggtttcaaaaacaatcaagtggacaattgggttacaatgatcgtgatctttcaactttggggaaccccaccacaggctcattttgtgacattcttggcaattcaggcatgaatccctcctcagcaaacccttcatttttggatgcaattcgaactggtttccttgagacacaaaaccatcttcagaatttgtattgtatgtatggaaacggggacttgggggaggtggataatggcaattctggtgtggttggggttagtggagagatgatgctcccttacgatcaagtgataatgagcaatgcaacaactcaatcagtgagtgtaatgaagcaagaaatgtgtagtcgcagagaacaaagtgaaaggagggtgttgggggggttcccatggcagattaatgcagacactaacattggcgaacttgactcaggaagaacaattgcaagttggaacagtttcacaaattcttggcacgggcttctccaaagtcctctaatgtagaccccccgccacaagaaaaatcagaaggcacttatttcctctaatttatgtttgactaatatgtcagtcttaattttaattaaagtactgtcaatcatcttgagtagttttgggttaatagggatttaattcacttgggtccactttctttacttgtattgttttccctccgtttttttaattagctcctcaaaaactgtcaaattttctgtactattaaattatcttcttaatgatgaatagactaatgaaatttcagatttgtagtttgccaaccaatgcagtgaaggtggagggaaatagt

SEQ ID NO: 27160 - DNA, 1627 bp, Glycine max
  Clone ID: TF_GmC476_1
gggcttacacttgtaaaaaaaattcacagcagcctaatcagcaagcaggaattggcactaataatccacagattccaccacctctgcagccgtcaccaccttcatcggtgacgacaggtatcggaggtagtgactatattcaaggctctatcagaccaggatcaatggctgatagagccaggatggccaagatacaccaacccgatgcagcactcaaatgtccacgatgtgaatccacaaacaccaagttttgctactacaacaactacagcctctcacagcctcgccacttttgcaagacttgtcgtcgttactggaccagaggaggtgcactcaggagcgtgccagttggaggtggctgcagaaggaacaaaagaaacaaagggaacagtgctagatcaaagtctcctatgaaaccttcagcaagtgctaattcttcttctagtggctgcacccctgatcatgtgatgatgactcatttgccaactccaataacaccaactcaattcccattcttggcctctttacatcattataatggcgactacgtttctgggggcattggatctcattttggggcgatcacaacacctttggtggctagaaataatggcaacaacactagtgatgttgagtttcaaattggtactagttcagcttcatcacttggtaatattagtggaggggctatgttgtcaaataatggccttggtgatcagcaatggaggtttaacaatctgcaacaagttcaacatcagttccctttcttgagtactaattttgagccacaaattggggtgtttcagtttggtggtggagaaaataacaatgctgaaccgccaagttatgcaaagggtcatggaggccggtttaataatattcgttctaaaatggattctattaattctagtgtaagtggaatagtgcctcagcttaatacaataaagctggaagagaatcaaggtttgagtttgtcaaaaaatctcttgatgactagttcgggaaatggtgtactttggaataatggaagtagtggcaatgcatggagtgaggttcctagtttcattccttcacctaaccacttgttgtgatcattggaattaaactactccaattctactgctttgctttatttcctactcgccacacagatttttatgatcatagaaatgatctaatgtataagagttattagaagaacctattatatcaccttgctaactttggaacggaattctactaccctctatgcatgagtcttgtcttttgaggataaatgggatggaaggataagaagatcagaacactttgtgtaacatcaatgtgacgataaaatggtacgcaactcttcaagtaatttcctttttccatcgttggatgtcgtcgttgatatttttttgttgtactccaagtatgaacaagttgagcaaaagtattggtgtgtaattgtttatatatatgcttgtgttgtgatgacatgagcggttaattagttgatattactaattgtgtgaagctatgtggactagcctagaaggctttttatatgatgtcatttttttttatatttgctcattgttaacgatttgcaccaggtataatgtaagtttaagaaactttacacatc

SEQ ID NO: 27161 - DNA, 1319 bp, Glycine max
  Clone ID: TF_GmC551_1
cttttcgcgattattttgtcttctttccatttccctcctcacttgttctgagatcttgaaaaaaaaaaaaaaaaaactgttcgtctccatcaacctctccaacggaatagatatctctttaccctattttctcgcctcttgtttgccccctcctgcccccgccggaacccttgccttgccagcccggtgcccccccctccccaacctctgtcactcctacccctcccacctctcgcagccacgccattttgtgtttgaaaactgaagacccttttaggaataggagaatgcaggatccaacgttgttccaacccatgaaaccccactttccggaacaggagcagcttaaatgcccgcgctgtgactccaccaacaccaagttctgctactacaacaactacaacctctcgcagccacgccatttttgcaagaactgcagaaggtattggaccaaaggtggtgccttgagaaacatccctgttggtggtggaagcagaaagaacacaaagcgatcatcttcatccaacaacaacaccaaacgcgcttccccatcacccccagtttcctctgcacccgctccagaacccgaccctacccggattggccccaccccggttgttggtggcgggagtttcagttcccttttggcatcaagtggccatttgggcctggggaacctcttggagggtctgaattcaagtgggtctaatctgaaaactgtgcaaatggaagagtttggggagaatgttagttcgggtccagtggcggatccggattcgggtcggaatcccgggttggagatgcaaagcaatgggaatgctgagagttttctgagtttgcaaaatggtgattcaggctgttgtaatggtactaatggctggtctaaccttgctattttcactcctgggtcaagctatcagtaatgacaaattaatgaatatgattaccctgatctgtatatttagacatgttgtgaaaatagttatatatataattatattactggcttaagtttaagcatatatgtcgtgctattatggaggattacaaaccagaaggccactgcaataggatcactaggtaaattaagtttcttttcttttggatttttatttttatgttttgtggttggtgttcttcacatatatcaatgatgcaagagaaatggaaagcaagtcattttttaggacagggtatggggagatatgaatgttattgtagtgagattgttttcagtctcatcacgtacaggaagtgttgccatggcttggagattctaatttatttaatctatctatatacgagtattttacacgcgc

SEQ ID NO: 27162 - DNA, 1411 bp, Glycine max
  Clone ID: TF_GmC551_2
gatcatttcatctccatcaacctctccaacaaaataaatatccctttaccctattttctcgaatcttgtttgctatctcctgactccggctgaatgcttgccttttcagccagttttcctccgtcttcccaacctcaatcacacttatccatcacaccccatgtaacaactttctgtctctagctttgagctttttctttttcttttttcttcaaacacaaaacaactttctggaattagttacttctactctcaataaagtttttttttttttttttttttatcatcagcttcatttattagtattttggtcggttctatatccttcctttttctttttgtcttctttccactttcccctcactttgttgtgagatcttgacaacaaagtgcgtgcttgaaaactgaagtcccttttaggaatacgagaatgcaggatccaacgttgttccaacccatgaaaccccactttccggaacaggagcagcttaaatgcccgcgctgtgactccaccaacaccaagttctgctactacaacaactacaacctctcgcagccacgccatttttgcaagaactgcagaaggtattggaccaaaggtggtgccttgagaaacatccctgttggtggtggaagcagaaagaacacaaagcgatcatcttcatccaacaacaacaccaaacgcgcttccccatcacccccagtttcctctgcacccgctccagaacccgaccctacccggattggccccaccccggttgttggtggcgggagtttcagttcccttttggcatcaagtggccatttgggcctggggaacctcttgaagggtctgaattcaagtgggtctaatctgaaaactgtgcaaatggaagagtttggggagaatgttagttcgggtccggttgcggatccggattcgggtcggaatcccgggttggagatgcaaagcaatgggaacgcagagaattttctgagtttgcaaaatggtgattcaagctgttggaatggtactagtggttggtctcaccttgctattttcactcctgggtcaagctttcagtaatgacaaattaatgaatatgattactctgatctgtatatttagacatatgtcgtactattatggaggatcacaaaccagaaggccactgctataggatcattaggtaaagtttctcctgttttggatttttatatttgtgaattgtggttggtgttcttcagttatatcaatgatggaagagaaatggaaagcaagtcatattttagggcagggtatggggggtatatgaatgttgttgtagtgagattgttttcagtctcatcacgtagaggaagtgttgccatggcttggagattctaatttatttaatctatatatgtgtattttacacgcgcagtttgtcaa

SEQ ID NO: 27163 - DNA, 1303 bp, Glycine max
  Clone ID: TF_GmC1650_2
atttcttctaaaactttattttctctttgcatcattcataaagtaataagccagcagatggctcgagtaaagccattccacaaacgaactaaaacattctttcttgcactaaagagcagctgcagacaaacaagtaggttggattagctagtgagatcctccatggaagatatcggtccgaactcatgcacgaggcaagtggcagagaagaaagcaagacctcaagagcaattgaattgtccaaggtgcagttcaaccaacacaaagttctgttattacaacaactatagcctcacacagcccagatacatctgcaagacttgtagaaggtattggacagaaggagggtctctcagaaacgttcccgttggaggtggctctaggaaaaacaagagggtcacctcatcaaaggttcctcctgacttgaatccaccaagcctctcatcagtctcagctatttcttcccaaaaccctaaaatgcaaggagtccatgaccttaatctagcttttcctacagctatagacaattatcatggcatgtctccatatgttgagatgccaaaacttgaaattggtggtgatcacagtactagtcatagtcaccaccatagcccttctgctgttgagctactacggtctggcatggcttctaggggtttgaatccttatgctcctaattccatgatgtcaacctcagatcattccctttatacaactggctatcccatgcaggaaattaaaccaaaccttagcttttcagttgatgatgggtttggaaatagatcatatggggttcaagagaatggtggtgggaggcttttgttcccttttggagacatcaagcacctttctgcgggtgttgaagtggaacacaataaagaacgaggaaacaattcaactggatattggactggttggtgaagggtcttcatggcaaggaaattatgagaagaaatattgagaggacatataaaccttcactgttttctttatcttcactgtttcgatctatcctttctcacatggatcattatgatctatctgcttgaagttgttcagatcactaacaatagggttactctgttttgtatacattattattattactacatttctattcgaacaatagcaatgtgagggttttacagctcatcttggttgcttttaatgtttagagagatagatagaagaagaggtgaatatagggtctgcttttgttcaagtcatgcaatggcatgtatttatgaattcttctgtcaggagtagatacatatctatctatcacctttattgatgtatgcat

SEQ ID NO: 27164 - DNA, 855 bp, Glycine max
  Clone ID: TF_GmC1387_1
cgccaaccaaaaccttctccgttaagaataactctctctctctctctctgaaatgggcgaggaatctcaagggattaagctgtttggtgcgctgattacattgaagggtggggaagtaaagaaaggagaaaaaggaagcgaatatgagagggtggagaagagagcagagaagataataccctgcccgagatgcaagagcatggaaactaaattctgttacttcaacaactacaacgttaatcagccgaggcatttttgcaagagctgccagaggtactggacggctggtggggccctccgaaacgtcgcggtcggcgccgggcgccggaaggctaagtcaccgtgccatggagccggtgacttcatggatgggcgtgcctatgaaacttctgaagatgaaaacaggtttgagatgaatcagggacacgttgccatgcccaacactcatttccgccagatttttcaggccaagcgccagagaatcacctcaggagctcagcatcaaggtcaatgaaatcatgtacgaaaacacaacttggaattattatgaacaagaaattaaggacttcagcagcgagggaccaaagcgtgtcttgagaattaagatgtgaacacacctaaaaaaatgatgatgttcaactatgaggagacgtgagatgctgagattggttttttttcctcgaagctcatgtccattgtccataagcaggttaattttaaggcatgaatatagactgcggataattggttaagtgggttacacattatagctgtgacataagattgcgatccacgaaattgatgtatgcagatatagatgaaatattagtcaatggacaaagagatagaggattg

SEQ ID NO: 27165 - DNA, 830 bp, Glycine max
  unsure (1)..(830): unsure at all n locations
  Clone ID: TF_LIB5119-021-A1-PF1-F7
gatactaatatttcctccctcaacgccaaccaaaaccttctcagttaagaataactctctctccctctctctgaaatggccgaggagtctcaagggattaagctgtttggtgcaatgattacattgaaccgtggggaagtaaacaaaggagaaaagggaagcgaatatgagagggtggagaagagagcagagaagataataccctgtccgagatgcaagagcatggaaactaagttctgttacttcaataactacaacgttaatcagccaaggcatttctgcaagagctgccagaggtactggacggctggtggggccctccgaaacgtcgcggtgggcgccggtcgccggaaggttaagtcaccgtgccatggagccggtgtctatgaaagtacttctgaagatgaaaacaagtttgagatgggtcagggacacgttgccatgcccaacactggtttccggcagatttttcaggccaagcggcagaggatcacctcagctcagcatcaaggtcaataaaatcatctacgaaaacacaacttggaattatcatgaaacaagaagaaaagacctgagcaacgacggaccaaagcgtgccttgagaaattatgatgtgaacacctaaaaaaatgccgcggctaatcaatatcgatgatgttcgactatgagaagacgtgagatatatatgccgagattagttttttcctggaaactcaagtccattggtcataagcagggttattttaaggcatgataattggnntagtgggttacacattagctgtgacatgattgcgatccacgaaaatgatgtatatatatatgcagat

SEQ ID NO: 27166 - DNA, 592 bp, Glycine max
  Clone ID: TF_GmC52517_1
ccacgcgtccgcccacgcgtccgtacggctgcgagaagacgacagaaggggacactcaagcccctcactccaaaacaaaacctaaacattttactcttttcggttttttttttttgtttcacacatgccgtcgtcgaattccggcgagagtcgccgagcgagcaagccgcagagctcgggcggagcggcgccgccgccgccggagcaggaaaacccgccgtgcccgcgatgcgactccaccaacaccaagttctgctactacaacaactacaactactcccagccacgccacttctgcaagtcctgccgccgctactggacccacggcggcactctccgcgacattcccgtcggcggcggcagccgcaagaacgccaagcgctcccgcacccaccacgtcgccgccacatcatcctcctccacctcgtgcaccatgacgtcagcacaggaacaccacgcacacactttattggcccccgtcgcctccacgcactacggagtacttgacggcgacgttaaacagactagcaacggcaacggtaacgtgtgcgggagcttcacttcgttgctgaacaacacccatggctccggg

SEQ ID NO: 27167 - DNA, 1950 bp, Glycine max
  Clone ID: TF_GmC108_2
ctccttttatcctttagattgatttctcttctcacatctcgatcaaacggataaaattttccaaattgccaccttttttctcatcttattgcatagaaaaagaaactattgttttctggttacaagtgctttcaaggggtgtcttttaagatatgggtttgagttctaagcaggtttctaatagaggacttgattggaaccaaaccttgttgcaggctcaaaacttggaactcccaaatcctcctcctatgaggaaacaacaacaaactcagccatcagagcctttgaagtgtccaagatgtgattctattaacaccaaattttgttactacaacaactacaacaagtctcaacctcgacattactgcagagcttgcaagaggcattggactaaaggtggaactctacgcaatgttcctgttggtggtggaaggaagaataagcgagtcaagaaatcaaccactccagcgatagccaccacttctattagtaccagcacctcaaatgccaacatggatggtgagttgaataaccccatcaccattccttctctagcagtggatgatcacaaaaccacaccttcctctctctatcaatatgtgtgcctgccccaacagatgatgatgagtaccaaagactcagaagaaggcaaagactttggtattggtaatggcatctttctgagttcaactgtgccttttcctcaaagccaaagccttctgttccccttcacaacatcaaactcctttgacccaaacctatgtgcaatatcatcctcttttcgatcctccagtgtgtataactatggtgaagagtttaaaataatggaggagccaaccctcaacagcataatgcccaacactagtggaagcaccaacacacaaccatgggagatagctgcaacaagttctggcatggaaatgtcaaattattggacttgggaggacattgattcgtttgtgtcaactgatccaaatgttccttgggatgattctgatatcaaaccctgacaaaagaaaagaagaaaaaaatgaaaatagtaacccatgtccttagattagttattaattaattgtggcgttttgtgtttcacacggattagtaagtgttcttgttttcagatggatcatatttcgatattatgccacactttgatggtttgaggagatatctgcaaatcacaaagccatgagaggaagtggcagatggatcatatcatattatccattgatctttctgcacttgtaagtcttgcaaagagaagtatttggagctgtcttattttagtttcagcttcagattcaagcaagggggtccaaatccaattaactgtaacccaatgagttttcctgttcatctctctatcataatttcctgtaataaaatgttacattaatgttgtatccaagtagtttagcattattcacaagtatagggaatttttttttgtttgttttgtagtatttctttaatggtttctgagtgccttgtgatggggattactattgagacatggggtctgctccagcacagctgaactgacagaatgtgatggaagattcttgtggatatgtatatatatgcatgtgttggaaattggaatgatatagcatggatttgattggccaagattcatccccaccacttgttgagaatcattctttgcttttgggccataaggaattctggttccagagtagtttattgatgttatgatattctgttactattatattcctcaaggatcgtttatctttgggcttatacttcacatggtgctttaatatttgttcctgtttaatacaacagtgtgtgtatctttggccccccgtattttcagtgtttgtttatgcttgtcgtttcttctatgattgcatggccatggaccaacagtagaaccctttattgtatgaatttttgccaatcatagaagatatcctcagggttttg

SEQ ID NO: 27168 - DNA, 457 bp, Glycine max
  Clone ID: TF_LIB3242-248-Q1-J1-F9
attctcaaaccctaaaataaattcagcaaatcacaaaagagaactatttattcctattccttgtatgcaatcttgctgaatataccagaattgttttcattattactactcaacaatttctttctttctttctttcttttggttttgcagcaacaaaatcaacaccaagcaaatggaagtaacagtcctcatgagctgcttccgccgctgcctcagccgccacaggcccctcacgtgggggttgaatccgagcaaatccggtccggtctgatggcggatcgggccaagattccggcaccggaaggagttctgaagtgtcctcggtgtgaatccaccaacacaaagttttgctacttcaacaattacagcctctctcagccaaggcacttctgcaagacatgtaggcgttattggacaagaggtggtgctctcaggaacgttcctgttggtggaggat

SEQ ID NO: 27169 - DNA, 498 bp, Glycine max
  unsure (1)..(498): unsure at all n locations
  Clone ID: TF_GmC52517_2
cnctgttttctctctctctctctcgcactctgttctcccataaaacccccccctcacccacccaacattcacactcaagcccctcactccaaaacaaaacctaaacattttactcttttcggttttttttttttgtttcacacatgccgtcgtcgaattccggcgagagtcgccgagcgagcaagccgcagagctcgggcggagcggcgccgccgccgccggagcaggaaaacctgccgtgcccgcgatgcgactccaccaacaccaagttctgctactacaacaactacaactactcccagccacgccacttctgcaagtcttgccgccgctactggacccacggcggcactctccgcgacattcccgtcggcggcggcagccgcaagaacgccaagcgctcccgcacccaccacgtcgccgacacatcatcctcctccacctcgtccaccatgacgtcagcacaggaacaccacgcacacactttattggcccccg

SEQ ID NO: 27170 - DNA, 594 bp, Glycine max
  unsure (1)..(594): unsure at all n locations
  Clone ID: TF_GmC154178_1
tacggctgcgagaagacgacagaagggggtatagagacacatctttctttattccattggatctgaaaaagaccagttacccaacctcatacatcattttattagttcccaatcaccctctttgatgaggatcacaggtgcccatcaaagacacacaggaccctcccttcctttccttccttctatttcttttcctcatgcatgaaatcattcaattggtgagtatctttgcctctgcaaaaggaaactggaaactgaagaaactagctaactttcccgccccacaaggccaaaaaacttaactttctttcacctctctcaccactttttcctctctcaaaagatgtcacccgatgacacaccacctccaaagcctgccacagcaaaagaccaagagactcaaagttccggtggtggcagaaaaagctcctccacaaggccccaagagcaaggtctcaagtgtccacgatgtgactcacctaacaccaaattctgctactacaacaactacagcctcacacagccaaggcatttctgcaagacatgtagaagatactggacaaaaggtggggctntgcgcaacgtccctattgg

SEQ ID NO: 27171 - DNA, 1907 bp, Glycine max
  unsure (1)..(1907): unsure at all n locations
  Clone ID: TF_GmC196_1
cgtcaaaaacccaacacaagtaacgaagaagtcactgccatctcgcaagtttcgatccccagaaggaaaataaaaatgcacgaaattagagaccctgcaattcggctcttcggtcagaagatccctttccctgaagatgttgacaaagaagaagagagtgctgaggatagagaacaagagatggaagaacatgaagacgaaggagacaaggatactagagttgaaaatgttactaaggaagagctagaagctgatcctcctctagatgctgaagagactaagatttcaggcacatcccctgaggctattgtgaaccccaaaacaccttccatagaagaagaaacagcaaaatcaaaaggtggcaaatcagagaaggaacaaggcgatgcagccaactcacaagagaaaaccctgaagaagcctgataaagtgctaccatgcccccgctgcaaaagcatggacactaaattctgttactacaacaactacaatgtcaaccagccgcgttatttctgcaaagacggctgcgagaagacgacagaagggggcaccatgaggaatgttcctgtgggggcaggacggcgaaagaacaagaactctacctcgcattatcgccacatcactatctccgaggcccttcaagcagcaagaattgatgctcaaaatggaactcatcttccaactttgaaaggcaatggtagagtcctcagctttggattagatgcacatgcacctatttgtgattccatggcatctctcatgaatcttggagagaaaaaggctcttaatggcacaagaaatgggtttcatcatggctttgaggatcaaagactccccgttccttgcaaaagtggggaaaatggtgatgactcttcaactacatcctccattacaatttcaagtcccaagggagaaaataacaaaagcaccttccaacaacaaccattgccccaaaatcatggtttccttcctcaagttccatgcattcctggtgttccttggccctatacatggaattctccagttcctccacctgctttgtgtccttcaggatttcccctaccattctatcctgctacattttggaattgtggcatgcctgggaattggaatgttccatggttttcctcaagttcacctgcttcaaacctcaagtctccaagctccagtcccaattctccaactttggggaagcactcgcgggacagtgacatgattaagcaagactctttgcacaaagaagaagcttcaacgccaagaaacgggagtgttttggtcccaaaaacgttgagaattgatgatccaagtgaggctgcaaagagttctatatgggcaactctaggaattaagaatgagtcagtgagtgggggagctatgtttaaggccttccaatcgaagaagggtgaaaagaatcatgttgaagcctctccaatgttgatggctaaccctgcagctttatctagatccctcaattttcatgaaaactcctgaattagtggcactggtgaaaagtccttacagcaaagttagtcacttcttgagttatttgtctagctagcaagagacggtgaccatctttgagtgacattgaccttgtatagaagaagcgaaagggtggtagtctctgatttcctcggcacaagtgagacgacgaggactaattctgtctttaatttcattcgacaatattaaaatagagtatataggttttttttcatgtgcttagtttgatgagtgagttcatgtatatgtacatatataaaaatatgtgaaatactgatctttagcctagagagacggaaaagatcttttactttcttgtagtataaaataaaaatcctgactgtagaaaagtaaataattttctttngagnataaaatangaaatnnnnnnnnnnnnnnnnnag

SEQ ID NO: 27172 - DNA, 453 bp, Glycine max
  Clone ID: TF_GmC128906_1
cctgcatgctcctccaagccaccaccaaccgctacctatagtttctagtatatatacacaaaacaacacaccccacaaacatcacagacacagacacacaaaagtcaaaagggtcgcgatggagcaaggagtcgaagaaggaggtggcatgaataagatacctcgggattcaagagtgaaggagataagacaaggtgatgcacaaattcaggttcaggctcctcagcaaccccaaaagtgtcctcgatgcgactctctcaacaccaaattttgctattacaacaactatagcctctcacagcctcgttacttttgcaaaacatgcaggaggtactggactcaaggtggaaccttgaggaacgttcctgttggtggcggttgccgcaaggggaagcgcgccaagagttctaactcatcttcttcggagaatatgaattcttcttccagatcact

SEQ ID NO: 27173 - DNA, 820 bp, Glycine max
  unsure (1)..(820): unsure at all n locations
  Clone ID: TF_GmC261506_1
gtccggnaatctcccgggtacgacccacgcgtccgcaaaacccaaacctcaataaaaccgaaactcacaaacacttaaacagaggaagtaacgaaccaaccaacctgacacagccgccacaaccataaacattagcataaacaaaaaaccgttaatctcgcgcgttcttttttgttgttgtgtcgtgtcccttttggatctccagaaaatgcaggagaataaggatccagcaattaagctcttcggccagaagattgccttcgccggagaagtcgaccctccggccatttccgccggcgaaattgactcgccgccggcgatggatgtcgacaaggacgaagaagacgactttggtgactcagagactgaagatgagaaagacaaggatccccgagctgaaaaagttagtgagaaaacgaaagaagctgatcctcctccaaatgctgcagactcaaagaagaccccagagggtattcagaacccaaacacaccttccatagacgaagaatctgcaaagtcaaaaaccaacaagtcagagaacaacaacaacaacaaaacactgaagaagccggacaaaattttgccatgtccgcgctgcaacagcatggacacaaagttctgctactacaacaactacaacgtcaaccaaccacgctatttctgcaaggcgtgccaaaggtactggactgctggcggcaccatgcggaacgtgccggtgggagcggggcgaagaaagaacaagaactcagcctcgcactaccgccacatcacaatctctgaagctcttcaagcggccagaattgatgcccccaacggaact

SEQ ID NO: 27174 - DNA, 1224 bp, Glycine max
  unsure (1)..(1224): unsure at all n locations
  Clone ID: TF_GmC433_2
aataaggatttttttttttcggttttaaattttcttctttttaatggaagntagtaaatctaaccaacccaccccaagaaaaagaaaaagtagcagaaaaaaagaaaccaaaacctaagcttgaaggaccaaaagatgcaccttaattaaacgagggagagagtactttcttcttcatatatagctttttgaaaaagatgcttcatctttttttctagatcagagaagtgactgaaggaccaatgttaggttgatcactccaagcacccaaacccgttgcagtgttccaataaagcgaattaggatcagacaaacccacatgctccatctggttttgaccaccaccaccattgttgttgttgttgttattattattgctccactcaaacctgttttgtccttcacctttcacttcttttgagccaatattattattactatccccttccactcgcaacccttgtagcggtgccaagccatggaaagtattgtcaccttgatcatgatcacgacccttcaccccaccaccaccaccacccattaaattttgttgcagaagagttgaactcagcaaggaagccataacaggagttgaaggtgcacaagttgaggaagaagaagaaccaaacatagagttataagcagaaaaaaagctgttgttatttgaagtactaaacccattctcactaaccccagttgaaaaacctaacccaagagcattcaattgagaatgaagattaaaccttgggaaaggaacactactcatcacatcaccaccataaaagaaagggctgatattatttatatggttcgtggtggagctagaggcaataatattatcgaggtggggctgtgaaggagggtttgaattggacgaagaaggagagttagcagcagaagaagaagaatcaccgtgatttgttggacgcttcacacgcttgttttttctgcagccaccaccaacgggaacgtttctgagagtgccacctcttgtccagtaacgcttgcaggctttgcaaaagtgcctaggctgtgacaagctgtagttgttgtagtagcagaacttggtgtttgaagactcgcagcgagggcactttagggcttgttgttgctgctgaagaagatcttggcttggtttttccatgactcttcccatcattggggccttgtgatcatctatctgagataataaacaagagaaagaagaagataactgatgagcta

SEQ ID NO: 27175 - DNA, 2013 bp, Glycine max
  Clone ID: TF_GmC1650_1
gttcgcgtccggcagctgcagacaaacgcggtgagttctctttacatatccatctttgttgcttttgactgtcttttcttctccgaaatattcatgcatggctactaccgctcactgggcaaacatggtgttcaatttttttctcttgtcttttctgtggtgcacaaattccaagcttttcatactgaggtttggtttggtttagttagaccctaacacaaataaaaacttccacaaggtattagatttaattgtatcttcttttaaattttctagttatatctagcacatataagatatacgtggcaaacttattaaaggtctcgatccaccggatattggcctcctatctttcccttttgtaccaaaaatattaataaccataatcccaaacactcaaagcactgccacaactttaacctacactctttaacaaccttcttggccgtttgatgattattatcatatatataacaggaaaaagaaaaggattaattattgatttgttattattgttgattcttaaagtttactcattcctcttgttttgactgtcttgtaaattacctccttaatctgttcgcgtaatgaagttaattattaccaagtcatatgcaataggtcttgaaattttaatttttatctgtgtggattcttatcacgctaaagagcagcttacgaaaataaagcctcttttggggttggattagctggtgagatccatggaagatataggtccgaattcatgcacaaggccagtgacagagaagaaagcaagaccccaagaacaattgaattgtccaaggtgcagttcaaccaacacaaagttctgttattacaacaactacagcctcacacagccaagatacttctgcaagacttgtagaaggtattggacagaaggagggtctctgagaaacgttcccgttggaggtggctctaggaaaaacaagagggtcacctcatcaaaggttcctgacttgaatccaccaattagcctctcatcagtctcagccatttcttcccaaaaccctaaaatgcaaggagtccatgaccttaatctggcttttcctgcagctatggacaagtatcatcatggcacgtctccgtatgttgagatgccaaaacttgaaattggtggtgatcacagtactagtcatcatagtcaccaccatagccatagcccttcttctgcagttgagctactacggtctggcatggattctaggggtttgaatccttatgctcctaattccttgatgtcaggctcagatcattccctttatacacctggctatcccatgcaggaaattaaaccaaaccttagcttttcagttgatgatggatttggaaatagatcatatggggttcaagagaatggtggagggaggcttttgttcccttttggagacatcaagcacctttctgcaggtcttgaagtggaacacaataaagaacaaggaaataattcaactggatattggactggttggtgaagggtcttcatggtaaggaaagaaaagaaatattgggagaacataaatatcaacctgcattgttttctttctcttcactgtttctatctatccgcttgaagttgttcagatcactaacaataggatacacatggttactctattttgtatacattattattattattacatttctattcgagcaatgtgaggattttacagctcatcttggttatttttaatatgtttagagagagagagatagaagaagaggtgaatatagggtctgcttttgtccaagtcatgcaatgcaatgacctgtattcatgaattcttctgtcaaggagtagatacatatctatcgatcacctttattgatgtatgcatgctttcaaagatttggtacaaaatgacttttgatgattaaggaaagagtcagatattcaagtttgtaaccataattatacatgtattggattggtttgtgtgttctttcctattacaaaaatttctatctatgtcgatctatgcaaaaccc

SEQ ID NO: 27176 - DNA, 1231 bp, Glycine max
  unsure (1)..(1231): unsure at all n locations
  Clone ID: TF_GmC2047_1
agcncggagggggctcgagggatgcaagacccaacagcattccaaggagtgaagccaccccagtttcctgaacaagaacaactcaagtgtccacgttgtgactccaacaacaccaaattctgctactataacaactacaacctctcgcagccacgccacttttgcaagaactgcagaaggtactggactaaaggtggcgctttgagaaacatccctgttgggggtggaagcagaaagaccacaaaacgttcttcatcaaccttatcaaaacgctcttctgcaccatcttcttcctctgcagtttcggatcctgacccgacccggatttgcaccaacccggttgatcaagaccaaagggtgctcaacattggtggtggcagtttcagttcccttctagcttcatctgggcacttcggaaccctcttggagggtctgaatccatctgggtcgggtctcaaaatgggtgaatttgtggagggcgtgagttctgacccgggtctgaatctggattcgggtctaaacccggatttgcaggttcagagcaatgagaattcagagagttttctaggtttgcagaatggtgattcaagctgttggaatggtactcatggttggtctgatcttgcaatatacacacctggcccaagttttcaatagaagcttagtgataaaagtttgagactttttggcttaatccagcttctcgattatggtgattggtcttatatatataatatatacttaaatactattgttgtgttttttcctggttatagaaaagtttagtggagtttgatcttgggaaattcataacaggtttcaccgttcaaaaagcacttaatgtacaggatattcaaattcacattcttgtgaaatatgaattctatcttgtcaactggatcaatcttcgttcatatttactatatgattatgtaaagagttatataatttgatcaagcctatggagagcatgctatggaggatcatacatacaccagaatgtcactgaagcagcatcctttaggtaaagatttttttttctttcaatagtttatatgctcgtgattggtgtttttcaaacttaccacttgtgaaaatttggggaaaaaaaaggcattttttttgtgaggatggctcggaggatgtgagatgttattatcatatgtaatttggtatgtgtttttgcatagcttttgaagtgtcctcggatatatggaagtttacattgaca

SEQ ID NO: 27177 - DNA, 390 bp, Glycine max
  Clone ID: TF_uC-gmrominsoy244h03b1
attttctttagtgcgattctacctccaccttctgggtggagtcttataaaactttgggagggataaaaaaaaagaagaaaaaaacaaaaacaaacacaaaaggattgaagcaccatggttttctcttctattccagtctattcagatcctcccaattggcagcagcaacaacaaaatcaacaccaagcaaatggaattaacagtcctcagctgctttcgccgctacctcagccgccacaggctcctcacgtgggggttgaagccggccaaacccggtccggtcctatggcggatcgggccaagattcctgcccaggaaggagttctgaagtgtcctctgtgtgaatccaccaacacaaagttttgctacttcaacaattacagcctctct

SEQ ID NO: 27178 - DNA, 226 bp, Glycine max
  Clone ID: TF_15814345
tctgcaatccctagagcggcctctctgccagtcttacaacaccgagttctgctactacatctactacatcttgtcacagcctaagcacttttgccaagcctgctttcgttactggactgcaggcggcactctctcacacgttcccggtggtggcgcctgcaaaacgaacaagcgtgcgaatcgccctcctcttcacggagattcttcttcttctgctgctatgctc

SEQ ID NO: 27179 - DNA, 1605 bp, Glycine max
  Clone ID: TF_GmC384_2
ggctccaggtttacacactgacacactccttcatccaactccaacagaacaagaaaacatagtacacaccacacagtgaaaaagagagaaactccatcttctttctttctttctcactcaccacagaacacaaaaaaacatttccaaatttcaggtttgggaaatgcacgaaacacattccatcggcggcggcaggttctacggcggcggcgaccggaggctgaggccgcaccaccagcagcagcagccgccgccgctaaagtgcccacgttgtgactcactcaacaccaagttctgttactacaacaactacaacctttcccagccgcgccatttctgcaagaactgccgccgctactggaccaagggtggcgtcctccgcaacgtccccgtcggtggcggttgccggaaatctaaacgctccaacaaacccaaaacaaccaccaccaccaccaccagcaacactaataacaaccgttcttctttctcggcaaccgcaccggccaccgcaccaacgccaccggcaccagagctggagcatcattctcattctcactccagcagtgaaagctccactttaaccgtgaccgcgacggaggagatgtcggcgccgccgccgacgacatcaaacgctccgtcgaagaacagtttattacttgacaacgaccaccgtgaggcgaagatgttcgctaaccctaaccctaacccctctttggatagtggtggcattttctctgagataggaaacttcaccagcctcatcaatttaaacaacaacgaagcgtttgggtttgggaacaataaaaataacaacagcatcctcgatgcgacgtcgtttcgtttcggtattagtgttactaatcaggtgcaggcggcagcaggtggaggccatggtcagtggcagcagcagaatcatcaggagttcggtacggcgtcgtttctcgatcacactgtgccgcttgagttttcttcgctgcagcataagactgggcatcagggagggtttggatcgttggattggcaacccggtgcggatcaaggtttgtttgatcttcctaacaccgttgatcagccttactggacccacgctcattggtctgatcaagataatacttcttctctctttcatcttccttgaaaatacttaagaaatttctctcttttttctttttgttttttatgacctgagagggaaagagtaaagaatatctggaatctaaaccaaagtataaagaaataaaaataaaaattgaaagagaacctggaaggaactcgtaattaagatatgtaaatttttggttttttacttttctgttttttcggagaggtgattgggcttgatcataagtagtgatgttcatgtgcaactaacatccatgttagtttttttttcttttttatgttttattttatgtatgtatttggaatttgatttattagggggggaaacataggagcggtgttttatattaatatatagtggggattggtgctataacaattgtttgttgttttgttgggtgtttgggattgtaatcttattttggcgtgtttgagatgctatttcatccgcactattaatggctaagaatttgaaaatgacgc

SEQ ID NO: 27180 - DNA, 904 bp, Glycine max
  Clone ID: TF_GmC503638_1
catgatcgagaaatggtggaaggctaataatgttgagatttcaccaaattgtcctaggtgtggttctaccaataccaagttctgctactacaataactacagttcaactcaaccacggtacttttgcaagggctgcagaagatactggaccaaaggaggatccctccgcaacgtgccggttggtggtggctgccgcaaaagtagaagcgctaagtataataagaccttcagacaagccaataactcagttggctattctgatgatttaatggcctcacctaattcagtggtgtcagatgctccaagtattgatctagcacaagtttatgcgagttttctcaaccagaagccagatcaagccgtccaaacagttcgctatcctaacgaaccagattattattcatgcctattgaacactactgattttggccatagtgctctctctgaagaagaacttggtctcactgattgtttgcattttcatgaacaatccacagaatcacatttcggtgagagtttccaaatgtatcttttcgggttcaactctatccataatcatcaagaatattacagtagcagttatgataccacaaataatacaaattttgagttgccacagttgcctggtgaagagacagaaatctcacacggtgatatgttgtggtccaaatccaattctgagatgatgctcgatcatgctttgcaagcctcccaaccgcccctttttggacctcaatctcatgatgcagacttcattatgggaaattgttggagccacttcgatttgccaagggatgcttctttttccacgctttgataatatgtatgattcttcaatactattgcctcaatttgttttgcttcttatatgtaatttatagtttatgtataggttcggtcaaat

SEQ ID NO: 27181 - DNA, 1584 bp, Glycine max
  Clone ID: TF_GmC684_1
attctcaaaccctaaaataaattcagcaaatcacaaaagagaactatttattcctattccttgtatgcaatcttcctgaatataccagaattgttttcattattactactcaacaatttctttctttctttctttcttttggttttgcagcaacaaaatcaacaccggctcgagatacaaggaataggaataaatagttctcttttgtgcaatcttcctgaatataccagaattgttgtgattattactactcaacaatttctttctttctttctttcttttggttttgcagcaacaaaatcaacaccaagcaaatggaagtaacagtcctcatgagctgcttccgccgctgcctcagccgccacaggcccctcacgtgggggttgaatccgagcaaatccggtccggtctgatggcggatcgggccaagattccggcaccggaaggagttctgaagtgtcctcggtgtgaatccaccaacacaaagttttgctacttcaacaattacagcctctctcagccaaggcacttctgcaagacatgtaggcgttattggacaagaggtggtgctctcaggaacgttcctgttggtggaggatgccgtaggaacaaaaagaacaaaaggtctcgctccaaatctccggtttctactgagaaaccatcacttcccaataatacaagtgcaatccctgagcttattggtcgtttcccacaacctttcatggcctctcttcagagtatgaaccgctatggtgtagggattaacacaggtgttaacttgcgtgagattcaagcacagaacgcttctcaaatggagtttcaaattggaggtcttggcaatggttcaagcgttgctactgcaggaggaggaggaggaggaggagtggagcagtggcggtttcagcagtttcctttcttgaatggttttgagtcaacttcagctgcttctaattcctacccttttcaaagtgaaattgttgaaggtttggttggagatattaatgccacaagttctaggattactcagctgccagcacgggttaaaatggaatataacggtggcttgaatttgtcaagatctcctttgaatgtctcagaaaatagtaaccatttctattcatggacggatttatctggtcttgcatcttcttcagcgagtcatctcttgtaactttgacctctcatatgggttagtagccacaaaaatttaagggttttggtgctgttattttttgatcaataattgaatgagtttccattttatgaagctctctctctccctttctcttggcatgtttaaactcatttatttatcgatccaaaaaatatttgtaccaataaactcttagatttatatatccgggttagaatgacagctctccaatgtcgttccaccgtcttcacgcgtcagtgttgttaacagaaatccaatcaggctggtagaatttaatcttcaattgtatatttttcttatcattggtttgtttatgtttctccatcgagtcaagtttcttttgtgttctttttggctttctttgaacaacagtgtgtgcatgtatatgttttgtttgtttatgcgatatc

SEQ ID NO: 27182 - DNA, 1770 bp, Glycine max
  Clone ID: TF_GmC384_1
gccgccatgtcccccccgccgcccactgccgcacccccccaccaccgcccaaacacacctaggccacccaattcggctcgagctcttctctttcacgctattccccgaaaccttgtttccacactgacacacactccttcacccaacaccaacagaacaataaaacatagtacactacacagtgaaaaagagagagaactctctcttctttctttctttctttctttctcagtcacataacacaaaaaacattactaaacttcaggtttccgtttgtggccggaaatgcttgaaatacactccatcggcggcggaaggttcttcggcggcggcggcgaccggaggctgaggccgcaccaccagaaccaccaccagcagccgccgataaaatgcccccgctgcgactcactcaacaccaagttctgctactacaacaactacaacctctcccagccgcgccatttctgcaagaactgccgtcgctactggaccaaaggcggcgtcctccgcaacgtccccgttggcggcggttgccggaaatcaaaacgctccaacaagcccaaaaccaccacctcagccgccgccaccaccagcagcaacaataacaataacaacccttcctcttcctcggaaaccgctgcggcaaccgcaccaacgccaccacaacaaccgcctccgccacttgagctagagcataattctcactctcactccagcagcgaaagctccacttataccgtcgctgccacggaggccatgtcagcgccgacaacgaatgcggtgtcgaacaacaatttattacttgacaacaaccgtgagtcgaagatgttcgctaaccctaacccctatttagagcagagtcgtagtggtggccttttctctgacatagagagcttcagcagcctcgtcaatttaaacaaccaagcattggggtttgggtttgggaacaataatagcaacatcagcatcctcgatgcgacgtcgtttcggtttggtgttagtgttactaatccgcacgggaatgatcaggtgcttgcggcaccaggtggaggccatggtcagtggcaacaacaacagcagaatcatcatgagttcggtacggcgtcgtttcttgatcacaccgtgccgcttgagttttcttcgctgcagcataaagctgggcatcagggagggtttggaccgttggattggcaacccggtggggatcaaggtttgtttgatcttcctaacactgttgatcaaccttactggacacaccacactcattggtctgatcaagataatccttcttctctctttcatcttccctgaaagtactcaagaaatttctctttttttttgttttttatgacctgagaggaaaagcgtaaaagaatatttgtttggagtctaaagcaacgtagaaaaacaaattggaagagaacctggaaggaacttctaattaaaatatgtaaatttctggtttttttacttttctttttttggggaggtgattgggcttgatcataagtagtgatgttctaatgttcatgtgaaactaacatccatgttagtttttttttgcttatgttttattttatgtacttattatttggaatttatttactaggggggaaaacataggagcgttttactttttaatatatactggggattggtgctgtaacaattgttgtttggttgcgtgtttgggattgtaatcttattctggcgtgtttgagatgctattttcatccgcactattgatggctatgaatttgaaaatgactc

SEQ ID NO: 27183 - DNA, 1523 bp, Glycine max
  Clone ID: TF_GmC245668_1
agacgttaaaagttcacaaaatttatataaatggagagcaacactcttattgcattgtctactagtatttgatgcaccatggatgccatggaactatgctcactaaaccgttgcaatgaaattttccatcatcttctcattgaacagacttttttgtaactaggatccgcctctacaatcatagaccacttcatttcgcagctgctactacaacaactgcaacctcttccggaccaaactacttctgcaagagaagccagtgatgatggaccaatggcattgtcctccgtaatgtccctaaaggcaacaattaccactgaactccaattctaatggcatgaggatgtccacgttgttgattcaatcaaaccttggtttataggcgggtgcactggaacaaggagcaagggatcactatggtgatcatcatcaccatgaagaatcaaaggatatttgggaggccttaagcagctcatccatcaactaattgaaacagtccatgtttctttgtccccaagaatcattaccactgagggtcaagatatgttttgacaattatttttgttctgaccatggacattgcattttgaatacatcaatgaagtgttggtcctctctagtttgtttgactttgttggtatcatttctctttttgtcctccaaatggtgccatagaaagactaatagttattagctatatttcttctcatttaatgagcattaccatttcaccatacttctccattaatggcagaaaatcatttgacaggacaactaaatgcttctctagtaggcattttattagaccatcatgcattgcacattaggtattttaaattgctgtgatgtaattagtattgagctaataagccaatttggtgaaaatcaggaaacaattgtgtattttccttacaaactaaggcagtcaagtctggataaactacttcatcaatcaactctgtcaccagtaatctctgcaagaacaaaatccatctttgaacgagtggaagcggcttctatctctcacaatgacttctactttataaacttaagaaatcagcttcatcacagtatggcagtccccacaaaccctcaggttcttcacaattcttaaaatccttcccttgggaagttttgctattccaaaagcagcagcaagcttctcactgtgcttagaaactgaatcttctttttcttcctcttcaatatcatgcaggacactccttagctgtggtgcataacctgcttctgttctgagtctcaacattatttccctcagtttttcatgagcctcctccgtaacctcattaggcttttcaccagcaacaaaaccataaatgaccttgtcaatttcaatcatgctccaaccaggagtttttttcatgctatgttcagtcatcgttcttcttatgctggaaacatccttccatttccctgcaacggcataaacatttgagagcagtacatgatcaccggagctgtctggatccagttcgatggcaagccttgctttcacaagctct

SEQ ID NO: 27184 - DNA, 335 bp, Glycine max
  unsure (1)..(335): unsure at all n locations
  Clone ID: TF_jC-gmXLIB3563P006Da01d1
tagctcatcaggtatcttcttctttctcttgttcattatctcaaatagatgatcacaaggccccaatgatgggaagagtcatggaagaaccaagccaagatcttcttcagcagtaacaacaagccctatagcgccctcgctgcgagacttcaaacaccaagttctgctgctgcaacaactacagctgtgcacagcctaggcacttttgcagagcctgcacgcgatactgaacaagaggtggccctctcagaaacattcccgatggtggcggctgcagaaaaaacacgcgtgtgaagcgaacaacanatcacggtgattcttctgcttcctgctgc

SEQ ID NO: 27185 - DNA, 1476 bp, Glycine max
  Clone ID: TF_GmC593_1
aattcggctcgagcaagcccccatcaagatttcatcatcctcttcttccatgaaacaattcaattgctctaagaaaccaaaactgatttaaccttaatttcccaacctacacagttcactccctctctctctgtctttctttctttctctatgttctctcaatggtgccgccaccagagaacatggcaacaccaaaagaccaagatgccacacaaggccgaaaaatcaccaccacaacaacaaggccagcgccggaacaaggcgtaaagtgcccgcgatgcgactcatccaacacaaagttctgctactacaacaactacagcctcacccagcccaggcacttctgcaagacctgcagaaggtactggaccaacggcggagccttgcgcagcgtcccgataggcggcggctgcaggaagaacaaaagggccgtcgtcaagccctcttcctcttcgtcatcttcatcaccaagactttcaacctcggcgcgttgcccttcccctcgaggctcaacacaaaccaccacattccaacaatcataaacacagggttgttcaacaacaaccagttgtcgcctttcctggacgttaaatcagctttgtttcaacttgacgctcctccagctgctctgtcaaactccttgatgggcattgccccgcccagcgcccagaacaacaacttctgggcgctgggtcggtctcaaagctcgacactgtctgatccattaaacagtacaatgcagtccatgcagcaatctctgaatgttcatagcagccttgcttcttcaattgagtcactgagctgcgtcaaccgggacttgcacctgaagatgcagcagcagcgttacgcgacaatgatgtccggtggggacacccaccacaagggtgatgaaaacagtggcgtttcgtttcctcaaacggttaatgggttcgagaatcaaaaactggtgatgaaccccgttatgtttcagaagccagtagagagcttgccagccggcagtgccgtaacagaaggcccaagtggggcttcagttacaacagtggcaccacccaccgaatggttctttgggaattcttcttttccctcaacaggtaatggtggtggcaatggcaacaacaacattaacattaatattaatgatgcaaacaacaattggagtgatgcccttgcttgggggaattttcagcagcagcaacaacaatacagtgctttgccctagatttgactaaaaaaggagaattaagagagaggaattagatatcgaggtagagatagctagtttttcttaatcttggaaggaaaaaaatggaagaaattataattattaactaggacaaatctataattgtctaaaccccttttaattaggtctatgttaattacttaattagttagtttcttgttttatgttatgttcgaatgttcaaatgttcaaattgtgatatatatatatatatagaaaggatatttaaagat

SEQ ID NO: 27186 - DNA, 946 bp, Glycine max
  Clone ID: TF_GmC166330_1
ctcactttcacatcatcccattattcctcttccttgtaagcacttcctagctcactatctatccttaattcttaatgatcttgtgcaatgcttttcatgacaaactgcaagtagttgcagtggcactttagtttgacaagatcacatatatatacactgcttgtggttcactgttgttatcacaatcaccagtgaatgggtttatcttctttgcacgtctgcatggattcatcagatcattggttgcagggcacaattcacgaggagtctgggatggattcttcttcttcaccctctggggatatgcttacatgctcaaggcccatgatagagaggaggctaagacccccacatgaccaagctcttaagtgccccaggtgtgactcaacccacaccaagttctgctactacaacaactacagtctttctcagccaaggtacttctgcaagacctgcagaaggtactggacaaaaggaggcactcttcggaacattcctgttggtggtggctgcagaaagaacaaaaaggtctctgccaaaaaatccaatgaccaccaattagttaacaacaataatattaaccaaacacggcccccacaccaccaccaccccaaagaccttcaactctcctccttcccagatgtgcaattttctcacctcagcaacttgcttgggaccaatgcaaaccctagtttcatggagggcaaatatggaattggcatgattgagaaccctaggcctattgacttcatgatggagagcaagctggagggcataattgggagcggtagtagttctaggaataattttgatttttttggaaatagtgacatgtctatgggtatgactagtgttgggctgggagatatgaatagtactcaaaatgggttgccaccaaattttcatcatcatggtctttcagcatttggtggcatgtctatgtcta

SEQ ID NO: 27187 - DNA, 1946 bp, Glycine max
  Clone ID: TF_GmC584_1
ctccgatgtgtgtgttgtaactatgtgtgtgaacatcataccctagaacaacgccaccttaaactgggtctcccttactttgtatatttttattaatttttcttaccctgttcatattttcatcatcagttggatgatcacaaggtcttcctgggttccaacggtggaagtagtaacaacaacaataataaggtattggaaaaaccaggtcaagatcagcttgtgcagcagcagcaacaacaacaagaagcccccaagtgccctcgttgtgactcatcaaacaccaagttctgctactacaacaactacagtttgtctcagccacggcacttctgcaaagcctgcaagcgctattggacaagaggtggaactctcagaaacgttcctgttggtggaggctgcagaagaaacaagcgtgtcaagcgtccattaataacgacaaacccttcttctgctgccattgacactgctgcttctaataattcttctaactcttcttctgctccactacaacccccgatcgacactgcttcaacctcaaatcacatcaaccctttgttttatggcttaccaagtagctctagcgatgtgaatcttccattgttctctaggttcggttctagaatctccagctccgggtttgatcttcagctgaataatgcccttggattaggtttttcatccggggttttgtccaatgaagctagtgataataacggttacagaaactggtttggttcaaacaatacgcttctttcaagttatacatccaccactagtactactactccagctatgtcttctcttttgagctcttctttgcttcaacagaagttcatgacagatggtgttgatagcaccaacactttccagcatggcttaggcttaaccccactagagcagttgcaaatggcaagtgatcatagcagtgaggcagggatggtggccttaaaagacgtgaaagtagaattaggacaaaacaacaggttggagtggaataatggtgctgcttgccaaagccagatccagcatgtgggcttgtacgatccttctctttattggaataattcagcggcaacagctttgggtgtttggaacgatcaagctgctaatattggttcatcagtcacttctctgatctagaaaaatacaaatccaatcgaatcaagaagtatggttttcaagtttgtctcccccttctgtctcgttgctgctactttcttctttttctttttgttcttctttcttttgggccaaaatgggtttttggtttacttaattaattacatcaaaatttaatgaaaagagaggaaaagtgatacttgtaagaaaatgggaaagctaaagcctaaaggtgagaggagtttggatcggagtgatcatgtcagctgcatcctgcaaatatatataaatttctcttcagccctgttggttttatgtgtcaaggtcgttgggaaaagaattgcatatattgctctgagaggaacctcggatcctcttctctcatcgtctcacagttgctgcgcagtagtgttctctatggaaatgctttgtgttgaattgaagttctccatagttaagtaagttggtctttcattttgttatgtacatatgcgatgacatttccttttcttttttcttgtcttgtaatgtactactatctgtgattagctaggtgaggtagaggatttactgggtatgatgctgtccttaaagaaaggaactaatattggtttcatttttgttaactttgtgatgatttttgttttggatagggtgagaatgggaatatattgggcatatctggtataatggtatagaagagagggggattatttacttggctttaggtgattaatgatttaatgtatgtcggtggtttggtgcttatatgtgttcaaccttgttctatctattggttctgagaaactaactttggtccatgc

SEQ ID NO: 27188 - DNA, 1502 bp, Glycine max
  unsure (1)..(1502): unsure at all n locations
  Clone ID: TF_GmC67052_1
tttaataataatgtcattatataaaataaatatttggaaagtaaaaaggaaaaaaaaaaaaaaaactgaaacaatttgaaatctttttcatacataaactcaaaaacgggggganaaagggggaaagaaaaaataatccaagaactgttgtgtggagctagtgctaacctcataacaggagaaagagaaatctggattactaacggaggacgaagcactactactaacaccacccacttcatcttctccttctctatcaccttcttgcacaacaagcataaccacttccaccgccaccgccacctcgtcgaattcagagaaccaaaacttgaggtgccctcgttgtgattcatcaaacacaaagttctgttactacaacaactacaacctcactcagcctcgtcacttctgcaaaacatgtcgccggtactggaccaaaggcggcgctctcaggaatgttcccatcggtggtggctgccggaaaagcaaaagctccggcatgtccaactcggttgccaagcaaaccgccacaaagatgaaagcagtggcatcagagcttggaaggtcgtcgtcacaaggactcttggaccaagagcttccgcaaaccccagcaatcctgtggggttctccacaaaattctcaactgatggctttactaagagctaaccaaaaccataaccctaaccctaaccctagtccaatgtcaattgttgtcaagggagaagggaacttaatgggatctcaccacatggtggctgagccattgctcgcaaatgggttgttgaatcctagaactagtctaggctttgatggtgtgggagaagtacttccttcactgggtctatgcggctctttttggaggaacaatcaagatcagactcagcaacaaaacaacggttttgcacttggagaacatcaaagtagtggagttcaagaactttaccacaagctcaggtcatcgtcatcatcaattaattattgtggcagtgataactcaccagtgtttctaagcaacatggcttcttcttcctcttctttgtccaacattttggagtcatcttcagtttctgggagtgaattcgggtgctggaatccaaccctttcctggtctgatcttcccactaccaatggagcatatccttaattaaccaccgcatgcagtaactactttcctcttttttgttcactgttcaaattatcttttcgagttagatatatagaactccttaatctatagtttatagatgttaatctgtatcctagctagagtcttttctcgtgtttgtttgcttcggggtggtggataaggaatatggatgtgtaggtaccattagatttttttttcccaactcagcagcgtctttctatcatttgcttcttttatttctggttgatggtgtgtttatcttagctttctcaaatgatatttcaagaactaccagagagtttagaatgaatggaaaacacagtgtttaattgtcaaaacggacgcgtgggtcgac

SEQ ID NO: 27189 - DNA, 1719 bp, Glycine max
  Clone ID: TF_GmC494_1
gaccacttcttcccatctctcaaagctttacacgcttttaacactctctagaaaagtggtgttcttttttctttctctgaggactcgttgcttttcctttttcccattctcttcttaaatccatggacacggctcagtgggcacagggtattggagtggttaaacaaccgatggaaggttcaaagcctcctcctcctcctcctcctcctatgttggagagaagggcaaggcctcaaaaggatcaagctttgaactgcccaaggtgcaattcaacaaacaccaaattctgctactacaacaactatagcctctctcagccaaggtacttttgcaagacatgtagaaggtattggactgagggtggttctctcagaaatgttcctgtgggtggtggctctagaaagaacaagagatcaaccccgccagcaccaccatcagcaccagcaccaacaaagaagctttctgatctcgcaacaccaaatttccctcaatctgcttctcaggaccctaagatccaccaaggccaagaccttaacctagcatatccaccagctgaggactacagcactgtctccaagttcattgaggttccttacagcactgaattagacaagggtactactggtcttcatcaaaaccctacttcctcatcaacaacaacatctgcatcttctcagttgtctgccatggagcttctcaagactgggattgcagctgcttcctcaaggggtttgaactccttcatgccaatgtataattcaacccatgggtttcccttgcaggactttaagccaccacatggccttaacttcagccttgaggggtttgaaaatggttatgggggtcttcaggggattcaagagggtcccactggtggtgcaaggatcttgtttcctactgtggaggatttgaagcagcaagttccaagcacaaatgagtttgatcagcagaatagaagtcaagagggttcagctcacgggtattggaatggcatgttaggtggaggatcatggtagatattattagtgaagaaaaaagagaacaaggggttgctgttttagcctttatttttattttattttcttaatggggggagtgtggttgtgtttggagtgtgtgatctgaaccactaacaaaaaataggatacattgcttcttctgttttgcttctctttaatccatttcattttttttggtcttcttttcctttccccagtagtcccactttgatttttagcttttggtcccgaagaatgtggctgtattttgaagctacctttcattttaatttttaggtttaatttcaggagcttcgagtccataacctatagtatatcatatatcataatcaagagtaggactgatttttcatttttggctttcccgtgagaaaaactcttattctcttattcttgggggtttgctaagatctccgcccttattcttggggtttgctaggatctcggcttggggtttgctgctaccacagcaaggaaaggattccccatcaataactattgtcaggtatcaagagagtttggtcggtcttgcataatccttgaaatttaatggccttctaagtataatttatttaggttataaaataaggacactttagaagctagtgcaacaaattaactagtttttagtatttatatctgtaaattccaaacttggatttcgggtaatttatatagtcctgggacataaagtgagttg

SEQ ID NO: 27190 - DNA, 633 bp, Glycine max
  Clone ID: TF_GmC494_3
cggctcttctcctttctttttcccatttttttcctttccaccatctgataaaggataaaggacccaaagaaaaaagttaacatatttgtttgtatcataccactgctgttgtaatcccctctcaaagtgtaataaataaaaacacccttctttgtttgcttgttttgtttgtttccttcctaagactatctttttctcagaagcaaaggttttgaatttcagttatggccttttgctgtctttttgtttttattgttttgaaaaaaattggatattttttcagggtattggagtggttaaacaacctactatggaaggaggttcaaagcctcctcctcctcctatgttggagagaagggcaaggcctcaaaaggatcaagctttgaactgcccaaggtgcaattcaaccaacaccaaattctgctactacaacaactatagcctctctcagccaaggtacttttgcaagacatgtagaaggtattggactgagggtggttctctcagaaatgttcctgtgggtggtggctctagaaagaacaaaagatcaacctcatcagcgccaccaccatcatcagcatcagcacaagcaaagaagcttcctgatctcacaacacctaatttccctcaatc

SEQ ID NO: 27191 - DNA, 869 bp, Glycine max
  unsure (1)..(869): unsure at all n locations
  Clone ID: TF_LIB5118-054-A1-PF1-B4
cggccgctcaggcggcgggcgggttcattctctttcttaatcatggacacagctcagtgggcacagggtattggagtggttaaacaacctactatggaaggaggttcaaagcctcctcctcctcctatgttggagagaagggcaaggcctcaaaaggatcaagctttgaactgtccaaggtgcaattcaaccaacaccaaattctgctactacaacaactatagcctctctcagccaaggtacttttgcaagacatgtagaaggtattggactgagggtggttctctcagaaacgttcctgtcggtggtggctctagaaagaacaaaagatcaaccccatcagcgccaccaccatcatcagcatcagcacaagcaaagaagcttcctgatctcacaacacctaatttccctcaatctgcttcccaggaccctaagatccaccaaggccaagaccttaacctagcatatccaccagctgcagactacaacactgtgtccatgtcaaagctcattgaggttccttacaacactgaattaacaagggtggccttcatcaaaaccctacttcctcatcaacaccaacatctgcatcttctcaccatcagttgtctgccatggagcttctcaagactgngattgctgctgcttcctcaaggngtttgaactccttcatgccaatgtataattcaactcatcatggatttcccttgcaagactttaagccaccacatcatggccttaacttcagtcttgaggggtttgataatggtacttatgggggtcttcatcagggaattcaagaagatcctactactggtggtgcacggatcttgtttcctactggggaggatttgaagcagcaggttcca

SEQ ID NO: 27192 - DNA, 1148 bp, Glycine max
  Clone ID: TF_GmC108_3
cagaatttggaacttccaaagcctaatctgatgaggaaacaacaacaacaacaacaacaacaaactcagccgaattcagagtctttgaagtgtccaagatgtgactctaccaacacaaaattttgttactacaacaactacaacaagtctcagcctcgccatttctgcagggcttgcaagaggcactggaccaaaggtggaactctacgcaatgttccagttggtggtggaaggaagaacaagagggtaagaaaatcaatcactactccaattacaacatcttccaccacaacatcaatcacaaccaccacttctacttgcactgccacagtcacaacctcaattggcaacaacaacaacaacatggatgctatgttgggttgtaatagccacatgacaatccaaactcctcttgcggatgatcacaaaaacatgtcttcctctctctaccaagctctaattcgtccaccacctttgctgctacaacaacagaatctgatgaacaacacaagagacctagaaggcaaagattttggtattggtattggtaatggtaataatggtatctttcctagtttaactttgccttttcctattcatcatcaaagccaaagcctactcttccctttctcaacctcaagcagctcttttgataccaacccttgttcagtagtgtcaacttctcttagatcctccaatgtttataactatggggaggatcagtttaaagcaatagaggaaccaaccatcaatagtactattacaactactactatagtgcctagcaccaacaacacacatcatccatgggagatagcagcagcaacaagtggtgttggcttgggaacttcttcaaattcaaactattggaattgggaggattttgattcattggtctcaactgatctaaaagatccctgggatggttcagatatcaaaccttgagatcaaactatcagaaacacatcatggtagtgtccatagattagttatttaatttaattggggtgttttttgtgtttcatacaggttagtaagtggtcttgtgtttttttcaagatggggcatgagaagtatttggagctgtcatgttttagtttcagcttcagcttcaagcaaaagtgtcccaaaatattcctgattaatag

SEQ ID NO: 27193 - DNA, 1424 bp, Glycine max
  Clone ID: TF_GmC479_1
ttcctaaactcttctcttctacactttgctctctaccctctttctttctctttctttttcccttccctcaagtactatcatacacaaacacaaggtacttcacatacccacatacacacacataagcaaaaactcttacttccctttttcaagttcttaaactcatcactacttaactcaggagtgtgcatattttcgttgtatggatggatccttctagtggacaacaccagcaaatgtctagccagtcattggagaacatgttggcatgttcaaaagcccaccaagagagaaaaccaacgcctcagccagaacaagctctaaagtgccccagatgtgactccaccaacaccaaattctgctactacaacaattacagcctttcccagccaaggtacttctgcaagtcatgcaggagatattggaccaaaggaggtacacttaggaatgtccctgtgggaggagggtgcaggaagaacaaaaggtcatcatcatcatcttcaacatcaaagagagttcaagatcaagcattcacaccaaatgttaaccctctcactggccttccttcattaatgtcttatgactccaatgacctcactcttgcattggcaaggcttcaaaagcagtcatgtgggcaattagggtatgatgatcatgatctttcaatgttggggaaccaccacacaaacaccccatgtggtgataatatccttggcatgcatcaccactcatcatcctcatccacaaacccagggttcttggatgccctcagaagtgggttccttggaacacaaagtaataataatatgcatcagaatatgtactatggatatgggaatggggacatgggggaggtggacaatggtggtggggttggggttagtagtagtggagagatgatgatgatgatgatgccttataataatgatcaagaaatgagtattgcatccacacaggcagtgacagtcaccaccatgaagcaagagatttgcaacggaagggaacaaaaggtgttgtggggttttccatggcaactcaatggagacacaaacatgggtgaacttgactcaggaagagctagtaattggaatggcatcaattcatcatggcatggacttctcaacagtcccctaatgtagacaacaaccacagggcctctactactgataattttatttccttaatttctcatgttttgttttactaaaaatgttattagtctaattaggattttcaatatccttttgagtgctgggttaattaattacaggggtttggttgattcccttgaatcatctcttttctttctttcttgtttttttttcttctctttttgccccttaaattgtcaaattttttgtactactactgtcttttaattggtgaatagactaatgaaatttcagaaaggttgtttgctaacc

SEQ ID NO: 27194 - DNA, 501 bp, Glycine max
  Clone ID: TF_GmC479_2
cttctttgcatgacttcctaaactctctctatactcttctctcttctacactttgctctaccctctttcccttccctcaagtactatcatacacatcacacacacaagcaaaaactcttgctttccttttcaagttcttaaactcatcacttacctcaggagtttgcatattttctttgtatggatggatccttccagtggacaacaccagcaaatgtctagccagtcattggagaacatgttggcatgttcaaaagcacagcaagagaggaagccaaggcctcagccagaacaggctctgaagtgtcccagatgtgactccaccaacaccaaattctgctactacaataattacagcctctcccaaccaaggtatttctgcaagtcctgcaggagatattggaccaaaggaggtacacttaggaatgtccctgtgggaggagggtgcaggaagaacaaaaggtcatcatcatcatcatcttcaacatcaaagagagttca

SEQ ID NO: 27195 - DNA, 564 bp, Glycine max
  unsure (1)..(564): unsure at all n locations
  Clone ID: TF_jC-gmro02910037e01a1
ggctcgagattcatcatataattttatcccaacccaaccacacatacactatattctctctctctctgccccccatttcccgcatacacagagcgatagcaaacctactttagtttctttcgcttttcttccactaacgcaaaaagactcaccagtcatcaccacaccaccccttttgcttttgctttgcgtgtttttggattgttgtagatctaaaagataaagatgattcaagaaatgttgggtggtgctagtgctagccacataccaggagaaagaaaaatctccattaataacggaggacgaggaagagcacttctactaacaccacccacatcatcatcttctccttcttgcacaacaagcataactacttncaccggcaccggcaccgtgaccttatcgaattcagagaaccaaaatttgaggtgccctcgttgtgattcatcaaacacaaagttctgttactacaacaactacaacctcactcagcctcgtcacttctgcaagacgggtcgccgctactggaccaaaagcggcgctcttcagaatgttcccatcggt

SEQ ID NO: 27196 - DNA, 321 bp, Glycine max
  Clone ID: TF_14258423
ggaattcggcacgaggttagcagtgggagcttagatttgaataatttccattgcttaagggagggaatgcttgtgctttgcagattcttgaggttgcccagacatctttagcgttggggttggacgctgatacagctctctgagacgatagatgatcacaaggcccctatgggaagaatcatggaaaaaccaagccaagatctttttcagcagcagcaacaagccctaaagtgccctcgctgcgactcttcaaacaccaagttctgctactataacaactatagtttgtcacaccctaggcatttttgcaaagcttgcaag

SEQ ID NO: 27197 - DNA, 1461 bp, Glycine max
  Clone ID: TF_GmC384_3
taaagggatcgttgggtcaattcacttccctcccaaacccgaaaacataataacattagacgaggaattcccaagaagtacgttgtggccgggcagggatatttgtttctcactctctctcatgttcactcaacaacaacgacgcactcactgacatcaacactagtttcaggtgctatctcatccaccaaatgcagcaaatacactccatgcccggagggaggtttttctccggctccggatccgccgaccggaggctccgaccccaccatcagaaccagcaggccttaaagtgcccccgctgcgactctctcaacaccaagttctgctactacaacaactacaacctctcccagccccgccacttctgcaagaactgccgccgctattggactaaaggcggcgtcctccgcaacgtccccgtcggcggcggttgccgcaaatccaaacgctcctccaagcccaacaaaataacaccctctgaaaccgcttcaccgccaccacccccgcaccccgaccacaacaacaactccaactctcattccagcagcgagagctccagcctcaccgccgccgctgccaccaccaccgaggccgtgtcggcgccggagactttaaactctgattccaacaacaacaacaacatgcaagagtcaaagttgttgatccctgctctggaaactaataattctctggagcagggaacaggggactgcggtggtatcttctctgaaattggtcctttcaccagtttgatcactactactacttccactaatgaacctttagggtcagggttcgggttcggtaactccactctccccgatgcgtcgtcgtttcagtggcactaccagaaggttagcagtaacaacgaagaattgaagttgccggagaactcctttctcgatcacaccgttgatttgtcggggatgcatagtaaaaccagccacgggggaggattcggatcgttggattggcagggcggtgcagatcaaggtttgtttgatcttcctaacaccgttgatcacgcttactggagtcacactcactggtctgaccacgacaattcttcttctctctttcatcttccctgaaaatgttttcacgcctcttctaaatcttatctcacctttttttttatttcttatataaatttaactttaaaagaagaagagtaaaggagattggaaatcaaaaccaaagttttaaaaaaatttgaaagagaagtggaaggacttggtataattaattacgcggtgtatatttttttttgaagttataaatttggggggtgattgagcttgatattaattagtgatgtgcatgcacaactaacttccatgttagtttctacagtatctgatttctttctctcttttttgttttctgagttcaggttttaatatatatgtatgtggaatttgattgattaacagagaaattatagcagggtgttttaat

SEQ ID NO: 27198 - DNA, 874 bp, Glycine max
  Clone ID: TF_GmC730677_1
ttccacaacatcttcaggcatatttgagaatcctaagactccctcagcagaaaccgagacatcaataccgaaatcctccacaaatggagaaaaaagcgagaaaagtgcttctgaagaaaaaacactaaagaaacctgacaaggtacttccatgcccgcgatgcaatagcatggaaaccaaattctgttactacaacaactacaatgtcaaccaacctcgccatttctgcaagaactgccagagatactggacagctggaggtacaatgagaaatgtgccggcaggagccggtcgtcgaaagaacaagaattcctcggcgaccgtgtcacattaccggcacataatgttctctgaagggcttcagggagccacactcaatgcccccaatggattgcataatgctgttatgacctttggtcctgattctcccctttgtgatacgatggcatctatgttgaacattgctgagagagcacaaagttgtgttccaaatgggtttcatgtaactgagccaaatagttttgtttcctatagaaaggaggaggaggaggatggtactagtggtcactctactggagttaattctgttgcaacaacatcaactttaagccatagtggctcacatgaatcattggataaaaaagttgttgaaggtttcactcctcaatttccatactttccaagtgcaccttggccttatcctatccctccttctacatttttcccacaagggtaccctttatcattgtatactacacctgcatattggagttatatgccaccctcttggaataacaatatatcagctatctcacccgaatcttctattaacaactctgtctctaaccctactttggggaaacactcaaaggat

SEQ ID NO: 27199 - DNA, 847 bp, Glycine max
  Clone ID: TF_GmC196_2
cccacgcgtccgcaaaacccaaactcaagtcactgccatctcgcacgtttgaatccccagaaagaaaaaaaaaatgcacgaaattagagaccctgcaattaggcttttcggtcagaagatccctttccctgaagatgttgttgttgacaaagaagaaaaagaaatagaaagtggcgaggaaagagaacaagagatggaaaaatatgaagaccaaggacacaaggatgctggagttgaaaatgttactgaggaagagctagaagttgatcctcctccaaatgctgaagagactaagaattcaggctcatcccctgaggctattgtgaaccccaaaacaccttccatagaagaagaaacagaaaaatcaaaaggtgacaaaacagagaaggaacaaggtgatgcagccaactcacaagagaaaaccctgaagaagccagataaagtgctaccatgcccccgctgcaaaagcatggacactaaattctgttactacaacaactacaatgtcaaccagccgcgttatttctgcaaagcctgtcaaagatactggactgcaggtggcaccatgaggaatgttcctgtgggggcaggacggcgaaagaacaagaactctacctcccattatcgccacatcactatctctgaggcccttcaagcagctagaattgattctcatcttccacctttgaaaggcaatggtagagtcctcagctttggattagatgcacatgcacctatttgtgattccatggcatctgtcaacaatcttggagagaaaaagcctctcaattgcacaagaaatgggtttcatcatggctttgaggatcaaagactcccccccgttcct

SEQ ID NO: 27200 - DNA, 686 bp, Glycine max
  Clone ID: TF_GmC190_1
atttcccctaaaccttcttcaataagaataataatattctctctttgttcctctctctaaaattaatggctgaagcacaaagtggccaagctagtgaagggattaaactgtttggaacaacgattacgttgcatggaagagaaagaaaagaagatagaaatgatagtgaagatgggacagaggagataaagagacctgataagatcataccatgcccaagatgcaagagcatggaaaccaagttttgctacttcaataactacaacgttaatcagcccagacatttctgcaagggatgccagagatactggacggctggtggggcccttcgcaacgtgccagtaggagctggcaggcgaaaggtcaaaccgcagtttggtcaggaggagaggttggctttggatgaatggcatgttgccgccgtggctcatggtgatttccggcagctttttccatctaaaagacggaggatgagctcaggtggtcaacgtcaaccttgttaagccttcacttctttcattcctttctctccccccccccctttttcttgtattgacatagatctccctttgaggttttttaagtaattcttcttaaaaacttaggtatcaattatcattttaaatgtagttttgttgttgtttctcaataaataaaaaaacacaaggtataacagataattgatc

SEQ ID NO: 27201 - DNA, 465 bp, Glycine max
  Clone ID: TF_uC-gmropic043a02b1
ctgacgcgcgggcacgcaatgcgcatgactccgccctgcctaagatgtctgcattctcacccttaatttgcactcatacgctctgcctctcttatagtctatatggcaagccctacgactcagtcactcatacagctacgcccacatataaaagcccgcggttgagattctagtaaccttagagggtcgagcttaggccgatcctgagtgtgtgaatgaatccgagtcggggacggccccagtacaggcctatgcagtcacaggagaagaagccaaagcctcaatgacaacaagctatgaaacgcccaagatgagactccacgaacagaaaattctgctactacgacacggatagtctgactcaggcaggatgtctctgccagtcttgcacgagatatcgcgcacaatgaggaacactgaggaatgtgccactaggtggaggatgcaggaagctgagagcatgct

SEQ ID NO: 27202 - DNA, 701 bp, Glycine max
  unsure (1)..(701): unsure at all n locations
  Clone ID: TF_16343727
gccccccgaaatctgaaacacatacaagcttttaaaattcgaatccaatccaccaaccttgtttcataggacacatatataaatacaaaccaaattataaccccatccacatgataaaaaaaacaaacacacactacactaagttcagatcacagagagacaaagatatggaacaagagggagaaaaagggagagaggagaaaagacaaattcaacaacagcaacctcctcctcagcagcatcagaaatgtccacgctgcgattccatgaacaccaagttctgctacttcaacaactatagcctctcgcagcctcgtcatttctgcaaagcgtgtaaaaggtactggacactcggtggaaccttcaggaacatacccgttggtggcggttcccgcaaagtgaagcgtggcaaaacaaattctccatcttcttcttcttcttcttcttcttgttcaaatttgctctcacagccacagcagaatctgttgatgaggccttctccaccaccactcactactaatactatggttcagtcaactagtccttattattataatcttggtgttggtggaaatgggtatctctcttttcattcttctctgaacaacaacacaccatcacagccttccgatcagtatctgaaagttggtnnnnntgatcatgnnnnnnnntcntctnnnnnntctcctcntnnnnntnnc

SEQ ID NO: 27203 - DNA, 421 bp, Glycine max
  Clone ID: TF_LIB3139-100-P1-N1-D12
ctccttccataccatatattgacatctgtacacacatttcgaccgggcggaataaatcactcaaaaggccaccgttaagctcatgatattgcatataaaaagaaactattgtttccgggatacaaagtgcaccaaggggagtgttttaagaaattggcttgcgttttaagcaagtttgttatacatgaattgaatggaaccaaacctttgggaaaggttcaaaattgggaactcctaagccttccactgataaggaaccaccaccaacctcagccttaaaagcctaggaggggcccaaaaggcgatactattaccaccaaatttggtacctacaacaacaacaacaagtttaaacctggacattactgcaaaattggcaggaggcatgggactaaaggtggaactctacccaatgttcctg

SEQ ID NO: 27204 - DNA, 190 bp, Glycine max
  Clone ID: TF_jC-gmXLIB3563P034ba06d2
ggggaacccaataaacgataaatacgaacgaatttacagcctgaaaatagactgattatataaaccctgcccaactgcaagagcataaaaactaaatcctgttacttcgactactactacgtgaataagaccatgcttttttgcgtgatctcccataagtactgaacagatgctggggcccctcgatact

SEQ ID NO: 27205 - DNA, 391 bp, Glycine max
  Clone ID: TF_jC-gmst02400020dg01d1
gaacaaaccaattttttgtgtctacacatagttaattgtttggttcacgccaacatatcctggatattactatgcatacatatttaatgatcaggagctacaactcagcttaagacaagcgaaccacacacgatgtactgacatgacctatgacagactgtacattatgatccttgtaatagttcaggtttctttactgatcgggctggttaaaaacaaccaaagagggtcgttggggctgttccactagccctgaactttggagtagcaaactttgccttaaagaatggttccctttttagggcccaagtaagggttctttttttttatgcttttaggtggattgagacttttaggcttttaaatcactttccgtattctggagctcttt

SEQ ID NO: 27206 - DNA, 1786 bp, Glycine max
  unsure (1)..(1786): unsure at all n locations
  Clone ID: TF_GmC239_1
ccacgcgtccgctatgtttcttccctctgatggatttttatttattgttgtcgtaacaataaacctttttctgaaaccatgcatattattttggtagtattataatgttcaatggatctgcaattcatttctgcctctgcaactctcagaatttcatgctctcaaataaggatctggagcagaaattgtagatcctgaaattttccctgtgtagagtttgggcctaagttagagtttgtgagagaaaactttgagaatgagatacgtggaggacaaagggtgctacaacaacaatggaccaacacaagagactccaaatagcagtgccatgtactcagagtttcacaaaggaaaagatgctactcgtgtctccaaccaccatcatcgagcaaccatgggaaaaccaaccccttccaagtgggatgatgcacaaaaatggctcgtggggttgtcaaaaggtggagagaaaagccactccaaaagcaagccaagaaactcaaacgcagatgatttgagactcatagctcctgtgccacagaaggagcatgattactcaagtagtgagaaggaagaggaggaaaatgatgcttgccatgatttcatgactaatattattagtgctaatgctattgctgctcaatatgaagctgaagccaaaagggtagaatgtgatgagtcaaattggggaagcaataataataataatgacaacaggttttcaggaaacacaatccaagtgcaaccaatatgtttcagagacatggggactgagatgacaccgattactagccaagagccttcaagaactgggacaccaattagagccacaactcctgctactagaagcccaattcattcagggacttcaactccaatgaggggtcaaaatgggttgcaacaagttgctgagggtggccatggcactactaggaagtgtggagatcaaggatcaacaagcccttgcaagaagactcatgaagatcatcaagctagaaaattgagtcctctagaaagccgtgcaatggcttgggatgaggcagaacgtgccaaatttatggccaggttcaagcgtgaagaggtgaagattcaagcctgggaaaatcaccagataagaaaagctgaaatggaaatgaagaaaatggaggtgaaagctgagaggatgaaagctttggcacaagaaaggtttgcaaataaactggcttcgactaagaggatagctgaagagaaacgagctaatgcacaagtgaagctgaatgacaaagctttgaggactactgaaagggttgagtatataagaaggacaggacatgtgccttcttctttctctttcagctttaagttgccttccatttgctggtagctagtagcaattttgcaaccaatatatgtaatatcttgtgtgaaatataaaaccttttcagtctagcccaacataattgtgctacttctacaaaaatataaaaaaaaatttcttgctcatgaagggaatagaattgaaaaaatatttatatttgaaactcgctcgagttgtcattaatccactgaaattgcacaagggtttttaagtaaagtaagtactctctgtaattgatagcttcaaaccagtactcttctgattcatagttcctatgtggtactgatagaacctcctctaggtagcagacatgcattgctttcacgagtaaggctatggtttgaggcaaaagttacttttcactgcatacaatcgtacaatttacagttttacaactgcacattgcgtccgtttttttattaaatnnnaatg

SEQ ID NO: 27207 - DNA, 479 bp, Glycine max
  Clone ID: TF_uC-gmflLIB3275P059b07b1
gataaaaattgagttgaatttcagcacaagatggaagaggactttgagttgcatgcccttcaaagtccaaagaactcttatgtgatggagtgctgaagtttgagagttgactgatacatttgaataggaaaaccaagatgttggtgttgaaaattaagtagaagttgaaaggatacaaggtaaggcacaagataagctaacgaataaattagcagctgcaaggcataaggccgaggaaaagcgtgcagcagcagaagccaatagaaatcatcaagctgcaaaaactgaagagcaagcagagtatatacgaagaactggtcatgtcccttcctcatatttatcattttcttgctgcaattggtgctcttaaaaaaagccaatctttgccaatgtttattttttgtttctataggtatgaaatgccttttgctgcttacacccaagcatgttaaatatgcctggtgcatttccctcctggt

SEQ ID NO: 27208 - DNA, 742 bp, Glycine max
  Clone ID: TF_GmC356_3
catagggccctattctctggcagaggctcagaaaaagtcgaaagctggaaaaaagaactaagcactcaatcgtcaacttgggacgtttctgaaacgtcaaagcctgcctcaaagacaagaagtgaggaagccaaaatctctgcatgggagaacttgcaaaaggcaaaagcagaagcagcaatacggaaactagagatgaaattggaaaaaaggcgagcatcctctatggataagattatgaacaagcttagattggcccagaaaaaagctcaggaaatgagaagttcagttccacacaaccaaaccgatcgggttgtaagaacttcacacaaggcttcatcatttcttagaaccagccagatgcgttctttgagtggttgtttcacttgccatgtcttttaagcattctttcatgtttgagtgatggtgggtttccgaaggattcaaatgggccacatgttaatgattgaaaggggcacaacagttgacaaaattggtgttgttgcgttttgctatccatggcaccttctttgaaagtctcagatatcataaaatctaagccccatgttcgggagtttggattcaatgggtagcaatatttgtaagtaggccaaattttagaaataagatcttttgtatttttttctctcctcccaacatgattgtgtgctgttcaaaaacttcaaatgtaatctaccttatagttgaacgagaaaagcaaccacaatatcatttcgttctt

SEQ ID NO: 27209 - DNA, 754 bp, Glycine max
  unsure (1)..(754): unsure at all n locations
  Clone ID: TF_GmC356_9
ggctcgaggcaccaatgtgtcccgtgccacttcaaggagggacatggcgacccagatgagcccacagggtagctcacgctcctctcctaatctgaggccttctttctctgcctccaccccatcaaccttgcctgtcacagaattgcggactgctggttcctctaaagtggatattagggatgtgcaagtagatgaacacgttaccgtgacaagatggtccaagaaacatagggccctattcactggcagaggctcagaaaaagtcgaaagctggaaaaaaaaaaatttgcccggagagaactttccacaaaacagggcatttggctgcagaaaagcgaaaaaagaaaaagtaagcactcaatcgtcaacttgggacgtttctgaaacgtcaaaacctgccccaaaggcaaaaagtgaggaagccaaaatctctgcatgggagaacttgcaaaaggcaaaagcggaggcagcaatacggaaactagagatgaaattggaaaagaggcgagcatcctctatggataagattatgaacaagcgtatattggcttagaaaaaagctcaggaaatgagaagttcagtttcacacaaccaaaccgatcgggttgtaagaacttccccccagggttcatgattttttagaaccagccacatgcgttactttgaagtggttgnnnnnnnnnnnnnnnnnnnnnnnnnnnnnnnnnnnnnnnnnnnnnnnnnnnnnnnnnnnnnnnnnnnnnnnnnnnnnnnn

SEQ ID NO: 27210 - DNA, 1033 bp, Glycine max
  Clone ID: TF_GmC356_6
cccacgcgtccgcgggtgtattcctgatgataagtttggtgggttcaaagatgtgggcaccaatgtgtcttgtgttgtttcaaggagggacatggcaacccagatgagcccacaggggatgtgcaggtagatgaacacttaccgtgacaagatggtccaagaaacatagggccttattcactggctgaggctcagaacaagtcaaaagctggaaaaaagaaaaagtaagcactcaattgtcaacttgggatgtttctgaaacgccaaaacctgccccaaaggcaaaaagtgaggaagccaaaatctctgcatgggagaacttgcaaaaggcaaaagcggaggcagcaatacggaaactagagatgaaattggaaaagaggcgagcatcctctatggataagattatgaacaagcgtatattggcttagagaaaagctcaggaaatgagaagttcagttccacacaaccaaactgatcgggttgtaagaacttcacacaaggcttcatgatttcttagaaccagccagatgcgttctttgagtggttgtttgacttgccatgccttttaagcattctttcattggtttgctgagaggtggattatcagccctgtttcggcagatacagagtcagtcatcatcaatgcccctccaaggacaagaggtgaggaacccaaaatctctgcatgggagaacttgcaaaaggcaaaagcggaagcagcaatacggaagctagagttgatttaagttactgagacaaaagcaatggtgactgagatgaaacgtcgattttgattagagtatgatacggagaatatctaaggtgcaggctgtattattactcttgggagcacaagaaatgacaaatagtgcccccacctgacttttttttgcagcaaaactatcatgacattatagtatttctttaggaattgcttttctctttgatatattttatcaataattgctattttgacatattattaagtgttctaaaacttgttattgtatgccaggaaataaatgatcattcc

SEQ ID NO: 27211 - DNA, 2382 bp, Glycine max
  unsure (1)..(2382): unsure at all n locations
  Clone ID: TF_GmC44078_1
tctgcgccatattacggctgcgagaaggcgacagaaggggagtgtgagtgtgagtgtgagtgtgttgttctctctgcgaaatgcgaatgtgattcgaagaagctcgatgagaatgcgagagttagggtttcaggaacgaaggtcgtggaggcggagaggcggcgacaccagccccgactccgtcatcttcactctcgaatccaacttgagcctcttctcctccgcctccgccagcgtcgaccgctgctccttcgcctccgacgcgcacgaccacgactccttagcctccgaaatctcactccatttggcagcacaggatcatgacggtgatttcgctcatagcgaaagctggagcggtccagatccggatctggatccgaataaacgacaacaacaacgacatgcagatacagattcagatgcagcacacacgaagcatcgccgaaatcgtttctccgggaaaggagagaaagcgaaagttcaaaaggaagaagacagtgacggtggtgacactgaggacggaaatcaacacttggaatttgattcggccagaaactctttctctctggctctcaaagaatgccaggatcggaggtcaagatctgaggcgttattcaagaagcacgatcggcgaaggcctgcttcgttagatctgaacaatgccattggcaatggcaatgtttcttcgcctcatttgggattaagtgctatgaagaagagcacgctttgttctagaaggtctggctctggcacttttccgagtcctggaacgcctaattatcttcacgccactgttgctatgcaaaagggttggagttcggagcgagttcctttgcacaccagtgctgcacgcaagcaggttggtgcggctctgttgcctttcaacaacggccgaactttgccgtccaaatgggaagatgctgagaggtggattcttagtcctgtttccggtgacggcggcaccgggagggcctcgctcccggcgccgcagaggaggcccaagtcgaagagtgggcctcttggcccccctggagttgctgctgttgcgtattattccatgtattcccctgcggtgcctttgtttgaaggtgcgaattcaaggagctttatggcggcatctccgttttctgctgctgttagtgtcccagctgctgctgctgatgggttaactgccagttccggtggcagttgtggggtgctctcaaccagaactgatccttgcatggctcgctcggttagtgtccatggttgctctcagatgcatagtcagtcatcactgcctgcccaaggggagaagtttgatggtttcaaagatgcgggcaccaatgtatctcctgctctttcaaggagggatatggccacccagatgagcccagagggtagctcatgctcctctcccagtttgaggccttctttctctgcctccactccaccttcccttcctctctcagagttcacgagtttgcctttctctaaaatggatatcagggatgtgccagtagatgaacatgtaaccatgacaaggtggtccaagaaacacagggccctattctctggcagaggctcagaaaatgttgacagctggaaaattaaggaatcaagtagtcgatcttcatcttgggacatttctgaagggtcaaagactgtttcaaaggccaaaagggtggaagccaaaatcaatgcatgggagaacttgcaaaaggcaaaagctgaggctgcaatacagaaactggagatgaagttggaaaagaagcgagcatcatctatggataagattatgaacaagctgagattggctcagaaaaaagctcaggaaatgagaagttcagctttagccaaccagcctcatcatgttcccagaactcctcacaaggctatattatttagtagagccagtcagatgggttccttaagtggttgtttcacctgtcatgccttttaagcttgaagtttgggtttcataattcagaaagatttaaatgtgccccatgttaatgaattttcggtggataaaagagagagcagcttactatgttgacactaaattggtgtcatcttggttgtgcaatgcatgaaatagcagcgccttctgaaggcatccgataaaatcttaagtcccttgtgccctcacccttgggagtttggattcaatgataaataatatgtgtatgtacgtaggccaaactttagaaataagcttcatttttattttatttttttcctttcctaaacagtttgctgttcagaagtaatatgctatctatcttcagtagaacgataaattaaccacaaatctgcaatttagtttttccttcgcaaaatcaccctcagttcagttcgttgtctgaaaaaaaaaaaaaaaaaaaaaaaaaaaaaagancg

SEQ ID NO: 27212 - DNA, 493 bp, Glycine max
  Clone ID: TF_jC-gmXLIB3563P059ca07d2
ttttgttttttttttttgttttttcttgaaaaagagtcgaatgactatctggcgaaagaaaactcatacactgattgaataattaaattcctttttgcctccaatccactgggtatacacacgccagaaagccgtttttgacgcataaaaagggaacatatatctttatggccaacgtaataaactgaaaacactcttgcatcggggacagttaaaaaccaactactcgcatgaaaataaagccttttttttttgtctcccacggagccaaaaaataaaggctattttaatactaccgaggatttggttatgtaaccttcaccaattgctctatgctttgaagttagctgctgtgcattaagaacatgttccttttttttggccgaaaacatagctgttgtttcttaaatacccttgaggatggggacaaagaagttatatatttcaatcggagcttatgccttttgcttctcgaggtcttcgtccaactttt

SEQ ID NO: 27213 - DNA, 351 bp, Glycine max
  Clone ID: TF_LIB3242-386-Q1-K1-A4
gggggaagagagaaaaaatcttttgcttggggaataaaatgattttgttttggaaaaaccaaatgaataacccgcttaaaccccttttttttaacaaaaaaatctaaaggctgttttgtttgtcacaaacttcatagggcccccctttccttttcgcccccccataacccccttttaaaaaccaaccttgaaatttttttagccaaaattttcttttttgctttgacctcgggcccaaagcccccccccccaaaaaagggattaaaattttaaaaccctcccaaggccttttttggagaggttccagttgcccggggttttgcaactttttcctctgccttgaaaattttt

SEQ ID NO: 27214 - DNA, 232 bp, Glycine max
  Clone ID: TF_4276934
aacaaccaaggagtttttttggagctggtccagttgctttatactttgcagcttgtccctctgccttaaaaaaatcttcccctttctttgcctaaataattgctcttctttcttcaacttccttggggattgcagcaattttgctttttatcttttctgcagcttctgccttttttttctccagttctttttaaatcttattaaggtcagcctcaaaaagagcttttttggc

SEQ ID NO: 27215 - DNA, 465 bp, Glycine max
  unsure (1)..(465): unsure at all n locations
  Clone ID: TF_uC-gmflLIB3260P014a10a1
atccacgcgttcgcccacgctttcgtctacgcgttcgcccacgcagtacacaactttacaacaaggcatcggttatggcaaatctgcgatcgaagtctgaaactgcttgtgatccggctccggttgaggctgtggtgccatggaactacgacgttgtttagaaagcttctgaaacaggggaatacaaagctatggtttctgtatcctagaagacaccggttcctgcagacaagcatttctcaagaggatcctttgatagaaaaatctctctggctgacttggataaagagaaagagttgttctatgtgaatgcatgggaagaaagggacaacgccaaatcagataacagaccttataaacatctctcatttatcgatgcttgggaaaacagttaaaaggcagcttttgaaactgagcttaaaaaattggacgaacaactggagaaaaagaaagcagaatttggng

SEQ ID NO: 27216 - DNA, 253 bp, Glycine max
  Clone ID: TF_uC-gmflLIB3260P018a07b1
ggcggacccgacaaagattgaagaagaactggagaagaacaaggcagaggctgcagagaaaatagaaaacaaagttgctacaatccacaaggaggctgaagaaagaagaacaataattgaggcaaagaagggtgaagatctgcttaaggcagaggagcaagctggagagtatggagcaactggaacagctacaaagaaactccttggttgcttctaatgctttaaatcttaagcattgcgggaaacagaacaa

SEQ ID NO: 27217 - DNA, 2681 bp, Glycine max
  Clone ID: TF_GmC356_4
ttcccacgcgtccgcgggtgtattcctgatgataagtttggtgggttcaaagatgtgggcaccaatgtgtcttgtgttgtttcaaggagggacatggcaacccagatgagcccacaggggatgtgcaggtagatgaacacttaccgtgacaagatggtccaagaaacatagggccttattcactggctgaggctcagaacaagtcaaaagctggaaaaaagaaaaagtaagcactcaattgtcaacttgggatgtttctgaaacgccaaaacctgccccaaaggcaaaaagtgaggaagccaaaatctctgcatgggagaacttgcaaaaggcaaaagcggaggcagcaatacggaaactagagatgaaattggaaaagaggcgagcatcctctatggataagattatgaacaagcgtatattggcttagagaaaagctcaggaaatgagaagttcagttccacacaaccaaactgatcgggttgtaagaacttgtgtgtgtagtgcggtggtggtggcataataataataataatggtgagagaattgagtaggagtacatgttgttggtgtactgtttaggaataatgaggttaggtttttgagtgtaatgatgtgagactgaaaggtcgaatctaaggttgaaaaaagatttgaggttggtccattgttgtggaatttttcgcagcagcatttggcagggcgtgagcgtgagggcgattttgctcacaccgatatctagagtggtccagctccaaacccgaacgaggctgcagtacgcaacaagaagaagcacagtcgtttagggagaaagagagaaaaaaaggctaaaggtacacctacatacactactacacctcatctagtttttttttttttcgttgggaaggaaaagattacaaacacgccacgagggcttttaatttcggaaaaattgacgctgatattcaagaacccgtggagttggattctgccagaaactctttctcttccacgcgtccgggtacccctgaaaagtgaaaggtcttgctcccatttctttaacggcttgttttttattttttaataatcccatcgtaattatcgctttttctcgttgtccactaagaatgtcaagacaggagatcaagatctgaagccttgttgaagaggctgcttctttggatctgaacaatgcctctggctctggatctttgccgcgccttcaaacattgaaaaagacttccatttcttctcgaaggtctggtactgccactttccctagtcctggtacactcaattatcgcgttgcaatgcacaagggatggagctccgagcgagttcccttgcatgcaggtgctacccggaagcacgttttgccgttcaacaatgggaaaacattgccgtcaaagtgggaagatgctgagaggtggattctcagccctgtttcggcagatggcactgggagggcctcgcttaatgcaccccaaaggaggccaaagtccaagagcggtcctcttggaccccctggtgttgcgtatcattctatgtactcgccggccgcgccggtgtttgaagtggggaatggggggagttttatggaaggttctccgtttacaggtgatgggttaataatctgcacgagctctttgcatgcgctgtgctcggcactgggagggcctcgcttaacagagtcagtcatcatcaatgcccctccaagaggataagtttggtgggttcaaagatgtgggcaccaatgtgtcccgtgccacttcaaggagggacatggcgacccagatgagcccacagggtagctcacgctcctctcctaatctgaggccttctttctctgcctccaccccatcaaccttgcctgtcacagaattgcggactgttggttcctctaaagtggatattagggatgtgcaggtagatgaacacgttaccgtgacaagatggtccaagaaacatagggccctattcactggcagaggctcagaaaaagtcgaaagctggaaaaaagaactaagcactcaatcgtcaacttgggacgtttctgaaacgtcaaagcctgcctcaaagacaagaagtgaggaagccaaaatctctgcatgggagaacttgcaaaaggcaaaagcagaagcagcaatacggaaactagaggttacttcctagttcctagtgaatagtgattactttattttgagaattccgaataagtaattttctaaaaatgtttactctgaagaaaaataatcattataatgattatggggattattcttcctttgtaataaatatttagatttaggagttcagcttttggaattcacccttttttcttgagttgctgaaatttttcccctgtcgctcagtttcatttggttatcctcagttagctgtatgtcccttagagtgcttaagaaatgcctcttattttttgtgtgtaaaaaaagcctttttttatttgacaaaacttagatacagtattctaatgctgttctctaatcaaaacatttcatcttgaaaattgcggttgatttaagtcacagagacaagaacaatggtgactgaaatgaaatgtcgattttgattggagtatgatactgagaatatctatgatgctcattttaagttttattcttttttattatgatgcaccaatcatacattatttggaccatattatcatccatttaaat

SEQ ID NO: 27218 - DNA, 1323 bp, Glycine max
  Clone ID: TF_GmC17975_1
aattcggctcgagtagaaagagggttagaacaacttaacacagatgggtcaaaatcaaaacatgttgttcagctttccattttcgtagtgggattcttctcttcttgctttctccagtgtcatgaagaagagttcttcatcatcattccagaacttgggatctttcccaagtccaggggcaccctattatagggagagaaacattaggagccaaaagggttggtgctcagagagagtttcaaattcaaagctttcaactagtgctagtagcataagcagaagacacactatggcagggttaataacaacacccttttgtggtggaagaacactgccatctaaatgggatgaagctgagaggtggatttgtagcccagtttctgcgtatgctgagagcagaagttgttcacatgcacagcttcagcgaaggccaaagtcaataagtggccctattgtgcctcctggtgtggcttctttctactcaaatcagggtttggttgtgagaaacttggtggtgggttcacccttctcaactggggtgttggcacctgttgctgtttctgttcaccactttgatgcacatgatggcaatgtttttggctatgacttggacagtggaatgcagttttctaggccctgttatcaatgagaatggcatggtgctttcttctttgtccactgctgaaccacgtgctctgacaccagatgagaagcatgacggaacgatgaatggggaaaacgtagcatctcattcctcaaggtgtgacaaaggtacccaaatgagtccaggagagatagagaatgattcacattcctctccaaaatcttgtgccacttcaattgtggatcaacaacaatgccattcttctaaattagaggtcagagatgtggaagttgacagccaagctacaattgtcaggtggtccaagaggcatgcaaccaaattggccaaaaaagacactctacacagcaaagatttaagagagattagtgcagaagcccaagcatcatgggatattgacgagtcaaacattgacacttccaagttacagagagaggaagccaaaatcattgcgtgggagaatttgcagaaagcaaaagctgaaactgcaatacggaaacttgagatgaaattggaaaagaagagatcatcatcaacggataaaattctaaacaagctaagaagggcacagttgaaagctgagaatatgagaagctcaattcctgtacaacagagccatcaggtttccaagtgcagaatagttcgtgaaaatcgtctttgaatcagtactaaaaaaagacatcactgcgtgacctttcctt

SEQ ID NO: 27219 - DNA, 1824 bp, Glycine max
  Clone ID: TF_GmC3689_1
gttctttttaggatactatatcaacctaaagcatatttgcccttttggagacttgcgctttttctttgttatttcttctttgttccagaatcatcatcaccaatattttccagcaacacatttaccaagctacataagtagaaacaggattttccatatttgaagtgccacggtgcttccccgagaggcttggcaacttaaagtagatcaaaagtgatgaagaagagttctggttcctcccagaaacttggttcatttctaagtccaggggcaccaaactacagtgagaaaagcattgggagccaaaaggggtggagctcagagagggtgttgttgcagccttcaagcagcaacataaggaatgctagtgtagctaacttgacaccctttaacagtggaagaacaataccttcaaaatgggatgatgctgagagatggatttgtagccccgtttcaggctattctaacaacaaaaccaattcctatgcacaacttcagcagcggcgaccgaaatcaaaaagtggtccaattatgcctccaggaacaggctactactccaattactcacccacaattccactgcgccaaggtttggtagtgaagaacttcatgatgggtggttctcctttttcaacgggagtgttggcaccggatgctatttctcttcaccattattattcacatgaggctgttttcggtcaccgttatgactttgacaatagtatgcaatgctctagtccattgctcaatgaaaatagtgtagccctcccatcagtgtctagtgcacccatgtggtcagaactgctatgcgacccttcttcgcctaattctcaagatgagaaacgaaaagaaactaagaatgcggacgacgtgacatctctctcaaaatgtgacaaaggcactcaaatgagccctcctgagactgagaatgatgcaccaaaatcttcacccaattcgaccatggatcaacaaaattacctttctgcaaagttagaggtcagagatgtagagatagaccgtgaggctactactgttaggtggtctaagagccatgtacccaagctgagcttgctacctggtatacactcaaggaaaagtagtagaacggaagccaaagcttcaggtttggatattgcagactcaacgttggactcttccaagattcagagggaggaagccaaaatcgttgcatgggagagtttgcagaaagcgaaggctgaagctgaaatacgaaaactagagatgaaattggaaaagaaaaaatcgtcatcaatggataagattctaaacaagctgagaagggcgcagatgaaggctgaaaagatgagaaaccaaataactgtacaagagggtcagcaggtttccaatactcgcaaagtattttcattccacaaatatgcccagatatggtctccaaggagctgcttcggcactcatgctctccatgattaattaataatttaatatttaatcccatacccacgccctgaaatcactaaggtttagtcccgaaaaatgcaggaataatcatatttcaagtcataggccatttttgtttgccttttgtacttcccaacaatgttaatagtgaattactaatacattgtcttacagccatttgatatgtttggcattatgtacgagacctaatcgggattatttctggatgcttgcctttctttttaccgtttattttcttctcccctctttattactaagagcatcgttggaggagcacaagtagttcaagaattggagcgttttccatgaccaccatcagcaaatttgcattgtaaataatattcaaaatatttcacttctttc

SEQ ID NO: 27220 - DNA, 586 bp, Glycine max
  Clone ID: TF_LIB4390-036-R1-N1-B12
aaaaaaaaaaatctaaagggtgttttgtttggaaaaaactttataggggccccctttccttttgggccccccataaacaacttttaaaaaacaaacgggaaaatattaaagttttttttttcattatgggtaggacctcgggcccaaaagcccacccccaaaaaagggaataaaattttaaaagcctccaagggccttttttggagaggttccagttgcccggggttttgcaactttttcctcggccttgaaaattttttcaccacgctggggttaaaccatgggtcttttcccctcgggtgggtggggaacaaagggtattttgtttttaatttttacaccaaattcgggtttttttttctttagggggcccggcttaaacccgagagttttaaaaagaggaaggccatcctttttaagggctgggatgtttttaggggggattcaagggtgagtcccatttttggaatatcaaaaaaaaatttaattggagggccctcttgattaaaaaataaaaacaacttacccttgcgggcaattataatcaaaactttgggaaaaaaaaccagagcaatttttataaaaa

SEQ ID NO: 27221 - DNA, 358 bp, Glycine max
  Clone ID: TF_uC-gmrominsoy183f05b1
gcgaatgatatccagacgaggatatacaaatgagggggggcgtcattgagtaccaggggaaagcatccaagcacttaatgagtaccgctttcatctgggtaatacactcgggtctaagcaggaacaacaagagaaatggaaagcagaccatggcgacaaaaagaaaaccagcctcccctgagttaacacgcaagcagaggagaggagagcattggttgaagccaagcgcgcagaacaaattcgcaaggcaaaggaaagagctgctaaagaccgagcagctggaagctctacaaagaaggcctctggctgcttttgaaggctgatgccttaatacgttgttctgcttgtgtgcctgatg

SEQ ID NO: 27222 - DNA, 351 bp, Glycine max
  Clone ID: TF_LIB3108-040-QI-K1-C4
cccacgcgtccgcccacgcgtccgcagagactcaagaagttgccgaagtgaaaccaactgagggctctgtcaaccgagatgcagtgcttgcaagagttgcaactgagaagagattgtcactaatcaaagcatgggaagaaagtgaaaaatcaaaagctgaaaacaagtaagagtctacactctttggttcagaagctagaatcttcaattgaatcaccttaatcatggtgattaatcgacctaacatcaagctttatctaaaaatgctcaatctaacatcaagctttatctgaaaatttattggttggtttccttgtttatcttgtgctgatctttgatattttttgcaca

SEQ ID NO: 27223 - DNA, 1120 bp, Glycine max
  unsure (1)..(1120): unsure at all n locations
  Clone ID: TF_GmC302979_1
ctttgttgaagcagataagaacgaaattaactggtgcagaggagaagaataaagctgatctgggtggcagcagggatcagaaagttacacacagaaaaccccatccttcaaagataagaaaaaggctcagaattggtttcagagacaattttcaagaaccatgagtcatgattatgacgcagaaatggagcttgccacattttttgctgctgctgcattcgcaattttttcactagagggttcactaattccacagcaaaagaaaaagagggagacacctttgaccagaggcaaaagcaaagtggatgatacaaaacctccaatttctcagtttggtggcacatcaaggcagttctcagtggatttgaagaggcctgaaaaaaccatgacccctgcaccatcaatgaggaggagttcaacttttggtgaaaaggtgaagagtagcactgatggtaaaaaacctgagatccaagccccaaaaaggactacaacttttggtgatgagcactcggtgaacactggtgaaataaaacctgagaccccactaccaagagttgctccaccagttcatcagcaaatgcctttaaggccaccgccacctccattgccaccaccgccaccgccaccaatcaggcagacttcagcaagaccaggtaccaatggaacaaaagcagatgcctgggagagggaggagttggaaaagatcaaagaaaggtacgagaagttgttggaaacgatagattcatgggaaaagaggaagaaggcgaaagcaatacgcaagctaaataagcatcagcatagtgaaagtgaacggaaaagggcgaaagtgttgaagaaatatcaagataagatgagctatattagtcaaattgcagggggagcaagagctcaagcagaggaaagacgaaggagttaagtgctcaaagcaaaagagaaaaaaaatataattagaacaacgggcaaaattccagggccatgctcttgcttctaacaacaccaattatatatatgtacatattacataacatcactaattaaagtttgggtataacaaaaagaatatgtaattaattatctgttttacaattctgtgaaaaanaaaaaaaaaaaagagaaaaat

SEQ ID NO: 27224 - DNA, 258 bp, Glycine max
  Clone ID: TF_701100625H1
tagctgtagctccgcgctcgagaagaaagcggtggcggtgccacacctgttccggctgcggcagaggaaaccaaagctcttgttattgtggagaaggagaaggagaatgagaagataccagaacctgtaaaaaagaaaggcttaaggtgaatccctgataggaaaattgtcttggaggaattagagaaagagaaacgattgtctaatgtgaaggcttgggaagaaagtgaaaaatccaaagcagagattaaagcccaa

SEQ ID NO: 27225 - DNA, 2096 bp, Glycine max
  Clone ID: TF_GmC1419_1
attatgcttaagtcggtggtattactcattttacaaatcaaaattacccctataagttttttttttttttttggttgaatacctctataaggttttcgaagggtatatatacttttttgttaaattaaattttcatgtcacaagttttaaattgatttaactgataaaatacatatttaaccactgagttggaatcgattaacatgaattattcaaatttactagtgataacaagtttaagtataaccatcttacatattagtatttgaagatatattttattaggcagctcaaacactttccgtgtgatttgtaccaaaaacttaacattacttaatttgttgatcaagtaatgcaaaatcattacagtttaacggctggaggttttgagtttgagtgaaaaatattaggttaaattaacaattaaaactatagtcaaagatatcatttaattgtatgtattattatatactaatactaacataagtttcacttactaatttgattatgtatcatatactaatatgagcgatgatgttaattacatgtatgatggcacagtaatttcactatttatccgtttgattttcgcgacactttaaaatcaaagccactttgtgttgaagggccaactccaaaagaagcatcatcttgtcatcacgtgtccgacagcacaacttgtttatcggaacgttgctataaacgttgttgttttcagataaacacgtgactcactatctatctatcaatcgatatctccgagttcaaccgaaccaaactccgaagctatggcagagctccaaaccaaggttgaacctgttacggtcccggctccggctccggtggatcccgagccaccgctagctgaggctccgccgctcgagaagaaagcggtggcggtgccaccacctgttccggctgcggcagaggaaaccaaagctcttgttgttgtggagaaggagaatgagaagataccagaacctgtaaaaaagaacgcctcaggtggatcccttgatagagacattgctcttgcagaaatagagaaagagaaacgattgtctaatgtgaaggcttgggaagaaagtgaaaaatccaaagcagagaataaagcccaaaagcagctctctgctgttgctgcttgggaaaacagcaagaaagcagctcttgaagctcagctgagaaaaattgaggaacaactagagaaaaagaaagcagaatatggtgaaaaaatgaaaaacaaaatagccttagttcacaagcaagcagaggagaagagagcaatggttgaagccaagcgtggtgaagaaattctcaaggcagaggaaatagctgcaaaacaccgtgcaactggaacctctccaaagaaggcctttggatgcttttaaatttttattcctttttttgttgttgtgcttttgtgcctgatgtcatagcaataatgaaatttttgtctataatattttcatgtttgttttttaaatgttgtttatgtgtgtacgaaatggaaagggggacactatgaagtttgtgacatacagaacagcctctagatctttttgttaagatgaagtgttctatgctgtttattcatttgttttttccataacagaatcattctattcactgggaagaaagtgaaaaatccaaagcagagaataaagcccaaaagcagctctctgctgttgctgcttgggaaaacagcaagatagcagctcttgaagctcagctgagaaaaattgaggaacactggagaaaaagaaagcagaatatggtgaaaaaatgaaaaacaaatagtcttagttcacaagcagcgagaagagagcatgtttgttctttcatgttcaaattgccaaacttttgctttgattgaatcatgggttaccgtgaaaactcaaattatacaattacatgctagctagtagcttggatgctttttctatagtgccgactcgtttttttggagtatccatggtatcatgatgagagctggatccaataactttgttcagtaataggaattattttgcatagctgtgtaaacacctgtatgagaaatccttgatcaaaagtaatttattcattcgcccgttaatcat

SEQ ID NO: 27226 - DNA, 2288 bp, Glycine max
  unsure (1)..(2288): unsure at all n locations
  Clone ID: TF_GmC682_1
gatttaaatgcgaattgaatttgtagcatgaggggccactgtgatggcgtggcgagatgatagatagatacaatatctcccgtactgcagaggaacccaacttgaacactttcttgagcaagcaaacacctgtttctgctcttgttctggctgcatcaacattcattcataatctcactctccctttctctctcatgtgttatcgttatctctcattcacaatcacaactcaccactcataactacttcttccaagccaagctgcaaaattcaactttttccccttccacttctgcatgaactaccttccaacttagacagtcagagatctaatggagtacgagaggatagagaaagttcaggctggaataatttcccccagtaaactgaggatgaagttattaggacctctccatcataggaagaaagatggatccaacagtaactcatccagaacttccccttcaaggattgaggatgctgaatttgtgaatagcttacttggctcaaaaaatgacaaccttgatgatgaagttacatctccaagcttggatgttctgtcattaaagccgtcgagtgatgctgtgctggaccggagacaaaatggccagatttcctatgaaccaaaggagacaatgcctaaggaaaacagcgacacggggcgtgtaaagatgcagcattttcagaaggttgacacgcgaagttcaagcgcaattcatgcggtgagagcaatagaagatgaaaatcttgattatgacagcaatgctagctcgtccagttttgagtttgataaaggggagagaccagggaacaatcctgccactagaccctattcagacctattccttctaagtggaatgatgccgagaaatggataatgaataggcaaaatatacaggctaatcactcaaaaaagaatacttgtcataaccaagcaaatcgcatgccaacaaatatggggagggttgcaccagagtctggtaattatgatcacaaactcccaacaggcaaggccacagaaacaaagcgagtcgatttctgtcagcctacgtcacatatgggatttgagaaattctcttttgttccctccgatgctcattcggtttcaggtcaagcacacggaagaaatccagttgtggagtctcttccccaaagcaaagatctaaaagatgtcaatgaattgggtttatgttgctcaagaagtacagatgatcagtcagtgatgcctgggataagatctgttgccatgagagacatgggaactgaaatgacccctgtgcccagtcaagaaccttcgcggactgctactcctgttgggtctgcgacaccactacggagccctgtttcctcaatgccgtcgactcctaggacgggtgcacctgctccgacacctttggacaacacgaccaatgaggattcccagtttccagttgaaaatggcaaaaggcatttgtctgaagaagaaatgaagatcaagacaaggagagagattgcagcccttggggtgcagcttggtaagatgaatattgctgcatgggcaagcaaagatgagcaggaaaagaacaaatcttctccccgggacatgagtgtgcaagaacaggagagaattgaatttgaaaaacgtgcagctctgtgggaggaagctgagaaatctaaacatactgcaagatttaagcgagaggaaatcaaaattcaagcatgggaaagtcagcaaaaggcaaaattagaagcagaaatgagaagaattgaggccaaagttgagcaaatgagagcccagacacatgcaaaaatggtaaaaaagattgctatggcgaggcaaagatcggaagaaaaacgtgcagcagctgaagctagaaaaaatcgagaagcagaaagaactgtggctcaaacagaatacattcgccaaacaggacgattgccctcttccaattacatttgttgtggttggctgtgatatataccttaaacactgcttttagaagaaaatgcaccttactacaagattgctaatctttcttaccgtggatgatatgggtcatcaaaacttggcatatcatcttatacgttacttgaaaccttgtaattttcaaacacctgagtgctacattaaattgattgctgagtgatgtttacaagtcacaaaactgtctttttttttcaaaaaaaaaaggaaagaaatgtttgttgtgatgtacctggccttttttattttgctctaatgtaaattttcatgtgatcttgctttcagtttatcatatttttttgatactcctgttgngtctgcgacc

SEQ ID NO: 27227 - DNA, 1917 bp, Glycine max
  Clone ID: TF_GmC1419_2
cttgtaggtataaaatcaagttacattccaaaaaagaatcctcacttgaaaatagacaatctagcgaattagttctatgttgatacggtttgcatgacacaataacccaacaagtcaaaacccttcataagttcatatgcttcaagatcagatgaggcctatatttaagatgtggcttaccaaaaaaaaaatatttaagacttttgttatctgtaggccaatatgttaaggaaggaatatttccacaaatttaaaacgtcatttaattatttttgtttttttattgtgtgtgtctttatgttaagaaattattgttttctgttaacagagcccaaaagcagctctctgctgttgctgcttgggaaaacagcaagaaagcagctcttgaagctcagctgagaaaaattgaggtattatttgttgctcagttattggttgatacaatgacatagttttttctattattcatgatgcatgtttggcctagttctgaacattataatcaagataagaaagacaaaataatgtaagaatttatgttgtcctgtgttagatggaataatatacatgattctgttaacacaaaaaatatctagattttttatccaataaattcttttttcctcacccttgtcacattcttacaagacatgtggaacctttatccaattactctcttgcttttgtcaaaatggtatcaaatacctatggagtccctaattgagtccatttactaaaagaattatgcttttattaatgaaatgaacagctacagtctggaacgtactaaagttgatacttctttaataaatagattttgtccatatccatttaacaggtgagctatctctttctatcataagaatacaaaatagtgttattttaactccaattttgacagcagaagttaaacatggcttctcctcggagggacccccttttctccttcctttccgttcaaaaggataaggaacaaattctttaacacaacttttttagtttaattttgtcacagtcaatataaatatttttacattattaatcaattaaaatccattctaaatatcactcaagtaattattataaatattgctctagttattattacaaaagttatgatgataattgcatgctagtgtatgttgtttttattttttaatcaagagtgcactctaattaaatttatttatgatattcaaataatggaactcaacattgaataccacataaaaacatacaagcacttaaagagtattgcattcatctttttaatactctcgagtctaagcaggaacaactagagaaaaagaaagcagaatatggtgaaaaaatgaaaaacaaaatagccttagttcacaagcaagcagaggagaagagagcaatggttgaagccaagcgtggtgaagaaattctcaaggcagaggaaataaatgcaaaacaccgtgcaactggaacctctccaaagaaggcctttggatgcttttaaatttttattcctttttttgttgttgtgcttttgtgcctgatgtcatagcaataatgaaatttttgtctataatattttcatgtttgttttttaaatgttgtttatgtgtgtacgaaatggaaagggggacactatgaagtttgtgacatacagaacagcctctagatctttttgttaagatgaagtgttctatgctgtttattcatttgttttttccataacagaatcattctattcaccaagcaatagattttctctctcttcaaaaaaaaaaaaaaaaaaaaaaaaaaaaaaaaaaaaaaaaaaaaaaaaaaaaaaaaaaaaaaaaaaaaaaaaaaaaaaaaaaaaaaaaaaaaaaaaaaaaaaaggggggggccgttttaaaggatccaagtttacttacgcgtgcttgcaacgtaatagcttttttt

SEQ ID NO: 27228 - DNA, 884 bp, Glycine max
  Clone ID: TF_GmC129326_1
ataccaggtttctcaattcaactttccaacaagccaacggcaatgccagagcggcatgtgttctctgtttctcaattcaactttccaacaaggcaacggcaatggcagagctgcaatcgaagtctgaaactgcccctgctccggctccggttgtggctgaggtgccatcgaacgacgccgttgcaaagaaagcttctgaaacaggggaatccaaagctattgtttctgtatccgagaagacaccagttcctgcaaacaagcaaagctcaagaggatccattgatagagatatcgctctggctgaagtagagaaagagaaaaagttgtcctatgtgaaggcatgggaagaaagtgagaaggccaaagcagagaacagagctcaaaaacatctctcagctatcgctgcttgggaaaacagcaaaaaggcagctcttgaagctgagcttaaaaaattggaggaacaactggagaaaaagaaagcagaatatggtgaaaaaatgaagaacaaggtggccttagttcacaaggaagcaggggagaagagggcaatgattgaagccaagcgtggtgaagagattctgcagacagaggaaatggctgcaaaataccgagcaacaggaaccactccaaagaagactataggatgcttttgatttttttgcattttgggtctgatttccaaaataatttgtaattgcccattttgtccgtggtttctaatgttttgttctcaatgttttctatgtctaagaaatagtccaaataaaacaaaattttgtaaatgtcttttgttttgatcatctagcttgggcgaaatgttctatgcaaaggtggtttttcctaagagtactactctaatatcaactaattgagtttctctttat

SEQ ID NO: 27229 - DNA, 570 bp, Glycine max
  Clone ID: TF_GmC708611_1
tttacaataataagcattatattattaatgtacaaaacttttaatcagcacaaccaaccaaatgatcattcatgtctataaattaattctaatgcactaatcaatcactcaaaaacactccaattggtttctatataatatataatataataacatatacacctcatatcttctttttctttatacactgctagccctctttaatcctttaaattaaattcaaaaggaaaagggactcttatcacactatgtcatctattatgctcaaactttttcactctatgtttctctttttggttacttttctctacaaatgtggtttcaaaacataacattcattttatataatttaaaagaaagatcttttggtaggtgctcttccaactgctctcatgaggttggcaatctccagaaccctggctactttagttccccttttagcctctgccgatgcctttctctcctcatcttttctttgtgcttttgctacatcattttgcattttctccagtgctcttgctcttttctcctccagcttcctctcaactttcttcatccatgaagatgctt

SEQ ID NO: 27230 - DNA, 441 bp, Glycine max
  Clone ID: TF_5820122
aggcaaggaagtggaggacggagacacttcaagcggtgttagacaagagtatgcaatttctccactcaatctatttcttaccactaggacgggttcaaaggaatcagttgacagaggtttgaatcagagaaaagactggctttaataagagcatgggaagaaagtgagaagacaaaagcagagaacagggcatataaaaggcacaatgctgttgtattgtgggagaatagtaagaagcatctgcgaagcacatcttaaaaggattgaggaaaaattggacagaaacaaagccaagtgtgtagaaaaaatgcaaaataaagttgcagaaattcatcgaacagcagaagagaaaagggcaatgatagaagcctacaagggagaagaattcctagaaatagaggagaaagcagcaaagtttcgtacccgtggctattcacccaa

SEQ ID NO: 27231 - DNA, 1045 bp, Glycine max
  Clone ID: TF_GmC1744_1
gaggccacttgtacctaccacagtcacccactcagctaagcttttagaatttgagttaagttaccttccttcaaccataatacccctgccagctctgtcctgttcctcaatctctctacatatctatctatctttctatcatcacaggatccttaataagtcagaactttgtcacaactttttcccatcactttgtggaaagatattcattctaagggaaaaatgacagaggagcaatccaaaaaggtggctgagactgagagttttccctctaatcctgcacctgaacctgttgttgttccaaaggaggatgtggcagaggagaaatctgtaattccacaaccctctccctctcctgctgatgagtccaaagctcttgtcatagttgagaagactagtgaagttgctgaagagaaaccgattgaggggtctgtgaaccgagatgctgtgcttgcaagagttgcaaccgagaagaggctgtcactaatcaaagcatgggaagaaagtgaaaagtccaaagcagataacaagtctcacaaaaagctttcagccatttcagcatgggaaaacagcaagaaagctgcagcggaggcagaattgagaaagattgaagaacaactggagaagaaaaaagcagaatatggagagaaattgaaaaacaaaatagctacaatccaccgagaagctgaagaaaagagagcatttattgaggcccaaaaaggggaagaattcttgaaggcagaggagactgctgcaaagtacagggcaactggaacagccccaacgaaactctttggttgtttctaacaagcctgatcattaaaaaatgctgtactattattattattattttgtattttctttgatagttcatgtcagtacatcgtgtgtggtttggttgtcttttgctgagttgtagttcatgttcatttattatgtttgcatagtgatatcactgatatgttggtgtgaatataacaatttactttgtgtatacacaagaaattgaattattcaatttgggtattacgaaaaagaaagaatg

SEQ ID NO: 27232 - DNA, 455 bp, Glycine max
  Clone ID: TF_jC-gmXLIB3564P117ab02a1
ggaggagggcaatgacttcaagcgacaaggaactaatacccagattggataatttaatttctttatccacaaaggagttgggatataccccccaacatggcgggttttacccctaataaatgaacctgaacctaatctcccacctttaaaccaaaaacccccttggattggtgaaaggtaataacccaagattcctaataaaaattaaccctttttttttggttcccaaaatggttaaaaattaaaggcttaaaaaccacccaggggtttttttggaaccggtccaagtggtttattctttggaagttggttctttggcctaaaaaaaaccttccctttttttggcctaattattggttttttttttttaagttccctggggaatggaacaaatttggtttttaattttttttgaagttttggccttttttttttcaagttcttcttaattcttt

SEQ ID NO: 27233 - DNA, 529 bp, Glycine max
  Clone ID: TF_jC-gmst02400020g01a1
ggctcgagctactcataggaggccacttggacctaccacagacacccgctcagctaagctggtataaggtgagttaagctacctttcttgaaccataggattccaaccaactctggcctgttactcaggctctctacatatgctatctatatgtctatcatcacatgagtccttaataagctggaacttggtcacagctgggtcccatcactgtgaggagagatattcatcctgagggaaaaatgacagaggagcaatccaggaaggtggctgagactgaccagtagaccctctaatcctgcgcctgaacctgctgtatgtgcaaaggaggatgtggcagaggagaaatctgctattgacacacccctctccctcttctgctgatgagatcaacgctgttgtgatagctgccaagactagtgtagccgctgaaaagaaaccgattgaggggtctgcgcaccgagatgctgcgcttgcgagagatgcaaccgagtagaggctgtcactcatcaaagcatgggaagaaagt

SEQ ID NO: 27234 - DNA, 994 bp, Glycine max
  Clone ID: TF_GmC1351_1
atctcgtaattcgcctggaggtggaggacagaaatttttagtctcagccagcacaatttatctcttgcaatccaaaatgaaacaacatttgttcctcccccttcaacagctcggtctgtgtcaatgagagatatgggtaccgaaatgacccctattgctagccaggagccatcaagaacaggtaccccagtgagggcaacaacaccaatgcgcagccctaattcttcccggccttctactccccccagagcctcccctgcatctactttaactgatctacatagtgacaatctgaatctcaacatgaatgagttgtccgaaaaggagctacaaatgaaaacaaggcgagaaataatggttctcgggacacaactaggtaaaatgaacattgctgcctgggctagcaaagaagaggaggataaggatgcatccacttccctgaaaacaaaagcagaattacctaagagtgtcgttgaagcacgtgcagcagcatgggaggaggctgagaaggccaagtacatggccaggtttaggcgtgaggagatgaaaattcaagcatgggaaaatcaccagaaagcaaaaacagaagccaagatgagaaaaattgaggtagaagttgaaaggatacaaggtaaggcacaagataagctaacgaataaattagcagctgcaaggcataaggccgaggaaaagcgtgcagcagcagaagccaatagaaatcatcaagctgcaaaaactgaagagcaagcagagtatatacgaagaactggtcatgtcccttcctcatatttatcattttcttgctgcaattggtgctcttaaaaaaagccaatctttgtcaatgtttattttttgtttctataggtatgaaatgccttttgctgcttacacccaagcatgttaaatatgcctgttgcatttccctcctggtgtaaaatgttacattgttctgaagaataattgcaatttgaaagtgctttgctatttgttcagt

SEQ ID NO: 27235 - DNA, 208 bp, Glycine max
  unsure (1)..(208): unsure at all n locations
  Clone ID: TF_9565963
ttccagttgctctatactttacagcttattcctctaccttaaaaagatcttcccctttctttacctgaattattactgttgtttctgcancttccttataaattgcggcaattgtggttgttatcttgtctacaacgtggacctttttctgctgcagtgcttctgcgatctgttgcaagtcagcctgcacatcagctggcttggcttt

SEQ ID NO: 27236 - DNA, 613 bp, Glycine max
  Clone ID: TF_GmC239_2
atgggtcacaacatgttgctgagactactaggaaatgtggaaatggagaaggatcaacaagcccttgcaagaggactcatgaagatcatcaagctagaaagttgagtcctctagaaagccgagcaatggcttgggatgaggccgaacgtgccaaatatatggccaggttcaagcgtgaagaggtgaagattcaagcctgggaaaatcatcagataagaaaagctgaaatggaaatgaagaaaatggaggtgaaggctgagagaatgaaagcattggcacaagaaaggtttacaaataaactagcttcgactaagaggatagctgaagagaaacgagctaatgcacaagtgaagctgaatgacaaagctttgagggctactgaaagggttgagtatataagaaggacaggacatgtgccttcttctttctctttaagctttaagttgccttccatttgctggtagtagcaattttgcaaccaatatatgtaatatcttgtcgtgtgaaatataaaaccttcagtacaattggtaaaatttatcatgaagctgttgacatatataaggtaatgtttcattaaattacacttgggtgcatttcaaatgtaaattta

SEQ ID NO: 27237 - DNA, 441 bp, Glycine max
  Clone ID: TF_LIB3242-271-Q1-J1-H11
aactgaaccttttttattgtctgtcatgggagaagaggtgtctagcaaaaccgaaccagagctacactgtgtggactctgttcctgaagagcataattcctctgttcaggaaaaagaattggagaaacctgaacctccaaacgacaaggtcactcctccttctccagctgctgctcaagaggttgcagatcatgctagtaaaaaggacacagaggagtcacttgacaaagatgctatgcttgcaagagttgtaacagagaaaaggttggctttagttaaagcatgggaagaaagtgaaaagacaaatgcagagaacagggcatacaagagactctctgctgttggattttgggaggatagcaagaaagcatcagtagaggcacaactcaagaaaatcgaggaaaacttggaaaaaaagaaagccgaatatgttgagaaaat

SEQ ID NO: 27238 - DNA, 799 bp, Glycine max
  Clone ID: TF_GmC989_1
gaacctttgctattgtctgccatgggagaagaagtgtcctacaaaaccgaaccagagtcagagctacactctgttccccaagagcataattcctctgctcaggaaaaagaattggagaaacctgaacctccaaacgacaaggtcactcctccttctccagttgctgctcaagaggttgcagatcatgctagtaaaaaggatacagaggagtcagtcgacaaagatgctatgcttgcaaaagttttaacggagaaaagattggctttaatcaaagcatgggaagaaagtgaaaagacaaaagcagagaacagggcatacaagaagcactctgctgttggattgtgggaggatagcaagaaagcatccgtagaggcacaactcaagaaaattgaggaaagcatggaaaaaaagaaggccgaatatgttgaaaaaatgaagaataaaattgctgaaatccaccggttagcagaagagaaaaaagcaattgttgaggctcagaaaagggaagaatttatcgacctagaggagactgcttcaaagtttcgtagccgtggagatgtgccaaggaaattttttgcatgctttggtggctaagcttttacatgaatatcggggaccaaattctcgctggatttgttatatgttgttacatatacatttaaattttgcttggtgtgttgttttttcctatatgctatttgaatcaaatctcaacagttgatttgaagtgcacaaatttctgtataaataagtgaagaaattttgtctacatacttataattgttctatattgactatt

SEQ ID NO: 27239 - DNA, 1109 bp, Glycine max
  Clone ID: TF_GmC80032_1
aattcggctcgagggaccccatctctatcatgtgtgtggtctacactcacccctccattctcattcattaataacaacctcacaaaaacaaaagcacacacacacacctatgctcgctcgatcatcgaatgaaaaaaccaaccaaaaaccctttctttcactttggttgtctcttctacaccactttcccttcaccttccgttctccactcactactactaacataaattaaaaacacgccatgaacaacaacccaacaacaatcatcggttccactacccacggatcagaagaagaagatgaacacatcactgaaataagggaaatccacgcgttaaccccgccgccgccacgtggcagagcctgggagacagtgcatacccacaggtcaagctctctctccgtagcttctgaaggcggcgcctcttccagcgagaacttcagcatgagcagagagttcagcgctctggttctcgcagggtccagcatcgaccacgacaacagcaacaacaacaacagcaacagtcccatgaacgaaaacaacaatagtaacagcttgttggggaggatcagagaagaggacttgatggaagagacgaaccctttggcgatcgtgccggataaccaccctctggacccggttccgtcgtcgtcgtctcagggagtaaggggtggcggcgctgcacgtgaggagcacgtgtcggttcagcgggtgaagaaggaggaggttgatgccaagatatcggcgtggcagaacgctaaggttgcgaagattaacaacagattcaagagagaagacgctgtgatcaatgggtgggagagcgagcaggttcagaaagcttcctcctggatgaagaaagttgagaggaagctggaggagaaaagggcaagaccaatggagtaaatgctaaacgtcatagcaaaagctcatagaaaagcagaggagagaagggcatcggcaaaggccaaaaggggatccaaagtggcgagggtgttggagattgctagtctcatgagagcagaggaaagacctccggccaaaaaatcgttcttgtaataagctgttcaatatttcatatgttcagcttattgtacacatttctacacaa

SEQ ID NO: 27240 - DNA, 933 bp, Glycine max
  Clone ID: TF_GmC1419_3
cggggcggcgggggcgtccgcccacgcgtccgtacggctgcgagaagacgacagaaggggacagcacaacttgtttatcggagcggggctataaacgttggtggtttcagataaacacgtgactcactatctatctatcaatcgatatctccgagttcagccgaaccaaactccgaagctatggcagagctccaaaccaagggtgaacctgttacggtcccggctccggtggatcccgagccaccgctagctgaggctccgccgctcgagaagaaagcggtggcggtgccaccgcctgttccggctgcggcagaggaaaccaaagctcttgttattgtggagaaggagaaggagaatgagaagataccagaacctgtaaaaaagaacgcctcaggtggatcccttgatagagacattgctcttgcagaaatagagaaagagaaacgattgtctaatgtgaaggcttgggaagaaagtgaaaaagaaagcagaatatggtgaaaaaaatgaaaaacaaaatagccttagttcacaagcaagcagaggagaagagagcaatggttgaagccaagcgtggtgaagaaattctcaaggcagaggaaatagctgcaaaacaccgtgcaactggaacctctccaaagaaggcctttggatgcttttaaatttttattcctttttttgttgttgtgcttttgtgcctgatgtcatagcaataatgaaatttttgtctataatattttcatgtttgttttttaaatgttgtttatgtgtgtacgaaatggaaagggggacactatgaagtttgtgacatacagaacagcatagaacacttcatcttaacaaaaagatctagaggctgttctgtatgttaagatgaagtgttctatgctgtttattcatttgttttttccataacagaatcattctattcac

SEQ ID NO: 27241 - DNA, 430 bp, Glycine max
  Clone ID: TF_uC-gmroLIB3259008h06a1
gaataaaaccagaaacaattaaaaaattttggtttatttggaccaatttttggacatagaccaccaaccttgggaaccaaacaggaaaaaccccattccaaattggccattagaaattattttgggacttaaaaccaaaattttttaaaaatggaaagccttccaatattctttttggaaggggtccttgtgcttaggaatttggcacccttttcctttggctggagaatttttacaccacgctgggcttaaataatggccctttactcctatgcttcttagagaactaaggccactttgttcttcattttttcaccatatgctgctttctttttctccagtagatcctccaattttttaagctcagctacaagagctgcctttgtgctgatttcccaagcagcgatagctgagagatgttattgcggac

SEQ ID NO: 27242 - DNA, 1235 bp, Glycine max
  Clone ID: TF_GmC6783_1
ccacgcgtccgattgttactgtgccaacgcattgtgaggccacaagtacctaacacccagctaagcttttggaacttagagttaagcagttaccttcctccaactataatatctcaaccaatcaaaatcctttttctcaattctctctctctctctctctgactctctccacaataagtgttgattttttcctaaataagtgaaagtgtagttacacctttttttagtgttttaccacttttgagtgccacagagttctgagtttcataggagaaaaaaatgacagaagaacaaaccaaaacggctgagtcagaatcagtaacaccaccacctgctgctgctccttcacaggctcctccagctgctgaggctgaacatgttcctgaggctccaaaggatgtgactgaggagaaatctgtaattccagtgccttcttctgatgacaaacctgatgagtccaaggctcttgtcttagttgagaagactcaagaagttgccgaagtgaaaccaactgagggctctatcaaccgagatgcagtgcttgcaagagttgcaactgagaagagattgtcactaatcaaagcatgggaagaaagtgaaaaatcaaaagctgaaaacaaggctcacaaaaagctttcatccgtttctgcatgggaaaacagcaagaaagctgcagtggaggctgacctgaaaaagattgaagaagaactggagaagaaaaaggcagaagctgcagaaaagataaaaaacaaaattgctgcaatccacaaggaagctgaagaaagaagagcaataattgaggcaaagaaaggggaagatcttcttaaggcagaggaacaagctgcaaagtatagagcaactggaacagctccaaagaaactccttggttgtttctaatgcttcaaatctcaagcattgtggggaaagaaaaagttattttttattgtgtatctttggttattaaatatcattaatacaagtgtggttttagtttacatgttggagatttagcccatgttcatttattatgtgtgcaaacctgacacattggcgtgtatataccaactactttgtggataaagaaattaaattattcaatctgtgtattagttacttgtcgcttgaagtcattgacctacttcagcctctctgcactagttagttctttttcattatccgaagaattatgtaatgatataaaattctattgagttgtatttacatgtaagaataat

SEQ ID NO: 27243 - DNA, 172 bp, Glycine max
  Clone ID: TF_19271195
catccatggtcagaggttatatatgactatggagcagaggaggtattttagggaggagtatggaattgagacctggacttttattcagaagttacgagatgctgtttttatgcgagttggtttggctctctatgtgataaatcaggatggctgtatcaaggcggcactggag

SEQ ID NO: 27244 - DNA, 580 bp, Glycine max
  Clone ID: TF_LIB4167-010-Q1-N1-C2
agagaaaataaaccatttacttaacattcatttcttcgtgttcggaaccccgacttaacaagttcaaagttaaataatcaaattgcaagtagatatcgacctggttatgtacatgtactgctgaattacatgttcattgctactctacttatccttcaagcttctccaaatcgtctgcagccttgcgtaatgcatagagacacattttcttcaccccaagtttgtcttcctttgctttatggtttttgggaagagaacgaaattcctcagtcagacgaatacactcttgaatattttcaggagagacaaaatctagagcaaccttaatgcacgactttaagtttctaacttgatggggacacccggcaggtataaaaacagcctcaccaaggttttgtataaaagtccaaggttcaactcctgtaaaaggttcctcaaatgcataaatacaaagatggtgaaattctatcaaggccacaaattaaatatagataaagtactaaccaaattcttgcttgagcttacttttatgataagaagtcagataaaaaacttgatcatgaatggggtgaaaaaccta

SEQ ID NO: 27245 - DNA, 439 bp, Glycine max
  Clone ID: TF_jC-gmXLIB3563P024bc05d1
ttagtttttaactttgtatatattacattgggtcttttccacattttgaaataaaatacagatttgaagttttgctattatatgattctctaacgtaactattatacacatttaaatgattacctaggtatttgatcaaaactaccctgaatagcaacccataaaatattactcaaatacaactattgtacacaatccaccccccccccccccccttctggattcaatgaccaaactgaatgtggacgttcaagcacaagtaatctgcctccggttaaccatcttctcgtaattctcagaaaccattgcagtcaaaataggggctccatatacaatctctgcgccaacttttggggcaagtacaagtttttgaacctttttgatgggtgaacttgctgcataaagagatattttcccaaccttcaaaacttgaagcttt

SEQ ID NO: 27246 - DNA, 488 bp, Glycine max
  Clone ID: TF_uC-gmflminsoy058h11b1
tttggtccaaaaacatatattgcatatgggattaaagaagagcttggttgaggagactctgtaacaaagcttcattgtgatatgtcagatgcggtgaatattttgacccatacagctgaggtgatattaactgatgagcagcactttactatatcaaagttgaaagaagcacacagggcacaaaatgagagagaacagtgtgcccaagagagggttgctgaccacctggaggatcgaccttacaaagacaacaaagaacatatagaaaataaggaagttcttgaagccaaaagcatgaagaaacaacctattgaaattgatggaaacatctttccaaataatgtgcttgagaggtacacttctcctgctacagagaatgaatcaatggaaactggtagtgccctatgggatatctttcagagagaggattctgaaaagttagaaacatatcttaaaaaacactcaaaagaatttagacatacttactg

SEQ ID NO: 27247 - DNA, 1071 bp, Glycine max
  Clone ID: TF_GmC385_1
ttgctactgaggggccacaggaacagaaattgaatggaataccattattgcatggtccagaaacagagcgaaaaggctcacggagtatggttgaaggaatgaactttttccggagagtcaatagaacatcttgcatctcaactgaagctaaaaaagtttctagtcagagcatggacagcaatggggaatgtgatttcatttctgattctgattctggatctgctttacttctccttgggactgttcaaactgctgaattgtcagaacacgataatcctagaaatccctttaaaagctcaaaaagacataaaaataagtttactgagcatttgggtgcccagtgggatgtctttcgcagacaagatgttccaaagctcatcgaataccttgaaagacactatgatgaattttcttatacccatgactatcacaagaagatggttcatccaattctagatcagagcatttttctagacagtactcacaaaatgagactaaaggaggaatttaagattgaaccatggacttttcagcaacatgttggacaagctgtcgtcattcctgctggatgtccataccagatcaggaattctaagtctagtgttcatgcggtattggaatttgtgtcccctgaaaatgttaccgagggtatccagttgttcgatgaggtccgactattgcctgaagaccataaagcaaaagcagacatgctggaggttaagaaaatggcgcttcatagcatgaatacagcaattaaagaagtacgtcaacttacaagcaaaacatgattgcaccagctaaaatatacttacatgcctctgagcctctagagatctcatgtctcaacctgacttccatatcttcattcttgtatatagattaatgctcggacaaatttatatctagtaaggtacttattaaattgattaattttcgcctctattttcttttcttctgtgaagtttatgccctaccggaatttgaaataaatcttatggtctgtatatatatttctttagtttatttgaagtaaaatttgatatgaacttttgctagttttaaatgctatca

SEQ ID NO: 27248 - DNA, 648 bp, Glycine max
  unsure (1)..(648): unsure at all n locations
  Clone ID: TF_LIB4366-001-Q1-K1-C4
cattccttgtccaaaagtcaatgatgaatgtaaccatggttttcttgaactgagaagcatattgggtcaacattttgtctctgagttagtgtgtaaagcaaaagaactagtgcaagcatacaagcttcaaaatgtagttaagaccgcagacaacttctgttcatgtttgaagcttgatagaaacacagatgttagctatagtaatatgaggaaggctgcttctcgagaagatttgactgacaactatttatactgtcctaaagctgtagatcttcagtacaaggatttaaggcattttcagtggcattgggaaaagggggagcctgtcattgtcagcaatgtgcttgaatgtacatctggtttaagctgggaaccacttgtcatgtggcgtgcattacgtcatgtaactaataccaagcgtggccaacatttggctgagaaaacaattgattgcttagattggactgagggggaaattaatatccaccaattttttactggcntatacaaatggtcgtaaggattggcttgcttggccacagatattgaaattaaaagattggcctccttctaatttatttgaggaacaattgcctcgtcattgtggctgagttcatatcttccttacccttcaaggaaatnactgat

SEQ ID NO: 27249 - DNA, 908 bp, Glycine max
  Clone ID: TF_GmC713485_1
cccacgcgtccgtgtgcattcactaattgatgatgatgaccgtgtttattgtgacaactgcaatacatcaattgtcaatttccacagaagttgtcccaatcctaattgtcagtatgatctctgtctcacttgttgcatggaactaagaaatgaacttcattgtgaagaaattcctgctagtggaaatgaaagaacagatgatacaccacctgttactgcttggagagcagagctaaatggtgggattccttgccctccaaaagctagggggggttgcggtactactattctttctctgaggcgtctttttgaagctaattgggttcacaaattgattaagaacgtggaggaacttactgtcaaatatcaaccacctaatattgatctatctctaggatgttcaatgtgccatagttttgaggaagatgcagtacagaattctgtaaggaaggcagcttcgagagagaccagtcatggtaactttttgtactgcccagatgctatcaaaatggaagacacagaatttgagcattttcaaagacactggataagaggtgaacctgttatagttaggaatgtttttgaaaagggtagcggcctaagctggcatccaatggggatggggagggctcttttttctcttttgggccttcaccacctcatacctaccttcagccatcgctgatttcgtgctcgataatgaaggtaaccctcttgaaaatggtggcacatattatatcttgtcagacataacagcatttggtggaataagagcagccccaacgggaaatgaatgatgccctctcactgtggtgctatctcgcactgagctcgacaaaggcattggaacaatcatctcgtcctcatatcgaatacgttttatcgccgaatgccatgctttgagccta

SEQ ID NO: 27250 - DNA, 1139 bp, Glycine max
  Clone ID: TF_GmC139142_1
ggctcgaggaagctaaattactaggaaaatctgctcctcttgactttgttcatgacaaattcaagaggagcagattgaagctaaattactaggaaaatcttcttttgagattgagatacaccaaagtctttgtggcgatggtgaacgtgtctattgtgaccattgtgctacttcaattattgaccttcatagaagctgccccaactgttcctatgaactctgccttagttgttgccaagaaatacgtgatggaagcattacaccccgggctgagctgaagttcccatatgtaaataggggctatgattatatgcatggtggggaccctctacctgtgccttgtgatttagagacatcagaaggtcatattgagccgtctactgtgtggaatgctaagagtgatggaagcattagttgtgcgccaaaggagttggggggttgcggtagtgctgtattggagctgagacgcatcctcccagatgggtggatatctgacttggaagccaaagctcgcaatatgctgaaaatttgggaaattgagcacacaactcttcagcaaaaagaagcagtatcaagcttcacctttttgagaaaggaagctattagagaaggcataaatgacaataacatatactatccagagtcaagtaacactcaaaaagaagggctgctgcttttccaaaagcattgggctaatggtgaaccaattatagtccgtgatgtccttaaacagggaacaggtctgagctgggagccaatggtaatgtggcgagcattatgtgaaaatatggtttcagaaatcagttcaaaaatgtcagaagtgaaagccatcgattgcctagctaattgtgaggtttggtctcgctgtccctttggtgctgagtttgaacatttggtctaattagagtattatgtctctaaatttgtagtgttttcccttttccaaatccctcatctgttgtggattggctgtgatctctaatttttttaaggatgcaaaaagaatgctttagtaactacttttctgcccagtatcattataagaaagataactaacttttggtataaggcatgtcatcttgactacactactgtaatataccacatccatcgccaacatgccttattgtgctttagat

SEQ ID NO: 27251 - DNA, 261 bp, Glycine max
  Clone ID: TF_LIB3051-035-Q1-K1-F2
gtcagactggcagacgcacttcgctgcgtacctaatgaacatgaagcaaagcttcaagtggtggaggttgagaagatctccctttatgcatccagttcatccatcactgaacttcagaaacttgtacttgacccaacacttgtcgcccagatcggttcttgagatcctaatgagactgcagtgtggtcctagaattactcgacgatggttaacctgaggcatattacttgcgctcgaacttacacactccgtcattgaatc

SEQ ID NO: 27252 - DNA, 1423 bp, Glycine max
  Clone ID: TF_GmC484_2
ggctcgaggtttgcttatgtatttatcatgttcttcccatattaatatatgcaggttgatatttgtacctcattaccaattgtcaataataagtgctatgcatattcaaatgtcagatgtttacccaaactctgctacatactgtgcatttgtgtttaatattttaaagttctctctctcttccctgttatcttgtctagagtgaaataatggaattttgatttatttgaagaaaaggaaagaaagggggctatgagtaagtaacaaatagttaatttaccgagtttcaacaggtgtaccttttggttcatacaaatgaagtaaagctgaaggactggcagagaactaaaattgaaatgatgcaaaaagctaaagctaataaggaatttgaggcaaaagaatcacatggggatcctcaaatatcttcaagggggagttcacctgattcctcacttggtacaaaaagtagtggactggaaatagactcaaaccagaataagtcaattatggatcaagggtttgaaatttattctagtgctgaaggtaatacggccaattgtaaacttccattcaatcaaaatggagacgtctctgagaaaacacatcctggagttctttgggatgtttttcgtcggcaggatgttccaatattgactaaatatttgaaaatacattggaaggaatttgggaagtcagatgatcttggaaatgaatttgttgaatggcctctttatgatggagctatttttcttgacaaacaccataaaagaaagttgaaggaagaatttggagtggagccttggtcatttgaacagaatttgggggaagctatttttgttcctgctggttgccctttccaagcaaggaatgttcagtccaatgttcagttaggccttgatttcttatctccggaaagcgtgggtgatgctgtaagattggcagaggaaattcgctgtgtacctaatgaacatgaagcaaagcttcaagttttggaggttgggaagatctccctttatgcagcaagttcagccatcaaagaagttcaaaaacttgtacttgacccaaaacttggcgcccagatcggttatggagatcctaatttgactgcaatggtttccgagaattatgagaagatggttaagcggaggcagattacttgtgcttgaacttccacactcggtcattgaatccggaaagaggggggattgtgtacattagttgtatttgagcaatattttatgggttggtattttcagtgtagttttgatcaaatacctaggtaatcatttaaatgtgtataatagttacgttagagaatcatgtaatgaccaacttcaaatctgattttatttcaaaatgtggaaaagaaacaatgtaatatatacaaagctaaaaatttgtgtctgctgccctttaagttaag

SEQ ID NO: 27253 - DNA, 919 bp, Glycine max
  Clone ID: TF_GmC4885_8
tatcaatgaaggaattgaagcatttttttttttaataattttgctgttttaggtaaatgtgttgactcatattgctgaagtgaaactggattctgatcaacttactgtcattgagaagttgaagcaaaagcatctcgagcaagagaaaagggagctacttggtgatgatcaggatggagaagctaatgttgacatgcttaatataattcatcttctacaataaatgctttggacaggcaaagtagtgttgaagtcatggaacaagaaggtggattatgtgatgggaaagaagttgatcagtttcatcaaccgtctggtagtaatgaggttgccattgctaatgaggatggtatttcatatggatcagagctcatagaggttgacaaagtaaaagtaaatcaaggtgatttgttgtttggggggttgcttcagatggtgctctctgggatattttttggagacaggatgtccctaagttgcaggaatatctgaagaagaatttcagagagtttaggcatgtccattgctgtcgtttaaagcagggtaaattattaaaatgattcagttatctgtctgagtactccttatcaacctgagtcatttataacaaatattttcacctttaggttatgtcatagatccatgtcatagagattcgacaaagtttaacgttggctgtcgaaagcctaacacaaccctctccttttatccgggcttgggaccggctaagaatagcaaagctaccctaggcaggattcacctttaggttatatttttaaattttaatatttggagctttgcacccttataacattgacattctcccattcccttattttattctgataaaaatttcattaaatatgcatgtcataaaggattgggtgaaggatcaagctgctaataaatagttatttag

SEQ ID NO: 27254 - DNA, 404 bp, Glycine max
  Clone ID: TF_LIB3139-086-P1-N1-A7
gagaaggtttttcattttattcatgatcaagtttattatggggacggcttatcataaaagagttgaaccttggacttttatacaaaaccttggtgaggctgtttttatacctgccgggtgtccccatctagagcaaccttaatgcacgacctcgagccgcaccattctttcttctcctttcgaagcactgccaaataaaaatggagtggcctgcgtgtacggacgaatacgaaaagctcataattcggatgaacactcccagggttgtcattgacaattccgttttctcctcagctacgctagtcaaggttgacagcgccagaaggcatggtattctattggatgctgtagaagtgctagctgacctgaacctttcaattaagaaagcgtatatttctgctgat

SEQ ID NO: 27255 - DNA, 3251 bp, Glycine max
  Clone ID: TF_GmC484_1
gacaacacaactgtctccattcccgcgctaaccgacgcacaaagttgaagaaacagccgccgtaacctccatcttcgaacaaatctcttacttcaagtctaaattactgactttcctcgcctatcttctaccatattacaaataattgtaaactagggtattattccgttcgcatctcttccccagttctcaaacgcccgatcagctaacgtcgactacaatgccctcagaataccggacgatttgcgatacaagaggttcgacgggatgcctttgcggtgcacgtcgatgtcggtgacggacaagaccgtctgcgagaagcactacatccaggcaaagaagcgcgccccgaattccggtatgagagcaaatatccataaagccaagaggaagtcgcagtcactgtggctgaaatagtccgattatgtttatatggagagcaagggcgatgttttctatgttactctctcctccattggcctcactcagaagaagctctccaagaaccagttccgctacgagccggagcgcgacgcgccgcgaagaggctcgtccgcgagacgctcttcgaacctcaacgacgatgatgatgatgacgatgacgacgacgtggatggggatgcggatgctgatgtggcgctctatgaggaagagaattgggtctcctgtgactcgccgccggattcttcgcgcaagaggtcgcggaggagcttggaagctaatgctaccactgaatattcggacggaacctccgccggttcttccgacgaggacaccggcgggcagacttgtcaccagtgccggaggaatgaccgcgaccgagttacttggtgtcaacggtgtgataggaggggatattgtgatagctgtttatcaacatggtactcggacatttcattggatgaaattcagaggatatgtcctgcttgccggggtatatgtaattgcaagacttgtttgcgaagtgataattcaattaaggttcggatacgcgagatacctgttctagataagttacagtatctccatgtgctgctgtcgtctgtgctacctgtggtaaagcagatccactgtgaacagagttttgaagttgaacttgaaaagaagttgcgtggtgctgaaatagatcttccaaggataaaattgaactcagatgagcagatgtgctgcaatttctgtaggatacctattactgattatcatcgacgctgtccaagttgttcatatgatttgtgccttagttgctgtcgagatcttcgagaagcaactgcagatcacaataaagaaccccaaacagagcaagcaaaaacttctgatcgaaatatattaagtaaatttcctcattggagatccaatgacaatggaagtattccatgtccccctaaggagtgtggtggctgtggttattcttcactaaatttaagccggattttcaagatgaactgggttgcaaagttggtgaaaaatgtagaggaaatggttagtggctgcagaattagtaatgccgatggtccaccggaaaccgggctgaatgatctgaaactttgccaatattctcacagagaagccagtgatgataattatctttattgcccagcatccgacgatatcaaaactgatgggattgacaattttagaaagcattggaaaactggtgagcccattattgttaagcaagtatttgatgggtcatccatttcaagctgggatccaatggtcatatggagagggattctagagacaatagatgagaaagcgaaagatgaaaaccggatggttaaggccatagattgcttagatgggtctgagattgatattgagcttgctcagttcatgaaaggatactttgaagggcttattcttgaaaatggttggccacagttattgaaattgaaagattggccttcacctagtgcttctgaagaatttctgttgtaccaaagacctgagtttatcagcaaactacctttacttcagtatattcactccaagtggggccttctcaatgttgcagctaaattgcctcattactccttgcagaatgatgtaggacccaagatatatatatcttatgggattagtgatgaacttggtagaggtgattcagtgacaaatctccacttcaatatgcgtgacatggtgtaccttttggttcatacaaatgaagtaaagctgaaggactggcagagaactaaaattgaaatgatgcaaaaagctaaagctaataaggaatttgaggcaaaagaatcacatggggatcctcaaatatcttcaagggggagttcacctgattcctcacttggtacaaaaagtagtggactggaaatagactcaaaccagaataagtcaattatggatcaagggtttgaaatttattctagtgctgaaggtaatacggccaattgtaaacttccattcaatcaaaatggagacgtctctgagaaaacacatcctggagttctttgggatgtttttcgtcggcaggatgttccaatattgactaaatatttgaaaatacattggaaggaatttgggaagtcagatgatcttggaaatgaatttgttgaatggcctctttatgatggagctatttttcttgacaaacaccataaaagaaagttgaaggaagaatttggagtggagccttggtcatttgaacagaatttgggggaagctatttttgttcctgctggttgccctttccaagcaaggaatgttcagtccaatgttcagttaggccttgatttcttatctccggaaagcgtgggtgatgctgtaagattggcagaggaaattcgctgtgtacctaatgaacatgaagcaaagcttcaagttttggaggttgggaagatctccctttatgcagcaagttcagccatcaaagaagttcaaaaacttgtacttgacccaaaacttggcgcccagatcggttatggagatcctaatttgactgcaatggtttccgagaattatgagaagatggttaagcggaggcagattacttgtgcttgaacttccacactcggtcattgaatccggaaagaggggggattgtgtacattagttgtatttgagcaatattttatgggttggtattttcagtgtagttttgatcaaatacctaggtaatcatttaaatgtgtataatagttacgttagagaatcatgtaatgaccaacttcaaatctgattttatttcaaaatgtggaaaagaaacaatgtaatatatacaaagctaaaaatttgtgtct

SEQ ID NO: 27256 - DNA, 2726 bp, Glycine max
  Clone ID: TF_GmC484_3
gcgagtacgcgcttcgaacctcaacgatgatgatgatgatgatgatgatgatgttgtcgtggatgtggatggggatggggatggggatgcggcgctctatgaggaagagaattgggtctcctatgattccccgccggattcttcacgcaagaggtctcggaggagctcggaagctaatgctgattcggacggaacctccgccggttcttccgacgaggacaccggcgggcagacttgtcaccagtgccggaggaatgaccgcgaccgagttacttggtgtcaacggtgtgataggaggggatattgtgatagctgtttatcaacatggtactcggacatttcattggatgaaattcagaggatatgtcctgcttgccggggtatatgtaattgcaagacttgtttgcgaagtgataattcaattaaggttcggatacgcgagatacctgttctagataagttacagtatctccatgtgctgctgtcgtctgtgctacctgtggtaaagcagatccactgtgaacagagttttgaagttgaacttgaaaagaagttgcgtggtgctgaaatagatcttccaaggataaaattgaactcagatgagcagatgtgctgcaatttctgtaggatacctattactgattatcatcgacgctgtccaagttgttcatatgatttgtgccttagttgctgtcgagatcttcgagaagcaactgcagatcacaataaagaaccccaaacagagcaagcaaaaacttctgatcgaaatatattaagtaaatttcctcattggagatccaatgacaatggaagtattccatgtccccctaaggagtgtggtggctgtggttattcttcactaaatttaagccggattttcaagatgaactgggttgcaaagttggtgaaaaatgtagaggaaatggttagtggctgcagaattagtaatgccgatggtccaccggaaaccgggctgaatgatctgaaactttgccaatattctcacagagaagccagtgatgataattatctttattgcccagcatccgacgatatcaaaactgatgggattgacaattttagaaagcattggaaaactggtgagcccattattgttaagcaagtatttgatgggtcatccatttcaagctgggatccaatggtcatatggagagggattctagagacaatagatgagaaagcgaaagatgaaaaccggatggttaaggccatagattgcttagatgggtctgagattgatattgagcttgctcagttcatgaaaggatactttgaagggcttattcttgaaaatggttggccacagttattgaaattgaaagattggccttcacctagtgcttctgaagaatttctgttgtaccaaagacctgagtttatcagcaaactacctttacttcagtatattcactccaagtggggccttctcaatgttgcagctaaattgcctcattactccttgcagaatgatgtaggacccaagatatatatatcttatgggattagtgatgaacttggtagaggtgattcagtgacaaatctccacttcaatatgcgtgacatggtgtaccttttggttcatacaaatgaagtaaagctgaaggactggcagagaactaaaattgaaatgatgcaaaaagctaaagctaataaggaatttgaggcaaaagaatcacatggggatcctcaaatatcttcaagggggagttcacctgattcctcacttggtacaaaaagtagtggactggaaatagactcaaaccagaataagtcaattatggatcaagggtttgaaatttattctagtgctgaaggtaatacggccaattgtaaacttccattcaatcaaaatggagacgtctctgagaaaacacatcctggagttctttgggatgtttttcgtcggcaggatgttccaatattgactaaatatttgaaaatacattggaaggaatttgggaagtcagatgatcttggaaatgaatttgttgaatggcctctttatgatggagctatttttcttgacaaacaccataaaagaaagttgaaggaagaatttggagtggagccttggtcatttgaacagaatttgggggaagctatttttgttcctgctggttgccctttccaagcaaggaatgttcagtccaatgttcagttaggccttgatttcttatctccggaaagcgtgggtgatgctgtaagattggcagaggaaattcgctgtgtacctaatgaacatgaagcaaagcttcaagttttggaggttgggaagatctccctttatgcagcaagttcagccatcaaagaagttcaaaaacttgtacttgacccaaagtatgcaaatttcagacttgtcttggcaattgcattaacttggcgcccagatcggttatggagatcctaatttgactgcaatggtttccgagaattatgagaagatggttaagcggaggcagattacttgtgcttgaacttccacactcggtcattgaatccggaaagaggggggattgtgtacattagttgtatttgagcaatattttatgggttggtattttcagtgtagttttgatcaaatacctaggtaatcatttaaatgtgtataatagttacgttagagaatcatgtaatgaccaacttcaaatctgattttatttcaaaatgtggaaaagaaacaatgtaatatatacaaagcttggggg

SEQ ID NO: 27257 - DNA, 1206 bp, Glycine max
  Clone ID: TF_GmC4885_4
tcggctctagtccttctctacttttcaagaagcccattattcgcttcaagattctctagaccagctgtagatcctcagtacaaggatttaaggcattttcagtggcattgggaaaagggggagcctgtcattgtcagcaatgtgcttgaatgtacatctggtttaagctgggaaccgcttgtcatgtggcgtgcattacgtcatgtaactaataccaagcatggccaacatttggcggagaaaacaattgattgcttagattggactgaggtattggttaaatgcagggggaaattaatatccaccaactttttactggctatacaaatggtcgtagtgattggcttgcttggccacagatattgaaattaaaagattggcctccttctaatttatttgaggaacaattgcctcgtcattgtgctgagttcatatcttccttacccttcaaggaatatactgatcctcacaaaggttctcttaaccttgctgtgaagttgcctaatggttctctaaagccagacctggggccaaaaacatatattgcttatggatttcctcaggagcttggacgtggtgattcagtgactaagctccattgtgatatgtctgatgcagtaaatgcgttgactcatattgctgaagtgaaactggattctgatcaacttactgtcattgagaagttgaagcaaaagcatctcgagcaagagaaaagggagctacttggtgatgatcaaggatggagaaactaatgttgacatgcttaatataattcatcttctacaataaatgctttggacaggcaaactagtgttgaagtcatggaacaagaaggtggattatgtgatgggaaagaagttgatcagtttcatcaaccgtctggtagtaatgaggttgccattgctaatgaggatggtatttcatatggatcagagctcatagaggttgacaaagtaaaagtaaatcaaggtgatttgttgtttgggggggatgcttcagatggtgctctctgggatattttttggagacaggatgtccctaagttgcaggaatatctgaagaagaatttcagagagtttaggcatgtccattgctgtcgtttaaagcagggatgattgacttttggatgtataggtctttacgcctttatcttattttgcaatggctctgttagagaggaagaataaaagggaatggaagtttggg

SEQ ID NO: 27258 - DNA, 609 bp, Glycine max
  unsure (1)..(609): unsure at all n locations
  Clone ID: TF_GmC4885_7
ggttggcctggctggtccagtctaagttttataacactgcacacaagatcccttgggtcttgaatcacagacagtgcattgccccatttaccttgggctgaaattcaaccttttattaaaagaccgaagacagcacgttttgaaccggacgcgtgggcggacgcgtgggcagatggtgctctctgggatattttttggagacaggatgtccctaagttgcaggaatatctgaagaagaatttcagagagtttaggatgattgacttttggatgtataggtctttgcgcctttatcttattctgcaatgactctgtgagagaggaagaataaaagggaatggaagtttggaaaattttagactagaagaaagccaacttagagttgagctttttaagaacaaattctatctcaaaatcaattataagatgaacaagatttttaaaatttaaataaccaaatggtctagatctaaaaataagctctatttcacctagatatctagctttgatggttgccaccttagattttgggaaatttaattcatgtgccatangaaaaagaagaaaattattcatttgccaggttatttctaggtggtatgtttatct

SEQ ID NO: 27259 - DNA, 318 bp, Glycine max
  Clone ID: TF_jC-gmXLIB3563P053dh04a1
ctataaagcaggttattaacctcatccatgagcagaccttctatctgactatggagcattataacaagcttaaggaggatttaggaattcagccctggacttttgctcagaagcgtggatatgctgttgttaatgcatctgggtgtcctataccaaggcagaaatcggatgtcatgtattaaggttgctttgaattgtgtctcttccataaatgttggggagtgctttagtttgactgaggaacttcacccaatttcaatgaaccacaggtctactgatgactatttggaggtgaagaataagtcactatatgctgtg

SEQ ID NO: 27260 - DNA, 1279 bp, Glycine max
  Clone ID: TF_GmC19373_1
ccagaaatgctcaagttaaaagactgccccctcccgataatttgaagatctttggcccggccattgtgatgagtttattcgctccttgccatttcaagagtacagcgatcctcggactggaattctcaatcttgctgtgaagttgccagcccacgtcctgaaacctgacatgggtccaaaaacatatattgcatatgggattaaagaagagcttggtagaggagactctgtaacaaagcttcattgtgatatgtcagatgcggtgaatattttgacccatacagctgaggtgatattaactgatgagcagcactttactatatcaaagttgaaagaagcacacagggcacaaaatgagagagaacagtgtgcccaagagagggttgctgaccacctggaggatcgaccttacaaagacaacaaagaacatatagaaaataaggaagttcttgaagccaaaagcatgaagaaacaacctattgaaattgatggaaacatctttccaaataatgtgcttgagtgattgtacatccaattcatgaccgatgtttttatttgacatgggaacataataagaagctgaacaaggagcttggtgtagagccatggacttttgaacagaaacttggggaggcagtatttattcctgctggatgtccacatcaagtcaggaatctcaagtcatgcacaaaagttgctgtagactttgtgtccccagaaaatatccatgagtgcctgcgttttaactaaaaagttccgccagcttcccaagaaccacaaggctagagaagataagctggagataaagaagatgatagtttatgccgttgatcaagctgtcaaagacttaaaagatttactgaagtgttcttgattggcttgcagaaagctcattttgccgtggttgatgatacactagatttctgtgaatataaacagtgtccagatagaaaattgtgaagtgtgaatgtttattgtaggattagagtccggatagaaaattgtgaagtaggaatctttattggaagatcagaggcactcataattgagtgttttccattttggtattaacatagtgatttaattgttaatacttacattttagacaacagtttcagaaagttcggtaaacagataacggccacaagaattaatgaaaatattgtattcatggccaaagagataaaaaaaaaaaaaaaaacacgtgtattttttatattataacatttcagtatttagggaaaaaagactctgagttcagttagaaaggaagtaaagt

SEQ ID NO: 27261 - DNA, 1687 bp, Glycine max
  unsure (1)..(1687): unsure at all n locations
  Clone ID: TF_GmC2494_1
cggctcgaggctcatcatcaggtgaaggaatttctttaccagaacatatgcagtttaagacatgcacaaatgatgattatgaaaaaggaagaatttctgctatgcacctaatgaaagataagttttgctctatctatgaccaatctgatacacgttctgtatttgatgatttgaacctccccactccacaagccagggtaaatcaggaacatcagaaaaattacattgaacaatccaggttcaaaagcaggtgcatacattttgaggagttaccctactactctgggaagaatgtttctgatttactcttcccgcaggagcagttttctcaacactatttttctgtttgtgggaatggggttgacaacactgttttgcaagatgtgacagatacaggtggtgacttccctcttgatgaatcatatggacaagatcctgataatgatattggaggatatccaaacaccagtgaaagccatctgccttgtacttcaacagaagatactaaatttgtcaatggattgaattctttagacacaccatgttcagacatcaatgttgaaaaaatagagtctgttaaaaatgacacatcaagcaacaatttctgtcaaaatgatgatcatttggagactcaatatgggagtgctgtgtgggacatattccggaggcaggatgtacccaagctaacagagtacctaaagaaacaccacagagagtttcgccacataaataatcttccagtaaactctgtgattcatcccattcatgatcagatcctttatttaaatgagaagcataaaaagcaattaaagcaggagtttggtgttgaaccttggacatttgagcaacaccttggggatgctgttttcgtacctgctggatgcccacatcaagtgagaaatagaaagtcttgcatcaaagtggctctggacttcgtttcacctgagaatgttcaagaatgcattcgattgacagaagaatttcggttacttcccaaaggccatagatccaaggaagataaattggagataaagaagatggcactatatgctgcggatgttgcaataaccgaagccactaaactgatgagaggaaatgatatgtcagatgaagccaaggaagtcccccagcaacacatttttactaaatgactctcaacgaaaggcttctagtttatttactcttgatttacaaagagcatagcttgtattctgttctgttttgcactgtatccttggcaactccatggaagtttgaaatgaatgttggttgttgcactagcactacacaccagcgagatatagattaatgctaagtacttgtaacaacaatggaaaatactaggtagtcgctataatattggcataataaattgacatgcattttgactttcatgaatgagtgcatcatatcatttttatctcatcaaaaaaaaaaaaaaaaaaaaaaaaaaaaaaaaaaaaaaaaaaaaataaaaaaaaaaaaaaaaaaaaaaaaaaaaaaaaggagaaaaaaaaaaaaaaaaaggggcaaaaaaagngaaaggaaatgagaaaaaaattataaaagaggggaaaggaaaaaannnnnaaatggataaaaaattaaaaaagttgagaaatgataaatatttttgtcagctggaataataggggggtggttttaaaagaattccccttcccaccgt

SEQ ID NO: 27262 - DNA, 537 bp, Glycine max
  Clone ID: TF_jC-gmXLIB3563P073dg09a1
tggaaatggactcaaaccagaataagtcaatcatggatcaagggtttgaaatttattctagtgctgaaggtaatacggccaattgtaaacttccgttcacacaaaatggagatgtctttgagaaaacacatcctggagttctttgggatgtttttcgccggcaggatgttccaatattgactaaatatttgaaaaaggtccatttttgagattggaaacacagacccattggcacagttgaggaatccctgaaaccagaatcatatttggacaatggggtttagatgggcatgtgccaatgtgttcttatccaagaggattttgagtgcataagagatctagtgtttaagttgattcagggtctgaaaataggctgcagaaaaatctgtcaaggattttggttgtgaacagtgtttttctctttaaatctctgcgaagttgctggaaggtcacagatatatattggcagtggcaaatggcatccgatctaaattcggggttgtcccaggaaacgtctgtttttgggttgaaagcatg

SEQ ID NO: 27263 - DNA, 1109 bp, Glycine max
  Clone ID: TF_GmC1074_1
tacggctgcgagaagacgacagaagggcaagcaaaattgtgtacaagtcatggaaaatggaggtaacttatgtgatgggaaagaagttgatcagttttatcaaccctctggtggtattgaggttgtcgttgctaatgaggatggtctttcgtgcggatcagatctgaaagagattgacaaagtaaaaattatacaagaaagtgatttgtttaggggggatgcttcagaaggtgctctctgggatatttttcggagacaggatgtacctaaattgcaggaatatctgaagaagcacttcagagagtttaggcatattcattgctgtcctttaaagcaggttattcaccccatccatgaccagaccttctatctgactatggagcataagaagaagcttaaggaggagtatggaattgagccctggacttttactcagaagttaggagatgctgttttcattccagctggttgtcctcaccaagtcagaaatctgaagtcatgtattaaggttgctttggattttgtctctcctgaaaatgttggggagtgctttcgtttgacggaggagtttcgcacacttccaataaaccacaggtctactgaggacaaattggaggtgaagaagatgacaatatatgctatgcaagaagtgataacaaaattagagaaagcaaggtccaggcaaaccatagttccaaagtagatatatctttaacagatcaaagccaattgaaagtgtaaatttttttagtcaagcttttatacaggtgtgatgatgggttctgtatatcgtgactgtaagaacggttccatattttgttttcgccaacacctggatggttttttttttttggaaatcatatatgacttgaacggtgtacatataaatatataattgtcaccatttgatacttaggatctcataatctatacattcggaagctcaaaaaataactccaaaattgagattaatgaactcacgttgtttacgaattttgagcttctgaatagaggtgttgacaatcgaattaaaccaagcataatattgaaaattgttgaaaaatcaacgtttttggatataaaaaaaaccataattggtccattttttt

SEQ ID NO: 27264 - DNA, 421 bp, Glycine max
  Clone ID: TF_uC-gmroLIB3259142b10a1
ctggggccaggaaaacatttttttaattaattttgggggccggtatctggttaaaaaaactttttggaaacggtggtctaaatgggaggttttaacaaaaaaatttctttgggaaacccaaaagggaaaaccctcatttttgagggcctttgattttcaaataaagattcctacttaaaaattttttatccggactttaatcctacaataaactttcaaactttacatttttttatcgggaccctgtttattttcacagaaatttagggtttcttcacccccggcaaattgaaggggctttctgcaagccaatcaaaaacatttaagaaaatttttaaagtctttgacagtttgatcaacggcataaactattattttttttatctccagcttattttttttagccttggggttctgggga

SEQ ID NO: 27265 - DNA, 618 bp, Glycine max
  Clone ID: TF_GmC28720_5
gttggggagaacatgcagcctaatgtcatatcatcgaagtcatcttcagattctgagaattttgctgagtctcaacttgttcccaagatgccaaaacaagcttctgaggagcctaagaagaaaaagaaagtgaagctgccacttccattagttccagctgataacaatcaaaatgcctcacaacctgttaggaaatgcatgcattgtgagataaccaagacaccacagtggagggcagggccaatgggaccaaaaacactatgcaatgcttgggtgttcgttacaagaccggccggctcttcccgagtaccggcctgctgcaagtcactttttgcccatctggcactaaatctcataaaaaggcctggaaatgagatgcaggggcattgacaaatccggtttgcaatcaattcagctgcctcacccaactatccaaacactaacagcagcctgccctggatacatgtgattgaaggatgatcctttgtggaaatttctctttcattgctgccctttaagtcatgtcttatgttatttcttattgatatttcatttctttggttcattggtttttgtacagggtttgactgggggaataggagccataaatgatgatga

SEQ ID NO: 27266 - DNA, 606 bp, Glycine max
  unsure (1)..(606): unsure at all n locations
  Clone ID: TF_GmC138242_1
gaccccgcagtggcggaccgggcccatgggcccgaagactnnctgcaacgcttgtggcgtgaggtacaagtcgggccggctggtgcccgagtacaggcccgcggcaagcccaacatttgttctgactaagcactccaactcgcaccgcaaggtgnnngagctgcgaaggcagaaggaaatggtgcggtcccagcaacaccaccaccagcatcaacaacagtttctacaacaccacccacnnnnaccatcaccactatcaacatcaccagaacatgatgtttgatgtatccaacggtgacgattacttgantccaccaacccgtgggccccgatttcaggcagcttatctagtaggtgctagtgtaggacagctgcggtggagcctcgggtaattttaatttgtagcggagttattatataccttcattagagagttctccttgttcattatttgtttctttctttcttttccattcctgtttggggagggtttgtcgccccgtctcatggggtctctggttatgtcgtctggccgtttttgtctaggccatattttggtagactcgatcgagaggttaattaattactcaaaaattcaaaatttcc

SEQ ID NO: 27267 - DNA, 386 bp, Glycine max
  Clone ID: TF_LIB3242-054-Q1-J1-C5
ctgtccgttgttccgagcaaacaatggtatgtaccgaaccggatcccagaccgggctcggtccataccattccagctgttccaagaaagccgtgaaccggttagactagatagcccaacgctcgcgtctggtcctagatgtcggctttgtggtcttcggtgacggccaagacacagaagatttaggtcgaggccctaaacggaggggcccattctctgcgacggagcagtcactgccaggtgcattacacgccgcagtggataaccggcccactagggcccaatacactttggaacgctggaggagttcggctcaagtccggtcgactttttcgagagtgtagaccatcctgtggcccaactgtttgtgacgatcttcactgcaac

SEQ ID NO: 27268 - DNA, 363 bp, Glycine max
  Clone ID: TF_18848585
ctgaacccccgccgctcgtttaccccaagacgaggaccacaacaaaccacaccgtcaccaacctcgttctggtgtcacgaggttttgctgggatctgctccattccaatcacaacaacaacaacatcacgcaatctcaaggcaagtctagcatcacaggaagcaacaacaacaacgactctctcctcgctcgtcgttgcgctaactgcgacaccacttccactcccctctggaggaacggtcctcgtggcccaaaggtatatcaccatattcaatccagttatctctaattcatgagtaacttttgtaaaatgcttctaattgctaaacttggtgaaaatttcattaaaatcacactatgttc

SEQ ID NO: 27269 - DNA, 169 bp, Glycine max
  Clone ID: TF_15201384
tgccaatggggatgattgcctgctttgtgccacggacaataccccacagtggctgaacgcgcccatgggcccgaaaacgctctgcaactctcgtggtgggctcgtccagactggactgctggtgccacatgacacgaccgccgcaaggccaaccttagttctgacaaaa

SEQ ID NO: 27270 - DNA, 478 bp, Glycine max
  Clone ID: TF_GmC1320_6
gtactatttcggtgattcattcagttaatggtgttgggttgcttcattgataaataataaaattgtggtgttgcttgcagattgatcgagtgaataatattggaaatgatggatctgaatgtgaatgagaaaaagaaatgttgcgctgattgcaaaaccaccaagacaccactctggagaggaggaccagctggacccaaggtataggaagagaagggcttgttcgaggaagcgagaggagcagaggtggaagatgttgggggaagaggaacaggccgcggtgtgcttgatggccttgtcctctggttttgttttcgcttgattgcaaagcattccttaatttagtaatccacgacaatcctttttgatgtcgcatacctaaccttgtaaaggtcaagcctctgtttataacatggtgttcttctctggtctcttggttccctaattctctaagttcacggttattggtgcaaggatc

SEQ ID NO: 27271 - DNA, 1760 bp, Glycine max
  Clone ID: TF_GmC1320_1
tgagtgcaggtagagtgaaacaataggcgatccgcaacttacgttagctgctgaacggagcacgctccctctctgtgctaactcctaatctctctcgcacacacacagtagctattttggtgcatgcgagtgaggggctttgtaaattaatttgttctagtattggtacggtagctaatagtagtatttctgtgattggtgttgcagattgatcaagtgaatataatattggtaatgatggatctgaaggaatggtcatcatcttctgaggaattgaatgtgaacaggaaatgttgcgctgattgcaaaaccaccaagaccccactctggagaggaggaccagctggacccaagactctatgcaacgcttgtggaattaggtatcggaagagaagggcatgttggaggaagggagagttgaagaaacagaaacagaaacagaaacagaggtggaagatgctgggggaagaggaacaagcggcggtgtgtttgatggccctgtcctgtggttttgttttcgcttgagcattccttaatttagctcattcgaggttgtagctgctgactcattggatgaagaattcttgatcaaataactcgtcataattgaattcaaatgaagacaggctccatgattttttcattgttgcatgtacctagatttagaatacaaagcttagctaattgctggggtgaaaccttccacggtttcagtacaacttgtggaaacaattctaacgtcaggctgcttggttctagaatttatggtcttcagggaggacagagaaagaaatggacaagacctataactacaaatatagaaggcaaggggagcaccaaatccaaaagtatcaagcatgagattttgagtgaaaccattttagcaaatgctacagtaaatgtaaataaaacacagctagataaatcccaagaaattcagtattgtgacatacaacaagagattgctgagaataaagacttgtcgagctatactgttattgtttttgatatcgagaccacagggtttagcagagagaatgaaagaatcattgaaattgcacttcgagatcttcagggtggcgagaacagcacttttcagactcttgtaaaccctcaatgcaaagttcctaattcacatattcatggcattactactcatatggtcaaccaacctggtgttccaaggatggaggacctaattcccattttattgcaatacgttcgaagtcgtgagaagcctgggggagatgttatatttgtagctcataatgctcgctgttttgacgtgcccttcatcattaatgagttacgacgttattctgtagagattcctcctaattggttgtttttggacacccttcctttagcgcgggaactaatgaagtccggaggaacaacactttcttcaacatccctagctgcccttcgtgacctctacggaattaaagtggatggatcagctcacagggctatggtagatgtgaacgcattgtccttgattctttccaggttgacctctgatctgaagttgaccctatctgaccttgtcaaaaaatcattcacagaatcagatattatcaactctaagaataaaaagaagaactagactagttttctgactgtattttgcattgatgttgtgacaaaagaattattttgtaacgaaaatttgaactctaaatttttagttgaagtagaaaagaaacgggttgttctcaataaaatcttacaattatgtaatatgtaccaagttctgagct

SEQ ID NO: 27272 - DNA, 664 bp, Glycine max
  Clone ID: TF_GmC1320_3
attttggtgcatgcgagtgaggggctttgtaaattaatttgttctagtaatagtacggtagctaatagtagtatttctgtgattggtgttgcagattgatcaagtgaatataatattggtaatgatggatctgaaggaatggtcatcatcttctgaggaattgaatgtgaacaggaaatgttgcgctgattgcaaaaccaccaagaccccactctggagaggaggaccagctggacccaagactctatgcaacgcttgtggaattaggtatcggaagagaagggcatgttggaggaagggagagttgaagaaacagaaacagaaacagaaacagaggtggaagatgctgggggaagaggaacaagcggcggtgtgtttgatggccctgtcctgtggttttgttttcgcttgagcattccttaatttagctcattcgaggtaacctaagacaatcctttttgatgtcgtacgtatagtatagctaacccttttgggagttgtaaagctcaaaatgtgaaacgtagtgtagcctttgtttctttttaggcttttcccctttctttgtttatagaggatgatatgatattataggttcagttagttagtgatgtaagtatttcagattaatgggtgattattacaatatagtgttctctgttccttt

SEQ ID NO: 27273 - DNA, 2493 bp, Glycine max
  Clone ID: TF_GmC1115_1
gctgcgagaagacgacagaaggggaatacaacaagaggtcacatacacataccttcctctctctctttctgtctctctccattgcaccttcccttcttccccttcttcttcttttctgtcatttgtgagattccttcacttgttttatctattccattggattgtacagattcctagctaaaacacccagatgtcaatctctgtaattctatttgatttgtgggtgtttctgtgaaaaaaagaattttttttaaggactgtcaaacccaaaactttttttttgggtcttttggtttctgcttcttttatttttgcaaactggcttctgggtttgctgcagaataaagccttcaatacccactaatacacaaggcttcaaaaacaaactgtttatattttcagcaaagttccaatcttttttccttctttttgtcaataaattattttatttttgcccccttttttctgcaattttggttttcttcttcttccctttactagaggaaaagattgagtcatgggcaagcaagggccttgctatcactgtggagttacaagcacaccactttggcgtaatgggccacctgagaagccagtactatgcaatgcatgtggatctcgatggaggacaaagggaacacttgcaaattatacccctttgcacgcccgggcagaaaatattgattatgaggatcaaaaggtttccagggtaaagagcatatcattaaataagaacacagaagtgaaattggtcaaacgaaagcaaaactatgataatgctgcatctggagggtttgttcctgattatagtcaaggataccaaaaagttgtggatgaagatacaagcaatagatcaagctcagggtcagctgtctctaactcagagagctgtgctcaatttggtggccctgatgctagtgatttgacaggtcctgctcagtcagtggtctgggatgccatggtgccttccaaaaagaggacatgtgcaggtcgtccgaagccctcatctgttgagaagctcacaagagacctgtgcactattcttcatgaacaacagtcttatttttctgcatcttctgaagaggatcttctttttgaaagtgatacaccaatggtctctgttgagataggacatggaagcattctcatcaggcatcctagctctatagctcgtgatgaagagtctgaggctagctctctctcagttgataataaacaatgcctaatgaatgaagcatattcattttctagtaccattcctatgtacagtgatcgcagtggcatgaacttctcatctcacggagttgaaaagatcaaaaactcagctggccaaatcatgcaacaagagaagcttgaaagggacaagtctcagcttgaaaaactacaagttcatggaaatcatgattcaccattgtgctcaatagatttaaatgatgtagtcaactacgaggagtttatgagaaacttgacaaatgaacagcagcagcaattactgaagtatctcccagtggttgatactgctaaatttcctgatagccttagaaacatgttcaatagcttccaattcaaggagaacttaatctattttcagcaacttctcggggaaggagtctttaacatctctttgttgggggcaaaacctgaagaatggaagacattagaaaggcttgcattatctaatctgtcaaagtcgaaatgggtagaacactataattttcttaagaaatgtgaaaacaaatctggaaaatctattggtttgggttctactgctatggaatcaagtaatgttacaactggcaaaagaatgcgtgagcatgacagccgaaatcaaaatattccagaattgaagacaacgatgaggagccccaaaagggtgatcataaagcctcctagctgtgaggtcaaagaagttgtagaagaaggctctagcttcagtccaaaaagcttatttgctttaccccatggtgttggtggcttgcacatgctggattctttcaactttgttggtgagagttctgaggatctgcttttagaggtgccttctaacagttcttttccacaggctgagctcctgcacccatctttaagctatggtgctcgtcaggtcagcaccactagtagctcagtacactcacctgttactcatccttaactaatctttactaggttacttggatgggtatggacacaatattttgtcataatagggtccacatgttttgcatctgaaacaccaaagttcatgtacaagagatatgatgatgattgtgtttttgtttccttgcaaccttgagcttggattgccaaaggatggaagttgaatgggcttttttttttttttcttgtatagattggtaatagattgtaacatatagcatgaaattcggagtgatcatctccggagtttttgtatgcaattgtagtttatgttttgtgaatgattcacacccttttatttcccaataggtttaaatcataactctccaaactctt

SEQ ID NO: 27274 - DNA, 1270 bp, Glycine max
  Clone ID: TF_GmC5880_1
aattcggctcgagcttgaaaaaccaattttggctctctctatttctctttcttctctttcttctctttcatttcccctctcttgttggggcaaattactctctctctgtctgtctctctctccgcacgcagcgagtgttgagttgtgtgacatgtaacaccaaactcactcaaacctacctttgtttttctccttctttttcttctcagtttcattctcttgctcatggacatggatgtttgccgaaatatatcagtttcttcaagtgagtgtcagcaagagcttcccacccttgatgaccttttctgtcatcagaacacggaagtggattttggcatggaatggttatcagtgtttgtggaagactgtttctctagtaggccaagttgcctcttgccaccctctggtggtggtgttcaaaccacaagcactagcaccaagccttcttcaggcacaataatgcaaagaccccaacaaagtcatcactgtcctttgcagaattttgctgtgccagggaaggcaaggagcaaaaggaagaggctttcagccccaagaaccaacaaagaccctctaagcatatggtcacaccatttgaatcctcaaaatgagtccttgtgttctgaccctcctcttctcaaacaggcttattggttggctgacagtgagctcatcatgccaaagccaaaggatgaggagcaagaagaggtggtgaccaaagaggatgaaaaagtgattaatgaggtgagcaaggaaatagctttggggactctgagcttgatgagggtagcaatggtcaacaacaaccaatgccaagaaggtgcacacattgcttggctcagaggaccccacagtggagggcaggaccattaggtccaaagacactatgcaatgcatgtggagtgaggtacaagtctggtaggttgctaccagagtataggccagccaagagtcctacttttgtgagctacttgcactccaattcccacaagaaagtcatggagatgaggatgtctgtttactccatttctagtgagcagtagtagtggtggttgttagaggtatatttttatgtaaaaaaaattgcaaattttaggaaaaaaactatttggcaaacagagagatactgttaaggggagtgattagtgctatgattgattataggcacatttatttacatgacttgttatccactttcattttgttcttctcttccttcgagctatttgctttgcactttcacttagtaaagtactaaagagcctatttggat

SEQ ID NO: 27275 - DNA, 1424 bp, Glycine max
  Clone ID: TF_GmC332_1
atttctgtttacattcaagagagagaagaagaagcagagcattggcagcaaagacagagagcgcaaaatacgagagataaagttaaagaaattaaatagcaccaatttcgcccacgaaaccctctctcttgtctcgtcgcttcaaactcctctgcggtttccccttcttgttcttcttcacagaaatggaggtagcagtggccaaagcgttgaaaccgagtttaaggagagagttcatcgttcagcaaatgctctgcgaggatattttcagcctgaacgccaacaccgtcgccgccggcgaagatttctccgtcgacgacctatttgacttctctaacggctctcttcacaacgaacaacaacaagaatacgacgaagggaaacaaagtttatcggcttcagaggaccgcggagaagacgattgcaactccaattccaccggcgtttcctatgattcacttttctccaccgaattagccgttccggccggtgatttggaggacctagaatgggtttcacactttgtggacgattcactcccggagctgtcacttctatacccggttcgttcggaggaagcaaaccggtttgttgaaccggaaccctcagcgaagaaaacgccttgttttccgtgggaaatgaaaataacgaccaaggcgagaaccgtacggaataggaagcccagcaacagtcgcatgtggtcgttgggtagcccgttgctctcgctgccgtcttcgccgtcttcgccgtcgtcgtgttcttcttcggtgagggagccgccggctaagaagcagaagaagcaagcccaggtccagcccgttggggcccagattcagcggcggtgcagtcactgccaggtgcagaagacgccgcagtggaggaccggcccactgggcgccaaaaccctttgcaacgcgtgcggggttcggtacaagtcgggtcggttattttcggagtatagaccggcgtgtagtcccaccttctgcagcgatattcactccaatagtcaccgtaaagtgttagagattcggaagaggaaagaggtggctgaaccggataccggcttggcccagactcaaatggttcccacctgctgatattttattagagttagggaaaaatttgcagtttaggaatacaaacccggtttgaaccggttcggtttttgtatgatatttagttagttttagttagtgctaggcagtagtcacaagtcaggtaaccaaccataatattaggaattactagtaattaggcattgattgtttgtatttgtaaggttgtattgtattgtatcccatttacttagtgttgttgattttatttaatttaatacaatagtttaagttaactggaggaagcgcggtgtaattattttgattatttaaagtttgggcattaagttaaattaaaaaaaaaaaaga

SEQ ID NO: 27276 - DNA, 1148 bp, Glycine max
  unsure (1)..(1148): unsure at all n locations
  Clone ID: TF_GmC332_2
attnncggctcgnagnctcgaagccctgaaatcggctcgagaaaatttaaaaagatagaggaacagagatcctgataagatagaacgaaaagcggacgcgtgggcggacgcgtgggcggacgcgtgggcgcccacgaaagcctctctctcgttcgttgcttcaaacttcaaacttcaaactcctccgcggcttcccttctcgttcttcttcacagaaatggaggtagcagtggccaaagcgttgaaaccgagtttaaggagtgagttcatcgttcagaaaatgcactgcgaggatattttcagcctgaacgcgaacaccgtcgccgtcggcgaagatttctccgtggacgacctatttgacttctctaacggctctctgcacaacgaacaccaacaagagtgcgacgaagagaaacaaagtttatctgcttcgtcgcagtcacaggaccgtggagaagacgatagcaactccaattccaccggcgtttcctatgattcacttttctccaccgaattagccgttccggccggtgacttggaggacctagagtgggtttcacacttcgtggacgattcactcccggagctgtcacttttatacccggttcgttcggaggaagcgaaccggtttgttgaaccggaaccctcagtgaagaaaacgcctcgttttccgtgggaaatgaaaataacgagcaaggcgagaagcgtacggaataggaagcccaacactcgcgtgtggtcattgggcagcacgttgctctcgctcccgtcttcgccgcccacgaagaagcagaagaagcgggccgaggcccaggtccagcccgttggagtccagattcagcggcggtgcagtcactgccaggtgcagaagacgccgcagtggaggaccggcccactgggcgccaaaaccctttgcaacgcgtgcggggttcggtacaagtcaggtcggttattttcggagtatagaccggcgtgtagtcccaccttctgcagcgatattcactccaatagtcaccgtaaagtgttagagattcngaagaggaaagaggtggctgaaccggataccggcttggcccagactcaaatggttcccacctgctgatattttattagagtctagggaaaaatttgcagtttaggaatacaaa

SEQ ID NO: 27277 - DNA, 1356 bp, Glycine max
  Clone ID: TF_GmC246_1
gatgaagaattaaaataataacaaaggaatcttctctttctctctctctctctctctttgagttgagtttcgagttgcgccattttcacctgtcctctctctctctctctctctctgtcaccgtgttgcaagtatgaaggactgttggttttttgacaacaatttcaatggtctgtcggatgagagtcttgatgatgtgatggacatggagcttttggatttgccccttgactttgaggatgtggaaactgatgctgtggaagaacaagattgggatgctcagctcaaactccttgaagacccaccaccaccacttggagttttcccactacaacaatcctctgcattctgtggacaaactcggaatgagaatgcgaaactcggcagcaagagtttctctgcttctctagcgaagactgtcagacctgcatatggcaaaactattcctgtccagaaagtctctttaaaaggaaaagatttgctccaattccaaaccaacagcccagtttctgtttttgaaagcagtagtagttctccctcggttgagaactccaactttgagttacctgtcatcccaacaaagcgtccccgtaccaaacgccggcgtctctcaaacatcagcctgctttactctattccttttatccttacttcaccggcttttcaaaaatttcagaggatggatttctccaaatcagatatacaaacacagccttctggggaattattatgcaagttcaaaaagaagcagaggaaaaaggatattcccctgccgactaacaaaattgagatgaagagatcctcatcacaggagtcagttgcacccagaaaatgcttgcattgtgaggtgacaaagacgccgcaatggagagaaggaccaatgggtcctaagaccctatgcaatgcctgtggggttcgataccggtctggccggctctttgctgaataccggcctgcatctagccccacttttgtagcatcactgcactcaaactctcacaagaaggtcttagaaattaggaacagagccacccaggtgactgttagataaaccttcgttgaaattctctagattagtattgttttagattttattgagtgcttgtgctaaacaggattgtccttgattattgttctccttttttatggactaatcttaatcttatattgcttagctagttagcatcaaaggcggtatgtaaattgaagctcgagttttctgccctcatttcatgcctcaatgaatggatgccttttggggggttgactattttgttccaccgtgttgtcccgttgcctaattaagaggggaaacctcggaattttacttcaatccttctgtctgttcttcgcagc

SEQ ID NO: 27278 - DNA, 1344 bp, Glycine max
  Clone ID: TF_GmC38139_1
ccacaatttggtatgctagggtttcggctcgatgcagcgcttagtggcgcagaaaaataaaacctaatttaccaaattcagacacagagattctcattcctcaagatcttctcatttcttgtctcaaattaatcctcaaacttgcctctctctgtctctctacaatgtgctccatttcctcactccaccaaaaccatgtctaaggatattgctaacatgaaggactcttggtttttcgacaataactttaatggtctgtcagatgagatttttgatgatgtcatcaacttttttgatttcccgatggaagacgtgtatgcttatggtgtggaagaagactgggatgctcgaagacgatgccttgaatgccgtcgatttgatgtgggatgatcaattaaaatgccttgaagacccgcgtgttgatgtttatacagcatcatcagctgggttgtgtgccaaaactcaaaatgaaaagccccaataaaacagctggcaaaagctcctgggaaatgatatggaaagaataatcccgctgggaaagtcacttggaccagtatatggaaagaccattactcaccctaaagccacatccaatggaaggtttttgaaagtagcagttcgtcctcagttgagaattccaccttcgatcgacctgtcatcccagtgaagcgggctcgtagtaaacgtcagcgtccttcaaacttcagtcctctattttcaattcctctcatcgttaatttgccggctgtgcgaaaagatcaaaggacagcagcctctgactcagcttttggaacaaatgttgctgggaatctatcaaacaaagtaaaaaagcagaagaaaaaggatttgtccctgctatcagatgttgagatgacgagatcctcatcacctgagtcaggttcccccagaaaatgcatgcattgtgaggtgacaaaaaccccacaatggagagagggacctatgggtcccaaaacactgtgcaatgcttgtggtgttcgatacaggtctggccgcctctttcctgaaaaccggccggcagctagcccgacttttgtagcatcgctgcactcaaactgccacaagaaggttgtggagatgagaagcagagtcatccaggagcctgttaggtgttctatgttggcttcatcaaatctccatggaaattctgtaggataatttttatgtttgattacatttgaggaagaaacggtagtcttaaacaggatccttcttgtttgttgttttcattatagtctaatgttatattgcttagcattatttgtttaattaatgtaaattgattggtgaaataaaaaggtagtagcaggttagtgcttgcccagg

SEQ ID NO: 27279 - DNA, 1438 bp, Glycine max
  Clone ID: TF_GmC5694_2
gttaacttgagaagtagtacctaggctcactgccttaaccttatcacaatggataataactaactcctactaatacttgtcctttatttgttcttaaaggagaaacaactttccattcacgacacgctcacgccgtcaaaccaacttgagtgcgttccaggaaacacatcccctctccatttcattcacttctctgctctctctttctcccacgaattcccaaacttattttcacgcttccaatttccgtcacgtaaaccatgcatcaccgcctcccaaattagggtttccgacaggcgcgtggaggaatcgatggcgaccgtgaatccgcagcctctgcagttcgaggaccctgctatacccgtcgacgacgatgacgacgacgacgacgacgacggcggtgatgatgacgctatggatgacttggaggatgcgaatgttaattcagtgaacgttgctgctaatgccgcggcgagtgtaaatcatgaagcggtagtggctatgccttccagaactagcgagctcactctttctttcgagggcgaggtttatgtctttcccgctatcactcctcagaaggtgcaagctgtcttgctgcttttgggaggacgtgatgtgcaggcaagggtgcctgctgttgaacaaccatttgaccaaagtaacaggggcatgggtgatactccaaagcgttcaaacctttcacgaagaatagcatccttagtcaggttccgtgagaaacgcaaggaaagatgttttgacaagaaaattaggtattccgtcagaaaagaggtggcacagaggatgcatcggaagaatgggcagtttgcttccttgaaggaaagcccaggttcatctaattgggattctgcacagagttctggtcaagatggcacttctcattctgaatctgtgtgagttttaaagcttgaatttcctacatatatattattttatcctaatgttgtggttcttttgcgtgtatgatttaattgcatttctgtaaatattatccacattgctttttcatgccttctagacgtagatgtcaccattgtggtgtcagtgaaaataatactcctgcaatgcgtcgggggccagctggaccaaggactttatgtaatgcatgcggccttatgtgggctaacaagggcacacttagagatctcagtaagggcggaaggaatctttctgttgagcaaagtgatctggacactcctattgatgtcaagcctacttctgttcttgaaggggaattgccaggcatccatgatgagcaaggtagttctgaagatccttccaagtccaatgcagcggatggttctagtaatcatgctgtaaaccccagtgatgaggaattgcctgaaactgcagaacactttacgaacgttctgccactgggaattgggcattcttcaacaaatgagaatgaacaggaacc

SEQ ID NO: 27280 - DNA, 613 bp, Glycine max
  Clone ID: TF_GmC166087_1
tgacacacttgttatgattcccttccctagctagctacccaccctatccctcggtactgtccactgtccattatttttgcctaattattaacaacacatacagttctctctttttctctccatccatgactccttattctctgaacccaccaggcccttccatacaagctggtcaaacccaactcttcaatatttctcctaataatcaggattgccgtaccatttttaacatatttgatccaaggaaaaccaggatagaaattggagggttaagagataattatcatcaacaggatgacaagatgatggtattgcatgatggatcatcaagcaacagcaacaagtcgtccttcaataataatatttgatgagaccgagtatcagtccaaccactgacaaagcaatcaattcaagcccaagattccaaaatcatcaagggctcgaaagcagaaggtacagccaaagaagccctcgtaacaacaacggcagtagcacccctagggtttgttcggattgcaatacaagcactaccccactttggaggactggcccctagggtcccaagtctctttgcaatgcctgtggcattagacagaggaaagcaagaaaggca

SEQ ID NO: 27281 - DNA, 1475 bp, Glycine max
  Clone ID: TF_GmC1014_1
ccgccggcgtcccttccactccgcccccccgtcctcggcgtagacccttgtcctgggacccacctcccgattcccaagctccccaaccgcaaaagcgaagaggtaaggcggcacggactgttccatgacgaactcctcgacaatcctcccttgagcacaccacgattccccgtccggcaaaacgacatgaacggcgtcgtcgtgtttgggcgagcgacgctccacgtggcgggcagccatgacggcggataactgagaaggaacgttgaggagggcggagtattgtattctgagggcgggggtgtcttggcaggggaagacggagcgtgcatgaatggattggcactgggtgtagacgaaggggtgggaggattggggagggaggagccattggagtgcggaggaggaaggggaggtggagtaagagatgaggaaggaggagtggttcgagagagtgaaggtgatcctagggagcctttgatggggtgcgggtccagggggagaaagaagaggatagagatcatggggatttggggtggatgcaaggaggtcaatggggagggagcgagtggccagagagcaggggccgctgtggggggtttggagactgaagagtgccgaggcgtggatggtggatgagggcaagtccaggtagagacttagggctacgtgccttgtccttgcttgccttgagctcgagcagcgcgtgtgtctgcgttgcgagtgtcgtcgttttgattcccctctctctctctctctctccaccttcactcactctgcatgcttcttcttcttctctcactctgattccgcgaaatcaaatcaaaatcagcttctcggaatcgaatctcagatctcggagatcagaaatggtggatccaactggaaaaggatcggagattgaagtcgaggactcaaactcaaaccctaacgctccttcctcagggaacagtccaagcagcaacaatgagcagaagaaaacctgcgccgattgcggcaccaccaagactcctctctggaggggtggtcctgcaggacccaagtctctgtgcaacgcgtgcgggatcagaagcaggaagaagaagagagcgatcttgggaataaacaaggggagcaacgaggacggaaggaaaggaaagaggaccggcggcgctttggggaaggaggtgttgttgcaccgatcgcattggaagaagctcggagaggaagagaaagctgcggtcttgttgatgtcgctctcttatggatccgtttatgcctgaactgaaccagaattaatcaattattattattattctagttctagatgaacaattattgaggagaattctagattttgttttaggatgttccttcccctaaccctttcccgaagtgtatatgtttagttttttttttttctctgttgaatgagtgtgtgggttggatgtcaacaacagttgtaagaaatgaaattattcaagtccaattttggt

SEQ ID NO: 27282 - DNA, 1284 bp, Glycine max
  Clone ID: TF_GmC1014_2
gtattgtattctgagggcgggggtgtcttggcaggggaagacggagcgtgcatgaatggattggcactgggtgtagacgaaggggtgggaggattggggagggaggagccattggagtgcggaggaggaaggggaggtggagtaagagatgaggaaggaggagtggtcggagagagtgaaggagaggagggagcctttgatggggtcagggtcagagagagagaaggggataggggtctgggttttggggtggatgacggagtgaatggtgagggagcgggtgtccagatagaaggggccgctgtggggggtttggagactgaagagtgccgaggcgtggatggtggatgagggcaagtccaggtagagactcagggctacgtgccttgtccttgcttgccttgagtccgtgaacgagtgaggatcaactgctgccatcttcctaaactctctctctctctctctataaacttctctctaagaccctctttccttctcactctctctctctctcaccccactcactcactctcttactctctgcatgcttctgcttcttctctcgctctgattccgcggaatcaattcaaatcagcttctgggaatcgaatctcagatctcggagatcagaatggtggatccaactggaaaaggatcggaggttgaagttgaggactcaaactcaaaccctaacgctccttcctcagggaacagtccgagcagcaacaatgagcagaagaaaacctgcgccgattgcggcaccaccaagacccctctctggaggggtggtcctgcaggacctaagtctctgtgcaacgcgtgcgggatcagaagcaggaagaagaagagagcgatcctgggaatcaacaaggggagcaccgaggacggaaggaaaggaaagaggaccggcggaggcggcggaattggcggaattggcggtggcgcgttgggaggggaagtgttgttgccccgatcgcattggaagaagctaggagaggaagagaaggcggcggtgttgttgatgtcgctctcttatggatccgtttatgcctgaacccaattaatcaatccttttaattattattattattattatcattattctagttctagatgaacaattattgaggagaattctagattttgttttaggatgttccttcccctaaaccagtcccaaagggtatatgtttagttttttttttctctgttgaatgagtgtgtgggttggatgtcacccccagttgtaagaaaatgagaaattattcaagtccaattttggtt

SEQ ID NO: 27283 - DNA, 2084 bp, Glycine max
  Clone ID: TF_GmC5231_1
gggattcggcacgtggcccgcatccctgcttcctggtgacctcctcctttctccctgatctgtgcctccccccctccccctgccgtagccggctggtcgtttttcctcctcgtcattgatcgtgccgcttggtgttttcctctcttgtgccttgttggggacttcccagctgctgctcttgacccgtcgtctagccgcgttcctggaggcatgggatttcctgggtttttggtctcctctgtgatggatttcctctgcgatctgtcctgttccgggcgctccgacctggcccttcctctcccccgtgggcccgtttgcaccgattcacctgaacccatgccttcccgcttctccggtcccaggcattcttctgcgtcctggggggcacatggtgcgggtccaattctccttacatagccgactggtggttattcgtgcacattatttaatttgccaattgtagatatcctcatttgtgccatttagtggagtttcaagctgaagctcttgaccgattgacaagtgatgacatattctaagagacgagccagtggcatagctttatgagcttgggaagttgggtgcacaagcatggaaatgagtatttcgcccaaaaggaccggttctccattgaggagtttttatggcgtcacaatgactacatcttctctcccagggcctagcttcctgggcccgctgctgctcccccagctctttgcatccctccccccctgggtcgtgctcaggctatcatctttgcacctcgccattggccgcgccgcgatccttctgggatcttgtataatgaagccgaatgctacaaactgaaatgatgcttgcgctgtgacatggcccaactttaccgatgtatacccttttgcaccgattgaccaagacttgacggttgctgcatctcgagccgaatcggctcgagggatgctggtttgagaacttgggtggaccaaatgggaaatgtacatggtcgtgttgatggagctaaagctttattgattggatctcacatggtacatgcataggctaaaatcaaaagatctctcaatatgccacaatatgatcctactgggatcttgtataatgaagccgaatgctacaaactgaaatgatgcttgcgctgtgacatggcccaactttaccgatgtatacccttttgcaccgattgaccaaaactaaaggttatcaggaaatgttcaacaatttgagtgaactgttgctggacaaattctccttacatagccgactggtggttattcgtgcacattatttaatttgccaattgtagatatcctcatttgtgccatttagtggagtttcaagctgaagctcttgaccgattgacaagtgatgatcctggaggaaaggtatttcaagtttatatgttgtgcattaaaatgaaagaatgcacgtcagaaggaaaaaaaaaactagatttattttattctattattcttatgggaaacaagatcaaattaattaggacccaaacctaagtttactgcatcttagactactaggaaaataatttataattttctgcaaatccttgtggattgtttaagcaagaatatgatttaattattcttactaatgtatgtaatgttagtacaatatatgtaaaaataggattctacagaaatgcttctttcattcttttgtgcgtgtgggcccctaacgacggcggtggatataacttccctgccttgaatcgtataccacaagcattgcacagagtatttcgcccaaaaggaccggttctccattgaggagtttttatggcgtcacaatgactacatcttctctcccagatcctagcatccttgtgaccacatcttttctcccagatcttagcatccctcccactctgtgtcgaattcagaaaatcaattttgcacttggacaatgatcgagccgctatgttttttgttttcaagatcttagtttgagacttctcagcagctaaatttgactcgtcgtctagccgcgttaatagagacatatgattagcttggttatttgacacatcagtgaatgatttcctctccgttttatccttttcaggttgttcc

SEQ ID NO: 27284 - DNA, 870 bp, Glycine max
  Clone ID: TF_GmC5231_2
catattctaagagacgagccagtggcaaggctttatgagcttgggaagttgggtggaccaaatgggaaatgtacatggtcgtgttgatggagctaaagctttattgattggatctcacatggtacatgcataggctaaaatcaaaagatctctcaatatgccacaatatgatcctactgggatcttgtataatgaagccgaatgctacaaactgaaatgatgcttgcgctgtgacatggcccaactttaccgatgtatacccttttgcaccgattgaccaaaactaaaggttatcagcatatctggtattaggaaatgttcaacaatttgagtgaactgttgctggacaaattctccttacatagccgactggtggttattcgtgcacattatttaatttgccaattgtagatatcctcatttgtgccatttagtggagtttcaagctgaagctcttgaccgattgacaagtgatgatcctggaggaaaggtctatactctggatataacttccctgccttgaatcgtataccacaagcattgcacagagtatttcgcccaaaaggaccggttctccattgaggagtttttatggcgtcacaatgactacatcttctctcccagatcctagcatccttgtgaccacatcttttctcccagatcttagcatccctcccactctgtgtcgaattcagaaaatcaattttgcacttggacaatgatcgagccgctatgttttttgttttcaagatcttagtttgagacttctcagcagctaaatttgactcgtcgtctagccgcgttaatagagacatatgattagcttggttatttgacacatcagtgaatgatttcctctccgttttatcc

SEQ ID NO: 27285 - DNA, 622 bp, Glycine max
  Clone ID: TF_GmC588513_1
attcggctcgagctttcttcttcccacttcccatttcaaaccttctataattacaatgcatatttctctctcgctttaagctcggggacacccaagaggagattgatcgatcgaattaatcgggcaagggaaatgatgcatcattgttgtggaagctcccaggggcacgtgatgggcacgtgcacatgcggcatgtatcacagcgaaaccagcgcttatggctcgatgctgttttccgtgcccaacaacagcgaatatgacatgtattcgtccttcacgccctctccttcctccgtggactgcacgctctccctcggaacaccctccacgcgtttaacccaagacgacgaccatgacaacgacaacaaacgacacccccaccaacgtcgttctggagtcgccaatttttgctgggacctgctccattccaaacacaacaacaacaacacgcaatctcaaagcaagtctagtagcagaggaagcagcagcaacaacaacaacaacaacgaccctctcctcgctcgtcgttgcgccaactgcgacaccacttccacacccttatggaggaacggtcctcgtggtcctaagtcactatgcaatgcttgcgggatcagattcaaga

SEQ ID NO: 27286 - DNA, 869 bp, Glycine max
  unsure (1)..(869): unsure at all n locations
  Clone ID: TF_GmC225547_1
cccgaattcccgggtcgacccacgcgtccgcttgttctctcactccctctcaactctcttctctctctctctctctgctgctgcaactcaaagtacacaaaacgtgaaaagctgggatggaaaccattggttctgtggatgacctcttggatttttcatcagacataggcgaggaagatgattacgatgacaaacctaggaaagcctgtccttcacttaactcaaaatgcgccggcccatcgttgtttaacccattggtccaggagtttgcagaagaggagcttgaatggctatccaacaaagatgcatttccttctgttgaaacgtttgtcgacctatcatctattcaacccggcacaaccaagaaccaaaaatcagccccagtacttgagtgtagcacaggcagtagcaacagtaataacagcactaacagtatttccctcctaaacagctgtgatcacctgaaggtcccagtccgtgcacggagcaagagtcgcagtaggcatcgccctggccttgctgagaattctagtcagcaagtctggtggagacagccaagtaatggaacttccaaagcagatgaagggatgaaaatctcatccatcggtagaaaatgtcagcactgtggagctgaaaaaactccacaatggcgggcaggtccctctggtccaaaaacactntgtaatgcatgtggngttaggttcaagtctgggcggcttgtgcctgaataccgtnnctgcagtagcccaacttttcatagtgatttgcattctaattccacnagaagaagtagagatgaggaggcagaacaaatgggaatggataaatgcaagtagtagtgagcagtatttttagcattcagcatgcta

SEQ ID NO: 27287 - DNA, 1154 bp, Glycine max
  Clone ID: TF_GmC5880_2
acggctgcgagaagacgacagaagggggagttggaataccaattttggcgctctctctgtatttctcttccttctctttcatttcccctctcttgttggttcaaaattatactctctctaagttttaaccttatgaatatggatatgtgccaaaatgtatcagtttccggtgagtgccaacaagtgcaggtttttgccccttcttgctcaagcagccttgatgacctcttctctgctcagaacacggaagtggatgttgagttggagtggctttcagagtttgttgaagactgtttttcaagccctccaagctgtgtcttggtacctattggtgtcaagactacaagcacaagcaccaacctttcttcaggcacattgaagagaccccaacaacaaaatgagtcacctttgcaaaactttgctgtgccagggaaagcaaggagcaagagaaagagaaagaggctttcagcccctagaacaacaaaacacaccctaagcacatggtcgcaacatttcagcacacagaatgatggggtgagttctgaccctcctcttttgaaacaagcttattggttggctgatagtgaactcattgtgcctaagaagaaggatgttgagcaagaagaggaggaaggggttgttgtggttgtgaagaaggagaaattgggggattattgtgatgatgatgagggtgatgaaattaacaataataatagtaataatgatgataatgtgcagcacccaattccaagaaggtgcacacattgtctagctcagaggaccccacagtggagggcaggaccattgggtccaaagacactatgcaatgcatgtggggtgaggtacaagtctggaaggttgttgccagagtataggccagccaagagccctacttttgtaagctatttgcattccaattcacacaagaaagtcatggagatgagaatgggtgttggtgttgctgttctttctacagacaagaagtagtgaaaatcatgtgttactaaggttttaaatatcggtcgcagtcgcatgcgatttgttgacatcatggaaaatcacagataaatgtgactgatgcgatctcgactgcgatcatcaacaattaaaaaatattgatgttgtgatccaaatctaagtcgtgggcctttttt

SEQ ID NO: 27288 - DNA, 574 bp, Glycine max
  Clone ID: TF_jC-gmXLIB3563P070ae11d1
gagtataatagccatgagtaaaaatggtgaaattaaaaaacaaaatttcttccttgtatattacaagctataatctgcacttgtattagtacttttgaaataaatgaaaagtatatatcatggttttaaattgtaagcaagaaaaacctttacattgtagacaattacgggaaagtgcgactgatgtggtcatgatgcgatagcagagtgtcaaaatagcctgagttgtaatcacaattatggttgcggactgcaatttaaaaaccatggtatatagtaacacatgaactttcactacttgttgttgtctgtagaaaaaacaccaacaacacccattctcatctccatgactttcttgtgtgaattggaatgcaaatagcttacaaaagtagggctcttggctggcctatactctggcaacaaccttccagacttgaacctcaccccacatgcattgcatagtgtctttggacccaatggtcctgccctccactgtggggtcctctgagccagacaatgtgtgcaccttcttggaattgggtgctgcacattatcatcattattactattatta

SEQ ID NO: 27289 - DNA, 694 bp, Glycine max
  unsure (1)..(694): unsure at all n locations
  Clone ID: TF_GmC103141_1
ggctcgaggttctagatcgcgagcggccgcccttttttttttttttttacacacatttataatttcatcaaattttcataaaaagtaaaattgttcttcaatattaagtctcctaagtcctaattaataataacattatagtaataagtaatgtctaacaactaacattaacacctaccacaaccaacgacggttaaaattaaaaggaaaaaaaatgtacacactaactccgggccccactgaaacaggtccatttggtccaacctcttctctaactatgactcttttttttttctaacctgaaaaaaaaattcaaaaaccgggaagcgacggtggcgaagcggtgtcgggctcaggcacgtcctccttcttccgccgcatctcgaggacctttcggtggtggttggagtgcaactcgctggagaaagtagggctacaggcgggtctatattcgggtaataaccgacccgacttgtagcggaccccacacgcgttgcacagagtcttagccccgagcggtccgggggcgccactgcggcgttttctgaacgccacagtggctgcaccgtcgcgccgcgccgccgtccgaagcggtccgcttcttccccctggagttntttattttctttgccataagctttttttggaaagaaggcaatcttgttcttcaaaagattttcccaagccttcccac

SEQ ID NO: 27290 - DNA, 237 bp, Glycine max
  Clone ID: TF_700678225H1
gctagctattctttggcaaagcagcaatggctttagtaggtgaacaaaagcattcactcatggtgaagaaaggtccatgttcgcattgtggagttactcatactccactttggcatgatggaccaactgagaaaccagtgttgtgtagcgattgtggatcacaatacaagttaaaaggaaatttagacaattattttcccaagaatcccgttgttcagtcattccacaataagttta

SEQ ID NO: 27291 - DNA, 1467 bp, Glycine max
  unsure (1)..(1467): unsure at all n locations
  Clone ID: TF_GmC767_1
gtccggnattcccgggtcgacccacgcgtccggagagatttagataacacaacaccaatgcgggaactcaaacgcctgtttcgcctaaccaaaggaagctccactgcggtttccgtttcctctctgccttcaccactctcttttttttctcaacaggaacaaagaaaaatggaagttgcggcagcgaaagccctgaaaccaagccttcggacagagttcattttccctcaagcaatttacgacgagattttgtgttttaacgccaacaacgttgttgccggcgaagatttctccgtggacgacctactcgacttctccaacggcgaatttcaagtcgggaaagatttcgatgactacgaggaagacgaagacgaagaaaaaggcagcacctccggttccttgcagtcgcaggacagaaccgaagacgacagcaactctaattccaccgccggaggcggcggagactccgttttcgccggcgagttgtcagttccggcggatgacgtggcagacttggaatgggtttctcactttgtggacgattctctcccggagttatctctattgtacccagtccgttgttccgagcaaacaagggtatgtaccgaaccggaacccagaccgggctcggtccaaaccattccagcagttccaagaaagccgagaaccggaaagactagaaagcccaacgctcgtgtctggtcctcgatgtcgtctttgtgttcttcggtgacggccaagaaacagaagaaaaaggtcgaggcccaaaacggtggggcccagtctctgcgacggtgcagccactgccaggtgcaaaaaacgccacagtggagaaccggcccactagggcccaaaacactttgcaacgcttgtggagttcggttcaagtccggtcgactttttccagagtatagaccagcctgtagcccaactttttctgacgatattcactccaacagccatcgtaaagtgttggagatgagacgaaaaaaggagatagttgaatcggaccggattcaattgatcccaagttgttaatttttgttagactgaatttagatgcagttcattaagtatttctagtagagtagtattgtttttttccgttagaattaaagtttgacctcattaatatgcatataaaagtttgcataattgagataaaattataattctaacaaggctatctaaggatttatgtttttagattccaataggttatagatcagaaataggtcaacgaatcggtctgagctggtttggtatttgttccatagttagtgatttaaattagtgctagtcaggtaaggaagaactaagtgataacggacattaggagagcattgatagtttgtatcccattttcctagcgcagttgatttaattaatgagatgtagttaagttgaggaaaaaaaactaaattatttatgaggacatctttctatatatattcaagttgggttgat

SEQ ID NO: 27292 - DNA, 558 bp, Glycine max
  Clone ID: TF_LIB4390-045-R1-K2-C5
ctgacagtgagctcatcatgccaaagccaaaggatgaggagcaagaagaggtggtgaccaaagaggatgaaaaagtgattaatgtgatgagcaaggaaagctttggggactctgagcttgaggagggtagcaatggtcaacaaccaatgccaacaaggaggtgcagccattgcttggctcagaggaccccgcagtggagggtaggaccattaggtccaaagacactatgcaatgcatgtggagtgaggtacaagtctggtaggttgctaccagagtataggccagccaagagtcctacttttgttagctacttgcactccaattcccacaagaaagtcatggagatgaggatggctgttttctccaccatttctagtgagcagtagtagtggttgttacttattagaggtatatttctatgtaaaaaaaaaaaatcaaacttcaaattttaggaacaaaaaactatttggcaaacagagagatactgttaaggggagagtgcttaatgctatgattgattataggcacatttatttatatgacttattatccagtttc

SEQ ID NO: 27293 - DNA, 542 bp, Glycine max
  unsure (1)..(542): unsure at all n locations
  Clone ID: TF_GmC241333_1
aaaaataaagggtaaaaggacttgcattacatatcaaagtctcctaatgggttacaaaagctaacacataccgcactcaatacaagggaaaaaaatgtacactaactcgggtcccattgaaccgggtctaaagtctgcgctacctttctctaatctgagtaatcaatcactacagcacctagtttttttttttcttttcttttcttatgtaataaaaagaatcagaaactgggaacaacatgagcaggggcaaaaccagtctcatccacagaaactgtctccttcttttgccgcatctcgagcactttacgatgatggttcgagtgtaattcacttgaaaatgttgggctacaagcaggcctgtattcgggtaaaagccggcccgacttgaagcggaccccacacgcgttgcatagtgtttttgggcctagcggcccagttctccactgaggggttttctgcacgccgcaatgactgcaccttcgcggcgccagggtacgtgggcggacgctttggttcatttttttggnatttggctcgga

SEQ ID NO: 27294 - DNA, 1230 bp, Glycine max
  Clone ID: TF_GmC161373_1
ggaaaaccacaactttgtcacactttgtgtctccaactccctatactttctcgcttcaccctccccggtaacgttttcgcttcagcccacaacgagccatggaagcacaagagtttttccagaacaccttctgtccccaattcccctcagacagcaacatcactccctccaacgccaacccctccgccgccaccaccgaccacttcctcgtagaagacttcttcgacttctccaacgacgacgacgccaccttcgactccctccccaccgacgtcgactcccccaccgttacccctgtcgacaccaccaccaactccaatttccccgcctccgcagacgcccatttccccggtgacctctccgtcccgtatgatgatcttgcggaattggaatggctgtcgaaatttgcggacgaatcgttttcgagcgaggatttgcagaagctgcagctgataacgggtgtgagagcgcaaaacgatgctgcatcgtctgaaacgcgtgacccaaacccggttatgttcaacccgcaagtgtcggttcggggcaaggctcggagcaagcggacacgtggacccccatgcaactggacctctcgcctcgttgtgctctccccgaacacgaagtcgtcgtcgtcttctcactccggcgcggaaggcggcagcgaggggcggaagtgcctgcattgcgcaacggacaagaccccacagtggcggactgggcccatgggcccaaaaacgctctgcaacgcgtgcggcgtgaggtacaagtctgggcggctggtgccagagtacaggcccgccgcgagcccaacgtttgttctgacgaagcactcgaattcgcaccgcaaggtgctggagctgcggcggcagaaggaaatggtgaaggtccagcaccagcagcatcagtttctccaattgcagcatcagcagaacatgatgttcgatgtcccatcatccaacggtgaggatttcctcatccatcagcacgtgggcccaaatttcacgcacctcatctagagtaggaaacttccgctacttaatttgtagttagctcagttatttcttctcttctcttttcttttcttgcctaattttgttaggaatttgtttaatttctttttcagtttatgctatatgtagactggtctcatgtttctttcttcaagtcattttgaccgacttgaaaacccacaaactctaaattttcctaatgcattattcttttcttttc

SEQ ID NO: 27295 - DNA, 1493 bp, Glycine max
  Clone ID: TF_GmC5042_1
gagtggctctcccagttcgtgaacgacgaggcgacgtcgtttcacaacatcccaccacccgcatccattggatcccacacgacgccgtttctttccaacaataacaggaacgataataataacgaatatcccaaatcatcatcatcttcaccggtgttggcgggaaaatcgagagcaagaagggaagggtcggtgaccggcgacggcgtgcggcgctgcagccactgtgcgacggataagaccccgcagtggcgcacgggaccgttggggccgaagacgctctgcaacgcgtgcggcgtgcggttcaagtcggaaacaaacacaactctctctatcaacaaaaccaaccaacacaagaaagaaagaaaaacaatggacttgtacggttccttttccaccccttcagattgcttacatattgatgattttctagatttctccaacatcaccaccgacacccaccaccaccttcctcctccgcaaaactctccattaatctcccacgacgacgccaatctcttcttcaatttcccttccgttccgaccgacgaagcggcggagctggagtggctctcccagttcgtggacgacgacgcgacgtcgtttcacagcttcccagcaaccgcatcgattggatcccactcgacgtcgtttctctccaacaataacaacagaaacgataataacgaatatcccaaatcttcattatcttcaaacattccatgttcttcagcggtggcgggaaaatcgagagcgaggagggaagggtcggttaccggcgacggcggcgtgcggcggtgcagccactgtgcctcggagaagacgccgcagtggcgcgcgggaccgctgggaccgaagacgctgtgcaacgcgtgcggggttcggttcaagtcgggtcggctcgtacccgaataccgacccgcggcgagccccacgttcgtgctgactcagcattcgaactcgcaccgcaaggtcatggagctccgtcgccagaaggagctgctccgccaccaacaacaacaacaattacaacaagagcaatgccaccgtcacactcacaaccaccacgatttcaaagtttgctgacgtgtcctttgtcggtgcttccttcttttataattaatgatgactaatgtcttcagaatattatcagtaaataaaaaaatgatttttttttccatttttactagtttcataaggagaaatgctggtaatctacatcacaatgtttttgccttaaaaaagaaatatcacgaagttttgtaaatctaatttgttatttaatgaattttactcgtaattttttaaaaaatgagtgccataaacggtgaagcagagatagcgctatttgtttcttggctgtttatttatgctctctctctgatctcaaattgagtgaagggttgatttttttttttttcttttttatgtcgaggagaagagaagtgaccttcgtgggaaagggaaaaaaattgccttactgtacggtttta

SEQ ID NO: 27296 - DNA, 570 bp, Glycine max
  Clone ID: TF_LIB4392-031-R1-N1-G6
aaaacaaaaaaggctaagcaaaaaaacattagactaaaaggaaaacaacaaacaagaagggcccggttaaaaaccaccggtgcttcccaaaattttttttttttaaaaattaccccacaaaattcccagggggagggggggaagccaacaaaaaaccccaaacaggccccgggaagactttgtttctaatccccacaacctttttggggcagttggggggcagggatgctacaaaaggggggctagctgccggccggaattaaaaaaaaagggggccggacctgtatcaaacaccacaagcattgcacagggtttggggacccaaaggcccctctctccatgggggggttttgggcaccccacaaggcaggcattttggggggggacccgacccgggggaagaggaccccgccatcccaacatcggataggggggacaaacccttttcccccgggttttttacttgggggggaagatccccaacaacatttgtcccaaaatctgagtcaaaggcggcggccctttgatcttttcccacggccgggaaattaacgagggggggaattgaaa

SEQ ID NO: 27297 - DNA, 1546 bp, Glycine max
  Clone ID: TF_GmC1783_1
cttcactcccacctgcctcgccttctacgcctcccagacactatacgagcattctcttactcttaattctccccactgcccttctcttcctccttactccctctcactcaaacggtgtttggtttagatgtttattttgagttacgtttcctctatgttcgcgttatcttaccttctttcgatcaatccctgctatacttttcccttctattagcgttttcttaccttccccacgtactgtaatgcgcggctacccccaccatatcccctccttccaacacacccacggttccgcctccggcaccagctcccatcacctgaagaacacgaccgatccgtctcgcgccgcacaccctctacagatcccataccatccacacacccgccgccaactccgatccgcacatcaattccagttcccacaccatcgaagagcacggcgccgtctccaaccaccacatccattacagttcccacaccatcgaagtggacggcggcgccactgtcgaagaggtttccgccgttccgccccttgaaatctctatcaacgattctagccagctcacgctctcgtttcgcggccaagtctatgtcttcgacgctgttacacctgataaggttcaagcagtgttgttgctgttgggaggaaatgaactaacttcgggttcgcaatgtgcggagctatcatctcaaaatcagactggtgaggaggaatatcctgcaaaatgtagtctaccacagcgagcagcgtcattgaataggtttcgtcagatacggtaaagaagggttgctcataagaaagttagatatagtgtacgtcaagaagttgcactcaggatgcatcgtaataagggtcaatttacttcatcaaagaatcaggatggaactaatagttggggttcagatcaagagtcagggcaggatgctgttcaatctgaaaccttgtgcacacattgtggaataagttcaaaatccactccaatgatgcgtagggggccatctggtccaaggtcactttgcaatgcttgtgggcttttttgggcaaataggggcactttgagggatctttctaagagaaaccaggaacactctcttgcaccacctgagcaggttgatgagggcagtaataataatgactttgactgtcggagtggcatccctgcacaacataacaatcttgttaatgataacaaagctttggtatctgatcgttgagttttccactcacaggaaatgcaagtccttgactgtgacattcgcaggtttttagtaattccattcagtttgacctatagaatgtacagtatatagcaaagctctcgtcaatacaagagaggtctatttctatactctctgatcagttgcattaaactgtttatctatgactgtacaaactggaatttggaatgacttgatcgaatacaagagatctattgctttactctcggacagttgcattaactgttttatctatgaatgtataaactggaatttgaaacgaacttgatcctcaaaaagtggtcggtggttttagtttagtctagtg

SEQ ID NO: 27298 - DNA, 1510 bp, Glycine max
  Clone ID: TF_GmC41398_1
tcttcttcttcttcactattttttcagttatcgtgacctcctccctacccttttccgctccctcgctccctcttcatacattttacccgttactctctctctctccatcttcattctcttcttcttcttcactattttctcagttatcgtgaccttatcccaacccttttctgttgcgaaggtgcttctgggctgttgtcagatcaatccacaaccctcaattgttggtgttttggctcttcctgtatcatggatggtattcatgggggtgattctcggatacacataactgatggacagcatcctatacacgtgccatatgtgcaagaacacgagcatcatggactccaccatataagcaatgggaatgggatagatgatgatcataatgatggtggtgatactaactgtggtggaagtgagagtatggaaggtgaagtcccctccaaccatggaaatctccctgacaatcatgctgtaatgatggatcaagggggtgattctggggatcagcttacgttgtcttttcagggccaggtttatgtctttgactccgtgtcaccagaaaaggttcaagctgtactactgttactgggaggccgcgaaatacctccaactatgcctgccatgccagtatctcctaaccataataaccggggatatactggtactccgcaaaaattcagtgtccctcagagattagcttcattgattaggtttcgtgaaaagcggaaggaacgaaattatgacaaaaaaattcgctatactgttcgtaaagaagtagcattaaggatgcaaagaaataaaggtcagtttacatcttccaagtccaataatgatgaatctgcatcaaatgccacaaattgggggatggatgaaaactggacagcagacaatagtggatcccagcagcaagatattgtttgtaggcactgtggcatcagtgagaagagtacaccaatgatgcgacgcgggcctgaagggccaaggaccctctgcaatgcttgtggtcttatgtgggcaaataagggaatcctgagggacctatcaagggcggcacccttatctgggactatcaagaatgagaataaaagtttagaggccaaccagatagtccatagagttgcaggagaagctgatgattcatcatgatgacctttatattttggtgagaatggagagcgattccccgaaataatggtgatgggagagtttgcccctagataagaaattgcagaagggggggctttttctactaagtttttagtgaaaatgtttaaatgagcattctgtattttgttttgaatatatgaagaaagtcattattcccttgtgacagctagttctttttggggaattttatttattttgggtatgctgaacagcttcaagccttcgatgcacttcctgatgttgtattacgttgtatttaaaaaaaatggtctcttttataattttcgtgccctctttcccttcactttcatcctctatacatggatgttttgtgttt

SEQ ID NO: 27299 - DNA, 1480 bp, Glycine max
  unsure (1)..(1480): unsure at all n locations
  Clone ID: TF_GmC1271_1
gccccgccccagaggcacgttgagattcaccacgccttcccttcccgcgcttacgatctgccccttcctgccctctctttcttcttctcttcctcctcccggcccttttgtattatcaactgtagacaaaagggtctcctcttgctgcagctgctctgtttcactcttcgcctgtcttgcgtgtgtctctgtctcctagtctgtgatgcctgtgtatcgttacgtgttgtcgtcgcctatgcctatagatcttaatgaagatcacacccaccacgtcttcagtacaagccatcaagcctcttcttcgtcttcttctctatctttttctattctcttcaacccggatcatcaaggtcaaggaggatcttgttgccactgggaatcaaagcacttacaaagtgatgaagaggcccagaagattgttccttctagtgaatcatgggagcatccagtatctgaaaaggatgaaaacagaagtgatctcaagctgagagtttggaagaaagaagataagtgtgaaaattttcaatttgaagaataattcaactaagtggatgcctttaaagatgagaatgatgcggaggatgatggtgtcagattaaacgggttttgatacagaaggcatgatctctaactctaagcagatcaagaatgaagagaaaaacccaccactgacacctctaggaactgatgatagtaataactacaattcttctgcaaaccacagcaatatcactgttagggtttgttctgattgccacaccactaagacccctctctggagaagtggaccaaaaggtccaaagacactttgcaatgcttgtggaattcgacaaaggaaggcaaggcgtgccattgccgtggctgcaacggcaaacggaatgaatccggtggaggctgagaaatctcaagtaaagaaaggaaacaaattgcatagcaaagggatgaagtccaaaactaagggtgcaccacatatgaaaaagaagcgcaaacttggagcgaagtatagaaagaggtttggtgcttttgaggatttgacagtgagattgagtaagaacttggctctccaaaaagtcttccctccggatgagaaggaggctgcaatcttgctcatggctttatcttatggccttcttcatggctttcccacagatcgttacgtcaattacttagatttatgagatatattggtggtaaaaccataattattgtatgagaccaatgcttaattagtgttgtgctagatttagtgaagttaattagtatgaaaaactgataatagggacaataaagttatgaggagggtggttttatcaattgtatgttgcatctgaacaagaagacaaacacaaaatactagtgtcttattgttcatgatgatgagtatcctataatctcgataaatatttaataaaattccaagagattttatgttaaaaaggggggggggggcgannnnngagaggggganntgggatta

SEQ ID NO: 27300 - DNA, 2568 bp, Glycine max
  Clone ID: TF_GmC356_2
ggtccggaattaccgctcgaccacgcgtccgctctgatgcaacacacactcttctcccactcttctccttcttctcttagggttccgcgactgtgagtgatgcttcttgcgaaatggataacagcctgaacaatccgagcgacaacggggaagacccgccaccgccgccggcttcccatgcaagtcgacggcttccaaccgttccattacgccaattgttccgatgaaggggaagaagctgttccggtcaccaatgcttcttctgctatgcacgccagagccagcgaactcaccatttccttcgaaggcgaagtctatgttttcccagcagttacgccggaaaaggtgcaggccgtattattactcttgggagcacaggagatgacaaatagtgcccccacctctgacattttgttgcagcaaaactatcaggaaaaagcagaagcagcagtacggaaactagagatgaaattggaaaaaaggcgagcatcctctatggataagattatgaacaagcttagattgctaggactcaaccggttcgcgccctcttctcttggacctccgcgcctgttatttatgcttctttcgttatcggtagtagcttcacccgctggtgctccattcagacagtgtttacggcattccttgctgtccccgcgcaatttcgcggaaccttgccctctcatcaagctaattgtgagaattgcacgaaagtaaccgttttggatacaaaagattctgcaaaaaagaaagagatcgcaatcggactcgctatttgcatagtgcgacaagggcgaaggttggtcccaagcaaccatgcgcggacgccggacgcttcagatgagacaaaagctaaagcaaagacgcggagtgaaaaatccaaactcctttgtgggtacaaatccctaagggcaaaggctgaagcagatatacggaatcttgagtttaatttgaaaacgaggacaagcgaaccctgacgataatattataagcaggacaaagagagggcccagaaaaaagctcaggaaatgagaagttcagttccacacaaccaaaccgatcgggttgtaagaacttcacacaaggcttcatcatttcttagaaccagccagatgcgttctttgagtggttgtttcacttgccatgtcttttaagcattctttcatgttcgagttttggggtcttgccgtgggtttcaaatccgccacatgtttgtgattttgaggggcacttcagttgacaaaattggtgttgttgcgttttgctatccatggcaccttctttgaaagtctcagatatcataaaatctaagccccatgttcgggagtttggattcaatgggtagcaatatttgtaagtaggccaaattttagaaataagatcttttgtatatgtttgagtgatggtgggtttccgaaggattcaaatgggccacatgttaatgattgaaaggggcacaacagttgacaaaattggtgttgttgcggtttgctatccatgtcactttccttgaaagtttcagatgccatcaaaattattactcttgggagcacaagaaatgacaaatagtgcccccacctgactgcattccaatgtcctggttttcaaaataagaattggagtttttctttttgacactagtatgttggtgttctgtttgtcctctagagtctagacgtaggttggttttcttgagattgacaatacttggttatctaataggatgcatcgtaagaatggacagtttgcatcattgaaggaagactacaaatctcctgctgaaaattgggattcaagcaatggtactccttgcccagactctactgagcgtagatgccagcattgtggaattagtgagaagtctactccagctatgcgtcgaggaccagcaggtccaagatctctgtgcaatgcctgtgggctcatgtgggcaaataagggaactctgagagatctcagcaaagcagcaaggattgcttttgaacaaaatgaactggatacttcagctgatataaagccttcaacaacagaagccgaacattcttttgctaagcaggacaaggagggaagccctgaagaaactaagcctgtgcaaatggattccagtcggtcacctgagaagacaaatgaccagtttattatcggaactgctgaatcagttactgacaacttgtccatccaagtggagaatcatgctcttagtctacatgagcaggatactcttgaggatcttgctgatgcttccgggaccgaatttgagattcctgcaggttttgatgatcaggttgacattgatgattccaacatgaggacttactggctgtgatctagagatattgctatgcacaatcagcatggtctgttcacaatggaaacaaatgtgcactgctggttcaactaacattagacttctagaaatagtttatgttttatagacaaactatttctggaagcagctgtgaattatatgattgtagacttacaatttcttacattagttcctgtacatccctttggaaccagatttcatttatataatgtgaatagttgagtttttttttaaaa

SEQ ID NO: 27301 - DNA, 429 bp, Glycine max
  Clone ID: TF_GM378C18.C60.o1.fg
atgggtggttatggctcccaggggcacgtgatgggaccctgcacatgtggtatgtttcacagccaaaccaccagctccttcgccacgtttttctccatgcccaaccacaaaccaccaccctacatgattccgacaacatttatgactattcttccttcactccctcttccttttcttccgttgactgcaacctctccctcggtaccccttccacctgcgtctccgaagacgaagaaaaacgaagccgccacgaatgccattccgtctctaacttctgctgggacttactacaatccaaacacaacaaccctcaatcccattccaagtcctccggaaccaccaacaccaccgaccctctcctcgctcgccgctgcgccaattgtgataccacttctactcctctctggagaaatgcccccgtggccctaa

SEQ ID NO: 27302 - DNA, 1397 bp, Glycine max
  Clone ID: TF_GmC4231_1
tctccctttcattttccctcacactcatcattctcaaaaaacacgcccaaattctaatcaaattagggttagggttttcaactcccctcgaattatccctgtaatgcagtgcgattcccgggtcctaccatggagccatcagcaatgtacggaccctcccagcccctgaacatcccctcgcggatcggcgctggcgaaagagacgacggctccggcaacgagcccgccgtcgacggccaccaccaccacattcagtacgaaacgcacgcgctcgatgacggtgccgccggtggcgccgtggttgtcgaggatgttacgtcggacgcggtctatgtctccggcggtggaggccccgaggagtccagccagcttacgctgtcgtttcgtggccaagtttacgtcttcgatgccgttacgcctgataaggttcaagcggtgttgttacttttgggtggatgtgaactatcttcgggtggttcgccatgtgtggatcctggggctcaacagaatcaaaggggttcaatggaatttcctaaatgtagtctaccacaacgagctgcctcattagataggttcaggcagaagaggaaagagcgatgctttgataaaaaagtgagatatagcgtacggcaagaagttgcgctcaggatgcatcgtaacaagggtcagtttacttcatctaagaaacaagatggagctaatagttatggtactgaccaagattcaggacaggatgatagtcaatctgaaacctcatgtaaacattgtggcactagttcaaaatccaccccaatgatgcggcgagggccatctggtccaaggtcactttgcaatgcttgtgggcttttttgggcaaataggggtgctttgagagacctttctaagagaaatcaggaacactctcttccaccagttgaacaggttgatggaggtaatgacccagactgtcggactgccgctgccgaccctgcacaaaacaatcttgctgctttctcagagcctgttaatccagctttggtagctgatcgtaaggttttccaatctcagaaaatgttggagtagttgactctggcataagtaggtctatagttattccattcagattgaccaataggaatgtacagatataacaatactcccatcaatgcaagaactttgtttttatatggtaggatcagtggcattaactattgatctctggatgtatcacctgaaacttaaatgatgacttggtgatggtctcacccaataccttgaatttaattttacatgtatattgttggatctatggcattaaccattgatctctggatgtataacctgaaacttgaatgatgacttggtgatggtctcacccaataccttgaatttaattttacacgtagattttttgttca

SEQ ID NO: 27303 - DNA, 1284 bp, Glycine max
  Clone ID: TF_GmC4231_2
ggtccggattcccgggtcgacccacgcgtccgaaaaaacacgcccaaattctaatcaaattagggttagggttttcaactcccctcgaattatccctgtaatgcagtgcgattcccgggtcctaccatggagccatcagcaatgtacggaccctcccagcccctgaacatcccctcgcggatcggcgctggcgaaagagacgacggctccggcaacgagcccgccgtcgacggccaccaccaccacattcagtacgaaacgcacgcgctcgatgacggtgccgccggtggcgccgtggttgtcgaggatgttacgtcggacgcggtctatgtctccggcggtggaggccccgaggagtccagccagcttacgctgtcgtttcgtggccaagtttacgtcttcgatgccgttacgcctgataaggttcaagcggtgttgttacttttgggtggatgtgaactatcttcgggtggttcgccatgtgtggatcctggggctcaacagaatcaaaggggttcaatggaatttcctaaatgtagtctaccacaacgagctgcctcattacataggttcaggcagaagaggaaagagcgatgctttgacaaaaaagtgagatatagcgtacggcaagaagttgcgctcaggatgcatcgtaacaagggccagtttacttcatctaagaaacaagatggagctaatagttatggtactgaccaagattcaggacaggatgatagtcaatccgaaacctcatgtacacattgtggcattagttcaaaatccaccccaatgatgcggcgagggccatctggtccaaggtcactttgcaacgcttgtgggcttttttgggcaaataggggtgctttgcgagacctttctaagagaaatcaggaacactctcttccaccagttgagcaggttgatgaaggtaatgactcggactgtcggactgccactgccgaccctgcacataacaatcttcctgctttctcagagcatgataatccagctttggtagctgatcataaagttttccagtctcagaaaatgttgaagtagtttactctggcataagtaggtctatagttcttccattcagattgaccaataggaatgtacagacataacaatactcccatcaatgcaagaactttgtttttatatggttggatctatggcattaaccattgatctctggatgtataacctgaaacttgaatgatgacttggtgatggtctcacccaataccttgaatttaattttacacgtagattttttgttca

SEQ ID NO: 27304 - DNA, 1096 bp, Glycine max
  Clone ID: TF_GmC6848_1
gccccagctcccctccctcctccacgcgcccgaccccgccgcgccacccccccaccccgtccatggcgccctctccgggatcaaggctcctaagcaggcctctggggagcacaagaagaaaaagaagatcaaagtgactttcccatcaggtcaagagcggaatgcaccatcacaggcaattaggaaatgcttgcactgtgagataaccaagacaccacagtggagggcagggccaatggggccgaaaacactctgcaatgcttgtggcgtgcgctacaagtcaggccggcttttccccgaatatcgccctgcagcgagtccaacgttttgtgcggccatgcactccaactcccataagaaggtccttgaaatgaggaacaagacaggcaccaaatctggctttgcaactgtttctgctgcctcaccagaactcattccaaacactaacagcagccttacccttgaatatatgtgaaagggggaaaggaaggattctagttggagaattctctaattctctttcaagtcttctcttgagtcatgtcttatacaaggttttgaattgcattctacaaactgcaatgttaaaggttttagaggtgtctgcaactgcgttgtggttgcggttgtgactgcatcagccatatttgtccacaattttgatggcaaccgcaagttaaaaccttagtctttgtgttatttcttgtctgtcatttatttttctcattggatttttgtacagggctggaatggggggataggagcaaaatagaacatgatcatattgtagctatatttagaactgaagaacaagggatagagatatgcaagtcaaagagggtagagtcaccagagtgttagccattttaggtctagtaattgtagcagtactcaggaggagtctttgttacttttcttattctcatcatttttcatttttttttctttaatttctgtttctaaaaatccctccctgtagcaaattttttttgctgttcatttgtagcaaaacttatgagttgatcaggaaaggaacttttggaatttgccttcttcctttaaaaaaaaaaaattgtgccacacccaagaacgcccc

SEQ ID NO: 27305 - DNA, 1415 bp, Glycine max
  Clone ID: TF_GmC1294_1
gtatagagagataaaagataacaccaatacctcaactcaaacgcttgtttcgcctaaccaaaggaaactccactgcggtttccctttcttctctgtcttcactactctcttttctcaataggaacaagaaaaatggaagttgcggcggcgaaagcgctgaaaccaagcttgcggacagagtttattttccctcaagcaatttacgacgagattttatgttttaacgcgaacaacgttgttgccgatgaagatttctccatggacgacttacttgacttttccaacggggaattccaagttggaaaagacttcgatgattacgaggaagaggaagacgaggaaaaaaacagcacctccggttccttgcagtcgcaggacagagccgaagacgacaacaattctaattccaccgctggaggcggcggccacgactatgttttcgccggcgagttatttttgccggcagatgatgtggcagacttggaatgggtttctcactttgtggatgattctctcccggagttatctatattgtaccccattcattgttccaagaaaacaagagtatgggccgaaccggaatccagattgagcccggcccaaaccgtttcaaaagtcccgagaaagtcgagaactgaaaagcctagaaagcccaacactcgtgtctggtcctcttttacggtgtttgctggctccgttgggttcggcgagttggtgactaagaagcagaagaaaaaggttgaggcccaaagcggtggggcccagtctctgcgacgttgtagccactgccaggtgcagaaaacaccgcaatggaggatcggtccactagggcccaaaacactttgcaacgcttgcggggttcgattcaagtctggtcggctttttccagagtatagaccggcctgtagcccgaccttttgtggccacattcactctaacaaccatcgtagagtgttggagatgagatggaaaaaacagatagcagaatccgttactggttcagaccggaaacaattgatcccaaattattaaattttgttagacaaaatttacaatggagtagagtgctagtattattttttcgttagaattaaagttttacctcttatatgcatataaaagtttgcattattgagataaaattttaattctaactaggctatccaaggaaactatgtttaagtagtttttttagagtccaataggctatagattaggaataggtcaacgaaccggtctgagccggtttgatatttgtaccacggttagtgagtagtgatttaaattagtgctagtgagctagggaggaactaagtggtagtaatggacattaggaaggcattgattgcatgtatcccattttcctagatcaattgagtataataaaatcgagaaagagaaaatttaattaaaaa

SEQ ID NO: 27306 - DNA, 1844 bp, Glycine max
  Clone ID: TF_GmC28720_1
cccacgcgtccgctctcaactcaaacctccacacccttggtgtggtgcggtgcttttctacctcatcgttgaccttacccttcggttcctttctcagctaacatgcttcatctctccccaattgtaattttaacttcacccccatccaaacgctgcggggctacttttgctttttcgatcgactcaactcaaacctccatctccatttggtgtgtgtagtggagcttttctaccttcaaagattgcacctttacccttcaggatattttcaattgtcaagaaaatggttggacctaacttcatggatgagatagactgcggcagcttctttgaccacatcgacgaccttctcgattttcccgtcgaggacgtcgacggcggcgctgccaccttgccttccgtctccgccggaaacagcaactcgctggcgagcatctggccctccgagtccgactcgtttcccacctccgactcggtgttttccggcaacagtgcttcggacctctcggcggagctatccgttccgtatgaagacattgtccaattggaatggttgtccaattttgtggaggattccttttgtggggggagcctaacaatgaacaaagtggaagagccatcatgtaccaccaaggaggactcagtcaacacccaatttcacacatcaagcccagtttctgtccttgaaagtagcagttcttgctctggtggcaagacttttccactaagcagtccagagatttacatcctgtggacgtacagcagcgcgcaaccttcaatcctactatgtcattccctgtatatcatccaagtcatcttcagattctgagaattttgctgagtctcaacttgttcccaagatgccaaaacaagcttctgaggagcctaagaagaaaaagaaagtgaagctgccacttccattagttccagctgataacaatcaaaatgcctcacaacctgttaggaaatgcatgcattgtgagataaccaagacaccacagtggagggcagggccaatgggaccaaaaacactatgcaatgcttgtggtgttcgttacaagtccggccggctcttccccgagtaccggcctgctgcaagtccaactttttgcccatctgtgcactccaattctcataagaaggtcctggacactatgcaatgcatgtggggttcgttacaagtccggccggctcttccccgaataccggcctgctgcaagtccaactttttgcccatccgtgcactccaattctcataagaaggtcctggaaatgagatgcaggggatttgacaaatctggttttgcaatcaattcagctgcctcacctgaactcattccaaacactaacagcagccttaccctggagtacatgtgatgtgaaggaggattgatcctttgttggaaatttctctttcattgctgccctctagagtcatgtcttatgttatttcttttgatatttcatttctttggttcattggtttttgtacagggttggactgggggaataggagcaatagatgatgatgatcttattttagcagttaggggaagattgtaatgagaagtgaggaaaaaaagggtagacatatgcaggtcaaaaagggtagggtcttaggtctagtaattgtaggtcccttaaggtcattaggagttggtgtctcggttgttttttttttatttttcttggaattcttttcatttttttccctttttatatatatccctatttgtgggaattctttttgcagttcattttgtagcaaaaatttcgagttgagtaagagagtttttaatttgtaaaaaaaaaaaaaaaaaaaaaaaaaaaaaaaaaatgatttg

SEQ ID NO: 27307 - DNA, 738 bp, Glycine max
  Clone ID: TF_GmC154925_1
ccacgcgcctgctccacctggtcgcgccggagaaggagaagccgccgcaggcgaagaagagagagggaacgaatgtggagtgttccggacgcaaatgccttcactgcggcgcggagaagacgccgcagtggcgaacgggaccgatgggaccgaaaactctatgcaacgcgtgcggcgtgaggttcaagtccgggaggctggtgccggaataccggccggcggcgagtccaacgttcatgtcaacgaagcattcgaattcgcatcggaaggttttggagctcaggcggcagaaggagatgcaacgacagcagcatcatcagcagttgatgagtcaaagttcaattttcggcgtatccaacggtggagatgaattctcgatccatcatcatcatcataatcatcacctccattgtgggccagactttagacacgttatttagactacctagtttttaaattttaattttaattttaatttagggtgcaggtctaagtttaaactatcgtcagcttcagcacttcttttttcttatctgaaaaattttgtcttatgaatttgaattcttagctttttttttcttctaattttctcttttttcctttatggcagaaagtcagaaaagaaaaaaaaaagggcaatagaatcatggggaagggttaaaaatagggagggagagcttcattcggctgtagaatctactcttgattgttttctctttttttatatatatatatatt

SEQ ID NO: 27308 - DNA, 375 bp, Glycine max
  unsure (1)..(375): unsure at all n locations
  Clone ID: TF_LIB3242-152-Q1-J1-A8
agctaatctcccctgcatcctccactggcgagaacgtgcagcacaacgccaccaccacttccaaggcggcctcatcagattccgagaattttgccgagtcagtgatcaaggggccaaagcaggcctctggggagcacaagaacaaaaggaagatcaaggtgactttctcatcaggtcaagagcagcagaatgcaccatcacaggcagttaggaaatgcttgcactgtgagataaccaagacaccacagtggagggcagggccaatggggccgaaaacactctgcaatgcttgtggcgtgcgctacaagtcaggccggcttttccccgaatcccgccctgcagcaagcccaacattntgcgcggccgtgcactcca

SEQ ID NO: 27309 - DNA, 1942 bp, Glycine max
  unsure (1)..(1942): unsure at all n locations
  Clone ID: TF_GmC7389_1
acgaccacacgccctctcacaaacgaaaagcacaaaaacaaaacctcttttaaaactcgaccaacacaaagttgtggttcagatccaatctcccttccttctgcacaacacggcaaacaagggcgattcaaataataaaccattccattgcactcacccaccatcaatcaccttcttctttcatatatatcatttcctcgacttttgcaagttatagtgcaatttcgctcacatgagattatactacatagcaagcactgtcataaaatatacagggttactttatataagtggactatttataaatccaatacaaggttgaaattctaggattaatattcatgttggcggtgtcacctttgaggagcacaagagatgaagggcaaggagagatgatggagagtttctcgattggaaccgatgattttgctgacctttcagaagggaacttgcttgaaagcatcaacttcgatgatctcttcatgggaatcaatgacgatgaagatgtcttgccggatctggagatggaccctgagatgcttgctgagttctccctcagtactgaggaatcagatatggcctcatcatcagtttcagtggaaaataacaacaaatctgcagataacaacaacaacaatgatgggaataatatagttactactgagacacaagatgaggttattgatatagaattcaaatattcttctgatttgccttctagtcgaggggaggagaccataaaaacgtaagtcgaagccttctcaacgctcttcccttgcatgttagattattatgcgcatgcttgcttcctatttcacatctagcaaaaattaaacggggagagaagactatatatataatttttggaactttatttgttcatgtgctatgtcgagccaagaagggtagcccttttgtgtggaatatgtgagtgcattcagggtttgatggaggtaatagtaattgaagtttatcacccgccataacattgggagccacctccaaaaatatcgatagcacaggaagcttttcctagcgcgtgaagctgaaaccgcaaggtggactctaaaggaaacaattgttggcagcagcaggtgtaggaagaggcaccactctcatgggcgccgccggctgcaccgcctcaagagccttcattttggcaccaactggttcataacgcactaatcccaggaacagcttgttttccacaacttctgacaccaacgagatttggaagtccccctgtgcccggcatcccaccccatgccatgtacaaagcagatcacgacattggcctccctggtccccttttcgacttttatccgtcaaaggagtgcatagatgcagctattggagatgttttatcaaagccttggctgcctctacctattggacttaaggctccagcgcttgatagtgtgatgagtgaattacaaagacaaggaattccaaacattccaccctctagtgcttgaaaccaacccttcatggaagaggttcttccctttcatatggtgtccattaaaggccacttaaccctaattcgacgacttctcatccattagatgttgcatgcattgcgtatatgttacatctaagctactatgtcagtgattcatatctttcttcttttgctttgccagtaaaaggaaaagaagaaaaaacttttaagccttttttctaattttcatgtgctataatgtattagttaatggtttcaagtcgtggtcattgtagccattttgtatatgtacggttgtaaaggcagttatttttaatagctgtatgagctgaggaaatcctaataaaggactttgataaaataaaaaattaacctatatacttctatttattacgttcgcacccttaaaaggaccgaaacttacccaaaaannnnnnnnnnnnnnnnnnnnnnnnnnnnnnnnnnnnnnnnnnnnnnnnn

SEQ ID NO: 27310 - DNA, 396 bp, Glycine max
  unsure (1)..(396): unsure at all n locations
  Clone ID: TF_GmC46996_2
tacggctgcgagaagacgacagaagggggtgtgtggctgtaaaacttctctagttggccctgacactgaaactctctctgtcacttcccattcccaaacgatgccgtacccgtggttaagcttaacccctaactcctccacacgcgtgaggatcgccgctagaggcagaggatccgacggcaatccgcacctttgtgggtgtatgcggtttcagtttcagtttcagtgagagtgaaagagttaaaagctgctgggaaagcttcttgaaaagatgaatgttcctggtttgacaagagaaaatgttgctagttatttgcaggttcaattttatgtgtatttaatcttgaatacttgcaatatttggtaacaaagatcgttgaatttgagccnnnnnna

SEQ ID NO: 27311 - DNA, 441 bp, Glycine max
  Clone ID: TF_9902941
gcttttcaatttttcatattaatttgtcattaattcctgcaaggttggtccagaaaaatttcatgttttagtgcttcttttttttgttggtaatattgtttttttttgggtgtaggagcaacaccaaaattggttcttcaattgatgaacatcaaaagtttaagtattgcccatgtcaagagtcatttacagatgtttaggagcaaaaaggtggatgaccgaaatcaagtatttgcggatcataacagtcttgttgaaaccggagacaaaaatatttataatcttagccaactttcaatgctccaagggtataatccgagtcaaagttcatccttcagctacacaaacaattatccaagttatggattcggggatgcttcttttggtgtctacgagaaactgctacaaagacctttcgattggtctaatgcaatttcttct

SEQ ID NO: 27312 - DNA, 732 bp, Glycine max
  Clone ID: TF_GmC12582_2
cccacgcgtccgcccacgcgtccggaaagaatgtgcattagactgttgggagctacaccaaagtcagttcttgagctcatggatgtgaaggatctcacattagctcatgtgaaaagccatttgcagatgtatcgaactgttaagaccactgacaagcctgctgcttcttcaggcctttcagatggatcaggagaagatgacatgtctccaatgggaagcagtggtggaatgcgtcaattttcagaccaaagaagcctttcggatcgaccagtgcaacaagatatggactactcttcaggcaacaacactctatggagtaactcttcaagcagtagagaaacatggcaacaaaataactctaatgacgtagatggtttcagacccccaatcttccagtcacaacaaatatcaggagggcatcaaattcaggagtgtgattcaacccaactcaagaacagtttgtcaggatcaaatttagagtgcaagaacccaagtttggagttcacattagggagaccagattggaatggcaaaggacaagcctaattttcattggttcccttattgtctctagctagtttgcttaattagtttaattacaacccccggtaacatgtgacaaacttcgtaatctttcctgaaatagagaggtgttgtactatatatatatatatatatatatatatatatatatatatatatatatgtattcaatcagaaaaattatatttt

SEQ ID NO: 27313 - DNA, 426 bp, Glycine max
  Clone ID: TF_uC-gmroLIB3259P231e09b1
gagagcttatgcagggtgatggcctaactaacgatcaagggaagagccatacacaaaaataccgtgttcatacacggacagatgctgctgcatgttctaatcacacagttgtgagttcttggaggttagtggatgtcatcaggagcatgacacagactactatctaagttagcatgtcaaggccatggtctcctcaaagacctcttcatctgactgcagggtccccgggagggacatttgctactgaaggtgacagactacaagatgatcaaaatgcaatatccgagagttatagttggtaaagccatatgaacaaaccaggaacatgtgatgtataggatactactcttcaccatgaattttgaaaataaaagattacatgggaggagttttaccactacgtaagaatactactacatgatgcat

SEQ ID NO: 27314 - DNA, 758 bp, Glycine max
  unsure (1)..(758): unsure at all n locations
  Clone ID: TF_GmC391586_1
ggaactagtctcgagttttttttttttttttttacatgattaactacgangtttacttcgtctcacacaggcattgactggagagagagaaagagacgggaggagagagaaagctagttagctaaacatggagctctaaattacatttgaagatcgctgtagggtttttagccttatcgcatcacatatctagaggtgtacgacttgtcatcgattgtgcaacgttcgtgtttctaggatcaatatttaacttatttttattttcttgtccaattatggaagaggatgagcaatagggctcgaggcatatgaaaagatttctcaaaatcctcactccccaattattcctttcttcaattagtgaattttatttcactaattgacctttaatttatccacacaacactgtttatattttcttttgtcttgctccaaaatttcaagaaaacagtagcataaagttgaaaaattaaggtacacaagaagatgggagaaagcagtggctcacaatgttccaagacaagtccttctaacattgatgaagatgacgagggtgaaagtgaggccaatgaagatcaaagtaagcaaaacaacaacggaggaagctcaagtaacagcacagtggaagagaatgagaagaagataaggccttatgttagatccaagatgccaaggcttcggtggacacctgatcttcatcttcgctttattcatgcggttcaacgacttggaggacaagagagagcaacaccaaaatt

SEQ ID NO: 27315 - DNA, 188 bp, Glycine max
  Clone ID: TF_LIB3139-043-P1-N1-G4
cccaaaaaaaaaccttacaaccaacttttgtttagttaaaaaactactccaaatgtcgtgcttaagctcatcaaagtttaaagattaactatatatcatgttaaaagccatttgcagaaatacatgacagctagatatatactctaatcatcttaactagttattgaaaaaaaaacaatttcctttta

SEQ ID NO: 27316 - DNA, 781 bp, Glycine max
  unsure (1)..(781): unsure at all n locations
  Clone ID: TF_LIB4164-049-R1-K1-H3
acccggggatcctctagagtcgacctgcagcagtgatgcctttgtcagtgctcttcactgttctatacatctgcatgaacaccccgcataaaataaaatgagaagaaaagtccacaaaggctaagattatcacattatatttctagataccccttttgtccctagcctttggttctaccttccccactactagaggcaacctagctataacgactaacaacaatactcctctctctctctctctctctctctctctctcttgttctgtctagtcagaaattaattgaaagaggaataaacaactgaacttcactcattaagctcaaagactatggagaaagagagagatatgggaatgaatagtgagtaccccacctgcaagtgactcttgacatgtgctagggttagatccttaacattcattaactctaaaacagacttcggagttgctcctgcaagtgtgagaagacaaactcaagattagacgtaatctaaatgttatatatgctttatctcaaaagaatctagcttttgcatacaataataaagaaaccatcaaactattcattacatagcgtaataattaattagaccatgttcaaccatcacaaagtttttcaaaataattacaganaagaagaaggaaaanacgatttttcttttaacaccactaagatcaataatggatggattagtaaccaaatttagtgactaatttcatcaagttttagcgacggatttaactgaatcaaacatgaactatattaaatggaattacttt

SEQ ID NO: 27317 - DNA, 862 bp, Glycine max
  unsure (1)..(862): unsure at all n locations
  Clone ID: TF_GmC38886_2
cggtccgaattccctttcgcttcacaccagaacggatctctctctctttcaaatccaatcatttcctgagagacaaaaacaaaataaaaatcgcgttcagatacactcacacacaaacacaaccaccaatccccaatctctaacttttcccgagaaaattttagtttccattttcatttctccctcagattcccggaaaatatattcacaacattaatttcgcacttcgccctctgccaactaccaagctccggcttcctctgccaattcaatccgtcgtcgttttcgccaattccgaatgcgtcgatttcgggttggagaatgagttctccgacctcttcttggatctctgttcaaaccgtcacacagtctctgcgttcggattctcttgtccaattttaactctctctccctctctctctctctctctctctcagttagtataactacgtatcaggcaaagaagttttcgccggctagcatggtgccgcataaatctcaaggtggtgtggagcagcttgcaaatgctggggttttgggaggatctgctgtaaaaattgccgctgcacctgctgggggaagtgggaagcagcgtttgaggtggacatctgatcttcatgaccgttttgtcgatgccattacacaacttggtggaccagatagntggggtatttcttttcaatattgagaattntgagtttaaagaacttcttcctctagggaattttcttttcttggaaatttattattgtcttgcanaagcatgttggaaagagaaagtaatagggggaattgtttatctcattttcaagtatatgcaatgttgtatgtaagctttacttagtttagcacatgaacgctg

SEQ ID NO: 27318 - DNA, 377 bp, Glycine max
  unsure (1)..(377): unsure at all n locations
  Clone ID: TF_LIB3092-044-Q1-K1-A2
ctgaggcattcactcatctacacctaagcattttagagagctcatgcatgtcggtggcctaggtaacgatgaattgaagagccatgtacaaaaatacctactgtatacgcagagagttcctgttgcatgaactaatcaaccatacgtgggtctcggaggtttgtagatgtatcaagatcattacaatgactcttcaaaagttagcaactaagngcacattctgctcatagatctcttaattactctgcacgatatctacaaggtacattatctactgaaagttgcagtttagaacatgatgaatatgcaattaactgtaagtatatttgggaaaatgatatgaacaaaccaagaaaagttgatgtataggatactac

SEQ ID NO: 27319 - DNA, 732 bp, Glycine max
  unsure (1)..(732): unsure at all n locations
  Clone ID: TF_LIB4391-037-R1-K1-G3
cagcggagaaacaaggcaaagcaccacaagttgacagagagagcttatatattattaccgtcaattcttataataacacttgcaaatagagcattatcaactttcacctttcataggtatagtaaagtgatcattcagggaatagaagcctgatcaggtaaaggcacaatcaatcatcaggttgattatgctgtttgattgattttaaaatgttatggactcatatatatatatatggtgcttataaagagtacttaattataagtggcttttgcaggttgaatgtacagtactcatcagcaacatcaaggaaagaacattcactcttcttcttcttcttccagaatgccaatcccttctgagaggcatatgttccttcaaacaggaaatggctctggtgattctggacttgttctctcaactgatgctaagcctagattgaaatggacacctgatcttcatgcaaggtttatagaagctgtgcaacaattaggaggagctgacagtgagtatatactatatactatatactatatactatataataaaatacacatccatttgttgatcatcaaatcttgaactgaagagcatagaactttagatctaattgactaattcanagtgcaaaatttatactgcagaggcaactccaaaaacggtaatgaaactcatggggattccagggcttaccttgtatcatcttgaagagccatctccaggtaaaaatca

SEQ ID NO: 27320 - DNA, 545 bp, Glycine max
  Clone ID: TF_jC-gmro02910037d06a1
ggctcgaggcttgggggagcaagctgagctgcaccaaatgcgatcatgccgaccatgaatgtaatgggcttgactatggttgatttgacgagtcatcttgctaaatacaggcttggtaagcaatcatggaaggatgcagtggaaggatgcaaagatgggatgatggcaaatcctatgtgtggatcaaatatgttctcatccctgacacctgaatacacgctgcgtccgatgcgatctgcggtggctttcactacccccttgaccacagagcgaggggtccacttggaattgtaatatgtatgaaggatgaaccaagtaccatggtcatattataccaactatggtgagtacgttgagacatactgatgaggaactgcctgtgcagaattacaattagatgaatggttaatggacatatgtgcaactagggagcagattgtcctcattgtggaactttggattaccaagtgaattgatgattaacatattaactactctttgaatgtgaacactgataaccgtttcttttttcttggcggaatact

SEQ ID NO: 27321 - DNA, 574 bp, Glycine max
  unsure (1)..(574): unsure at all n locations
  Clone ID: TF_GmC59217_2
ggtataagagaaacaagacaagcacaacaagcattctgaaattctcttatttgttagtatcaggactagtaacaattaaccttgaaaataaagcttcatctagttttatcttccataggtagaaaagtgatcaagagaatacacaagtcaccaggtgggaatgtaccatcatcaccaacaccaaggaaaaaacattcattcttcttccagaatgccaatcccctctgagaggcacatgttccttcaaacaggaaatggatctggtgattctggacttgtgctttcaactgatgctaagcctagattaaaatggacaccagatcttcatgccaggtttatagaagcagtcaaccagttagggggagctgacaaggcaactccaaaaacagtaatgaaactcatgggaattccagggcttaccttatatcatctaaagagccatcttcagaagtatagattgagcaagaatctgcatggacaaaacaacaacgtaacatacaaaaatcantaagnagaccaacccttttttcatttggtcttgaactaactaataaaaccagaaaagcttgtttct

SEQ ID NO: 27322 - DNA, 522 bp, Glycine max
  Clone ID: TF_GmC200_2
aatccgaggaaacaaaggcgatgctggtcaccagatcttcatcggcgatttgttgatgcgcttcaacaattagggggcccacaagtggccactccaaagcagattagagaactgatgcaggtggtaggcctcacaaatgatgaagtgaaaagccatttgcaaaagtacaggcttcattttaaaagacctcaaggttcttcaattggccatgctaacagtggcttatgcaagatggcacaagataaatgtggagacgataaatctggctctccacaaggtccactcttcctaggagggtctggaaaaggtctttcaagctctggacgcaatagcatggacacagaaggagatgaggaatcagattgccgcaattggaaaggtgggattcatcaccaattgcaaccagaaagtgacgttttgtgagcttttacagttttcagatacatgagaattaaacatatataatgaatattcaaaatttggagaaattatttggtaatttaaaattattactttttcatt

SEQ ID NO: 27323 - DNA, 649 bp, Glycine max
  unsure (1)..(649): unsure at all n locations
  Clone ID: TF_LIB4392-010-Q1-K1-A2
cagataatcaaacacgatgacaaagaatgtttggatccatcatccaccaagaaagctagagtagtctggtctgtggatcttcatcagaagtttgttaaagcggtgaatcagattggatttgataaagtggggccgaagaaaatactagatctgatgaatgtcccatggctgactagagagaacgttgctagccacttgcagaaatacaggctttatttgagtaggattcagaaagaaaacgatcagagatcttcctcaagtggattgaagcattcagattttcctttaaaagatatgagaagttttggttttcagaactcagtaaacaaccagcaacaaaacgatgttgccattgacagctacaatcattcggatggatcattactacttcagaatgtggaaactaaaagtcacgaagcggatcccaagggaattgtttcacagtccaccatagcgaaaaaaggaaggattttgactggtaacattgctgacacaaatatgagagagagtttaagggttggccttaatcaaacttttgcccctctggagtcagaagaaaaccatgcagtatttgattgttccatgccaacaccatacacttggacttgagntccacacantgcactcanagaagaacacaagtcaattg

SEQ ID NO: 27324 - DNA, 534 bp, Glycine max
  Clone ID: TF_jC-gmst02400044h05a1
ggctcgagatttttttccttttcttttctttctctctcaaatttctttcccttctgttcactcaaaagagcagaaagagacaagatcccggaaaggcgtgccggcgtcagagactcatcagttctcactcgtacggcgttgtgctttgctttctcaccttcttcttcatttctttcatcatcatcatcatcacaatataaagttcgctcctttctcagttttcacccatacccagatgggtaacagcaccatctcggatctgtgtccctcctttaagtgaaaaaggttcaatctttggtctctgaggctgttgggttttcgtcattgaagaagaagaagggtattattatcatgtactcgaggctcatacacccccacgatgggattgtgacgcaggatgacttgcagggtgctgcttccaatctctctcacgctcacaagggagatccttgtctcgttctgacggctgatcccaagcctcgtcttcgttggactcaggacttgcatgaacggttcgttgatgccgtaacgcag

SEQ ID NO: 27325 - DNA, 810 bp, Glycine max
  Clone ID: TF_GmC13720_2
ggctggtgtggaccccgcagcttcacaagaggttcgtggacgtggtggcgcacctcgggatcaagaacgcggtgccgaagacgattatgcaattgatgaacgtggaagggttgacccgcgagaatgtcgcgagccatctccagaagtatcgtctctacctgaaacggatgcagggcctttcgaacgagggcccttcttcttcggatcagttattcgcttccacagctgtgcctcagagtttgcatgactctgctcctcccagtgcccatagcaatggccatggtcatctccctgttcccatgatgtccatgccatatccccctcccatgatgtccatgccatacccccctcccatgatgtccggcatgccccatgcccatggccacatgggcatccccatgcctaattcctccgccacctcagcttaccatccttataacatgttgcatcaaagggattggcctcaccttgctcctaatgataaatgaacctccaagattcaaaggcttgattattggtggtgtgtaattcacaccctgtaattcacattgatgattaccttgtaattcacacaaatggattattgaggaagtatatgaacaatactatatggagctagattacaatctgaatcagtagtgtgtaaccctgtgggagatttacaaacatattggtacacatctctaattcctgtcacctaattgtatgacgagaattctggcttatttcttctggtctgcctagacagctgattctaaagttaattcttaactagttctctgattcataaaaaaaaaaaaaaagggcggc

SEQ ID NO: 27326 - DNA, 1780 bp, Glycine max
  Clone ID: TF_GmC345_1
gacaatgaggacccatcaactcagaagaagcctcgagttgtttggtctgtggagctgcaccgcaagtttgtttctgctgtcaatctattaggcattgacaaggctgtacctaaaaagattcttgacttgatgaatgatgaaaagcttacaagggagaatgtggccagccacctccagaaatatagactttatctgaaaagaattagctgtggggcaaaccgacaggctaatatggtggcagccttaggtactgcagattcatcttatttgagaatgggttctctgagtggcgttggacatttgcagacattgactggtccacaacagtttcataacaatgctttcagaccctttccacctggtggaatgattggtagattgaacacttctgttggtctgaataatcatgggttgtcttcttcagaagctcttcagttgagtcatgcacaaaatttaaacaactccataaatgatccacttaagttccaatcatccatagcttgtggtaatcaaaatgctatccagggaatgccaatgtctataggccttgatcaattgcaacataataagggtgttagtgttagtgttggtcctattcaaaacatgtcccctcttattgatgccagaccaacttttgctgtgtcaaatagactctcagatcaaataccaaaagtaacaatgggttgctcaccctctccggtcttggacgtctcaaacaatgccttggtattgaaagcagatagtgaaaacacacaagggagaggagtatatgagaatttaacttcagtagcatctcagcattcacaattttcgcttcctttgctgggtcatggtaggtgtagtgatatttggtcaagtcctatgcggtcatctgggacaaattcttaccctccaagtgaaactttgcaaggggggaatctgagtggtgcttcatcaattacttcactgtctaatcaatcccatgattcacagacggatatgcactctcaaggactcatttttacaaataattcaggacaaattagcaataatgtgccatttctcgggtgggatgaccataatcatgatagtagttaccattcaaatgttattggtaactcaatagactctctgattgatccagaaggtcatacttctattaactcaacctacaacagaaacttggacttcaatttctgtgatcccttacaaatgaagcatgatggaattatgggattgagtgacgaaaactcattgaaacaacaacacaggtacatcatgaaccagcagaagtctcaaaacagtcgcgcccctaataatattggttcattggaagactttgtcagttcgatgatgaaacagaaacaagacaaggtgaaattcttggacggatcatatttatgcaacaataattaccctgacggaacatccatgtgatatgaactttggcagtatatttgcgcatcatgtcatgctttgttgatgaattttgtagcgtgacaagtcttggtttaccactcttcccagttttgtcttcttggtggtattttctaggtctagggtattattattactttcagcaagggctttctcaatttgtgaaaatgcgttgttttatggatggggccctctagtgcattatggagttaaccatgtttagttttgtgcagacatgcttttctagcaatttgttagtggtccataagcaagaataaaataattttagtggcaataaactcggggtcttccctttatgaatgcaaataatggccgacgaaatagcattcatgtttttttacac

SEQ ID NO: 27327 - DNA, 340 bp, Glycine max
  Clone ID: TF_LIB3109-005-Q1-K1-H1
gccttccattgtgctttatacctgaggaggtaaccagagccgttcacacccccctctctgttcttcaaaacgcaccttattcttccccctattttgcatcgcatttgttcttgaatctctttggtattcctcctcagagcctctaatcagagagagagagagagagaaagtgagagatggagagaatgttccctcccaagaagccctctactatgaattcccatgacagacccatgtgtgttcaaggagactcgggtcttgtcctcaccactgaccctaaacctcgccttcgttggactgttgagctccatgaacgctttgttgatgcctgtactcagct

SEQ ID NO: 27328 - DNA, 2398 bp, Glycine max
  Clone ID: TF_GmC12007_1
aacttattaccattggggaatgtacatggtacctggtactgcaacaggatcatcaccaatccaatcaccgatagtgagcttcacgcgccaccttggcgcgtagggttgccaagctgctattcctccaaccaaaaggagccaaagccaaagcccattcgttcgtcaccgttctgttcactctcgcgagcacccacccaacattattcgcgtctggccggtgatatggtaccaagcaccgcaacaggactacatccaatcctttcaccgattgtgaacaccttttcgcaccttggcgcctagtgattgcccgctacttctactccatccaaccagagacaggccacgcttccggccttacccattccctgccaggctttctggattgccctgcaggcgcccctagtggtaaaaatctggtaaacattagcgccaggctagtgaagatagttcaaaagcctcctagcgtccatggacagaggagtaagccatatggtctactgaatcagcattgaactgacaagacgatactgatacacattcgagtcatttaacttcaagcggagcagttgggcatatgttttcatcttctcctggatattcaactgatcttcatcactcatccttttcatctcatgaaaaacaacctagaaatactcattttatttcacagtcattaagtaacatggcttcattgccattatcttattcttcaaatagtgaaccgataccttctacaacatcaaccccttattccaatggaaacagtgtttcctggcatacagattccttgcctagctttctcgatttccctgccaatacctccattggtaatagtcaagtagaaagcagtgactgcaatatcatggcaactgaagagtattctaagcgaaatgattggcaggagtgggctgaccaattaatcagtgatgttgatcctttgacttctaattggaatgatcttcttgctgacaacattcaagatcttgaaccaaaggtcgcaaaatcatcttctcaacttccaataggacaccaatctcaaagccatcaacaacttcctgcttcatctggagaaaatcgtgttggtgttgccccaacttcctcaacaaattctgcacctgccaagccacggatgcgctggacacctgagcttcatgaggcatttgtggaggctgtcaaccaacttggtgggagtgaaagagctacccctaaaggtgtgctgaagctcatgaaagttgatggattaactatataccatgttaaaagccacctacagaaatacaggacagctagatatagacctgagtcatctgaaggagctatggagaaaaaaccaagtcccattgaagagatgtcatctctagatttgaaaactaggtattgagatcactgaagctctacgactacaaatggaggttcagaagcggttgcatgaacagcttgagagtcaatctggagtgtcttcgacccacgcgtaagaccacgcgtccgcccacgcgtccgaaaccatcaaggtggaccactgcaagtcaggagctgatctggctaatggcagtaccacagttgaggaaagctcattggaagtgggtgagaagcaggatgctcctgaaattcaagcttccgacaatcctgagcaacatgctagtgaagatagtgctaatgcctcaaagcgtccaaggacagaggagtaagccatatgatctactgaatcagcattgaactgacaagacgataccaattcatttaagatttctatttagtaaggaagacttggtagatccataacttgagtttcccctaacctgttgtgatcaatgaggacttgcatatgtatgtcattgtgttacaaaaatgatgagtcaatttttggaccatgaggttcttcgaacttcttatttagcatccttgttaggatgagattctagtgtacagtacagataatgactacatctcaaatcataagtgaggaatgaattaggacagtatctttccaaatactaccacccaaaattctatgttagtacgtacatctcaatatgaattgtttattttaactgtaccggaataataaaaagaagggcacaattctagttctcaagttcgtttttaacaaaaaaaactatttgcaggtagcctaggaatgtcagcatcgcctcagttattatttggccgtttgttttccttggaagagaattcgttgttaaaaatagtatcactgtaagccattactaaacttgtgcacactatctatccttagaatgcggaacccccttcctgagctctatactttatgccccagaaaaagaaaataaaaaacaatgagtcaagtcaacgagcttgtagctcaacttgatgaaaaaaaaaaaaaaaaaaaaaaaaaaaaaaaaaactcgaggggggg

SEQ ID NO: 27329 - DNA, 898 bp, Glycine max
  Clone ID: TF_GmC60412_1
tacggctgcgagaagacgacagaagggggtacgtcacaattgtgaagcacagaaaaatgaaaaattctgagagaagcagtgtaagaaagtacaacaaatctgaacttccacgcctgcggtggacacctgaacttcatcaacactttgttgaagctattcaaagtctaggtggatcacacaaggcaactccaaagcgaattttgcagcagatgcgtgtgaaaggactgaggatcgctcacatcaaaagccatcttcagatgtacagaaacatgaaaggacatgccattgttgcaccagtggatcagttgctggaaggaaaggcaaaagatttcaaaatatgctccaatatttgtccaaccgaaaggaatctcaagcgggaacttcatttgttagactacaaagatgggctttcacaaaccagtgaggaaactgattatgatctaaaccaggaaccacagtcaagtgcagtactcttgcttagtgatgatgtgtcaaatgaagaagaaaattttgctgatctatcattgatctcctttagcatgcctctaatttccatgatgcaaagtgagaataacaaagagataatgcgttttttgtcatcgactgcagctgcagctgctaatcattccgtcgttgattccagtttttttacgccgtcttttgcaaacaattacataaacttagatctaacaatctgaatatgtttattaattagtaattctttttatttacttacacgtgcgcaacactataattacatgttaactttttaggcaaagacttataattattagttagctaattattgtattctttattacagtgttaggcttgttagcagtaataaatggttctctttcttttttcgaaaaaaaaaaaaaaaaaaaaaaaaaccaaa

SEQ ID NO: 27330 - DNA, 1008 bp, Glycine max
  Clone ID: TF_GmC247294_1
cccacgcgtccgcgaacatctctccaccaccaccaccacctaactacctcctcctccctccaccactctcaatcaaaattccccttccaaaacaaatccaatcaattcaaatcaaatccctgtctcctccttaaaccgttaaataaaacaacaatactaaacaccgtttcaattgaacaaaaaatgagggaagaggattccaattggttttcgcgatgggaagaggagtttccgtctccagaagaactcatgcctctatcgcaaaccctaattactcccgatctagccatggccttcgacatccgaaaccctcacaccaccaacaccgctcagcaacaacaccaccaccaccaacaacaaccacaacaacaacaacaaccttcgaacccttcctcgctccccaacccgctacagcaacaacaacaacaacaacaacctacctccgccgagttcgccgactccggcgaactcggctctggcaccgccggcgaggagccggcgcgtaccctaaaacggccccgcctcgtgtggaccccacagctccacaagcgcttcgttgacgccgtcgcgcacctcggcatcaaaaacgccgttcccaagaccataatgcagctcatgagcgtcgatggtttgacccgcgaaaacgtcgctagtcacttgcagaagtaccgtctctacctgaaacgcatgcaggggatttccgccgccggacccggtggtccaggcggcggcgcctccggcgccgtggccgaccccgccaccgaccacttgttcgccagctccccggttccggcgcatttcttgcacccggccgcgaggccgaattcggatcacttcctgccgttcgtgccggcgctccacccccatcagcagcagcagcagatggcggcggcggcgcagtaccaccggcaggtgaggcatttcgggtccccgccgaacgggcacttcgagaacccgttcatgtctaggccgcatcttcagagactgggaggtggtggtggtggaggt

SEQ ID NO: 27331 - DNA, 1050 bp, Glycine max
  Clone ID: TF_GmC27103_2
gactgggggctgctgcatccaaagaagagaaggaagagagtgttatgaatagactttctcttctgacaccttcttctgtgaaagaggggtgtggttcaaggggatcaaggagcagttccaacagggctgtttcttcttcttctcctcccatggttcagccgagtttgcgtgcgacttcacttcagcagactgctaggaaacagaggagatgctggtcccctgagttgcacagacgatttgttaatgccttgcagaagcttggaggttctcaagtagcaacaccaaagcaaattagagagcttatgcaagttgatggcctgactaacgatgaagtgaagagccatttacaaaaatatcgtcttcatacgcggagagttccagctgcaagttctaaccagccagttgtggttcttggaggtttgtggatgtctcaagatcagtacaatgactcttcaaaagttagcagttcagggtcaggttctcctcagagtcctcttcatttggctgcagggtcccggggaggaacatccccaactgaaggtgacagcatggaagatgatgaagatgcaagatccgagagttttagttggaaaagtcatatgcacaaagcaggaaaagttgatgtataggatactactctccaccatgaattttgcagataaaagtatacatgggaggagttttaccactacataataatactacatgatgatgatacataaaaaaagagggtcaacgataagaggctgttggagtttttattgaaggtttagctttgccttctatactgcgtgagttttgatatgagactccgaattaaaattatccttttccacatcataaaattctttcatttctttttgtcatgggaactctctgatgccccctgaagaaattaattagtcccatatttagatgggtctcatctctgcatgtttgggtggacattggctgttctaattgctggtggtggatggattatttcttctcatacttttatttacacgaattttagagatatcttttcgtaattattcctcctttcctcgt

SEQ ID NO: 27332 - DNA, 2796 bp, Glycine max
  unsure (1)..(2796): unsure at all n locations
  Clone ID: TF_GmC1389_1
agggagctatagctaaagccttgcacaacctcctctttcctcttcaattaaaacgcatcctattcatccctcatagcatcgaatttgttcttgaagttcttggtattcttcctagcttcttctcatcttgagagagagaaagtgagagatggagagaatgttccctcccaagaagccctctactatgaattcccatgacagacccatgtgtgttcaaggagactcgggtcttgtcctcaccactgaccctaaacctcgcctccgttggactgttgagctccatgaacgctttgttgatgctgttactcagcttggagggcctgataaggccactcctaaaaccatcatgagggttatgggagtgaagggtctcaccctttaccacctcaagagccaccttcagaaattcaggcttggcaagcagccccacaaggatttcaatgatcactcgattaaggatggcatgagagcttcggctttagaactgcagcgaaacactggctcctcttctgccatgattggccgcaacatgaatgagatgcaaatagaggtgcagagaagattgcatgaacaacttgaggttcaaaaacaccttcagctaaggattgaggctcaaggaaaatacatgcaaagcatattggagaaggcttatcacacacttgctggtgaaaacatggcatctgcagcaactaacttaaagagtgctattgtacctcatcatcaaggaatccctgacatgggagtagtgatgaaggagtttggttcccctcttggtttttcttcattccaagaccttgagaacatttatggaggtaaccaaattgaccttcagcagaacatggagaagccatcccttgatcatggtttcatgccaatcaatgagagcttgtgtttggggaagaagaggtccaataacccttatagtgggagtggtaagaaccctttgatttggagtgatgatctaaggcttcaagatttgggagggccagcatcatcatgccttggccctcaagatgaccctttcaaaggtgaccagattcagattgcaccaccaggatcattggatagaggagctagcactgacattgatcccatgtcagagatctatgactcaaaacctgtgcttcagagtgaagagaaaaagtttgatgcatcatctatgaagcttgaaaggccttcaccaagaagagcacctcttcagcctgaaaggatgagccctatgatcagcactggtaccatggcacaaggtagaggctcaccatttgggtgaatatcatagtttttaattaattagatcatttggctatgttatgtgtaattgatgacttgatcatgtgaaactctcttaatagtagtaccatatctagggtttttgaatttggtcttggaaattagcagttcttacgagggttatttcccccctcgtcaagtactgttatgtggtataatgcctttacatggcaaattaaaccaaagtcttaattctgacaaatataattaaagcgtattattgtgcttgaatgtgagcattctcacttgtagcttttaaacatgagggtataagggctcctctaagtgctcggcaggattttatgaagccattttcttgtaatattcctcccctgcatgcctatccatcatttcctccagaacccaagggattatgatcaccaccaccgccgcctctacaaccacctatgccatcgccacaacactccacaccaagtccctttgcaagatacatttctttaccactaccaacctcttcctggtcaccaaaactcaccctacaaactccattcttcactctcacctcttcactgaatatcacatcctttccaccattcaccacactgaacccatcttcactctcactttccatttcttcatcttcctcttcttcactcaagccattgtgcttagcagtagagtaagaaggaattgtctccagcaccaagctcctgtgtctagctgaaaacctcttggaagggtctaaatactccaacctttcttcattgttgcaagaaaagtaggccaagtcttgcaagttcccatcagattggactcttctaaagcctttgttttgcctttcaagctcaccaattgagggagagattggagaagaaccacatgcaaaggaccgggtttggtggcaagtaagtttgtgataaggttgtgggacactggttggtggaaagtgtttaagtgcatgacaggtttctgagtgaatattgttgttaggactatctgggaaggatgagaggagggatccaagaactggtgttgaagagcttcttagcatcatgttttctgattcaagataacttctgtgtggctgtcccttgttttctgattataaatcaccttttttaatgctgaagagttcttgatgaccctataaatataatcctatgtaatttcagatgatcattggaagggagagaattttctagcagtcggcctgagaaaatagaacaaactgtaaattacttacttcaggaaaataaagctagaaaaagagaaaggcatatttggtttttgaaacagaaaacaaattgatatggctacaaggaaaagtaatgatgctgattgctgattgctgattgctgattgctgattgctgagtagaatcagtaaatttaacacaaaagaaatgtttggggttggtaaaggaagacagagaagaaaagaacaatacccttttgtgatgctgaagagttcttgatgaccntaccaatcctatgtaatttcagatgatcattggaagggagacttttgtagcagcccacgcgtccg

SEQ ID NO: 27333 - DNA, 1157 bp, Glycine max
  Clone ID: TF_GmC6799_2
cggacgcgtgggcttctctctctttctatcattcattccttcaatccttccccactttttttactccaaaatcaaggaatgacataaacagaataattaatctccttaccactgcaactcacaaaacaaaagaataaaaagaagacccttttgtcatcataacaactctttgttacattacactgtaacacacgccaacatgggtttggtggttcctgaagaagaactaagcttagatttgagaccctcttttgttccaaaaaccatcactgattttctctgccacctttccaccaccccaaatgcatcccacaaggtgtccttgctcgatgactttgtccacagattggaactcgaattggccaagatccaagcattcaaacgcgaacttcctctctgcatgttcctcttaaatgatgcaatttcagctttgaaggtggaatcagaaaaatgcagggcttgcaagtctgagccagtgtttgaggagttcattcctctgaagaaagagtgtgatcagaggaaggaaattgagaaggagaaggaatgcagggacaagaagaattggatgagttcttttcagctttggaacaatgatgataaagctgataataataacaatgcatatgaatgtgacaaaaaacacaactatagagttgaaaacaagaataatggagaaaaaagaaaatctgtgctcgagccgttgttccaatatggtagaattagaaatggagagaaggggtttgttattcctttttcctcttaccctgcaacaaaggaagaaaaggaagattgtgttgccaatggactttctcttcagacacctggaactgcagtgaaaagcactagggagggatctggttgtagaaccagctcttgcagggtgggttcctccgctccttcaccgctgcatcagccacaaagcagccggaaacaaaggcggtgctggtcaccggagttgcatagccggtttattaaggctttagaggtgcttggaggttctcaagctactccaaagcaaattagggaactcatgagggtagatggcctgaccaatgatgaaaaataccggcttcatacacagcgagttccagttgctacaagctgcaaatttagtcggtctgctgtagatctggaggcttgtggatgcacaatgaatc

SEQ ID NO: 27334 - DNA, 1812 bp, Glycine max
  Clone ID: TF_GmC38886_1
cggatgtgtgggcggacgcgtgggcggacgcgtgggcggacgcgtgggaacaaaaacaaaaaaaaaacgcgtttcgcgttcagacacactcacaattcacacaccaacaccaccaatccccaatctctaacttttcccgagaaaattataatttccattctcttttctccctcagattcccggaaaatatagtattcacaacgttatattttggcaccgccaagctccaattcaatccgtcgtcgttttcgcgaattccgaatgcgtcgacttcgggttggagaatgagttctccgtgctcttcttgtggctgtttgttggcgttcttggatctctcttcaaaccctccacagtctcctgtccaattttaactctcttagtcagtttaactatgtatcacacaaagaaattttcaccggctagcatggtgccgcataaatctcaaggtggtgctgaacagcttgcaaatgctggggttttgggtggatcggctgtaaaaactgctgcaccttctgggggaagtgggaagcaacgtttaaggtggacatctgatcttcatgaccgttttgtggatgccattacacaacttggtggaccagatagagcaacaccaaaaggtgttcttagagtgatgggtgttcctggactgaccatttatcatgttaaaagtcatttacagaaatatcgccttgcaaaatacttgcctgaatcaccagctgatgaccctaaagatgagaagaggatgtctggggacagcatttctggtgcagattcttcctcgggaatgccaatcaatgatgccctaagaatgcagatggaggttcaaaaacgtctgcatgagcagcttgaggttcaaaagcaattacaaatgagaattgaagcacagggtaaatacttgcaaaagatcatagaggaacagcagaaattaggtagtaccttgacaacctcggaaaccctccctttgtcccatgataagcaaaatcatcctcagtcagaggcttctggatctagtgatgcccttgcaagcactgtgtctccacttaaaaaacagagaatcgatgatggttccaaggaaggcttcactgcttcccaagtaagaaaagaatgactgcaatgttggtcagttggatccaaacttgtatgatgatgctgggtttgaatttgatttggagacaaaaaaggatgaagataatgagagtggacagtaagaactaggttccatttgtaggtcaatgtgtctcattgtaatgtgtagtgtatttttctggaagaaaatacaaatcatgctttgtaaattatatttcacgcaatccatttgtacatattaatgtagatatagatgcattcttctctcccggtttgaaagtcataaacactgcactccacccaacagaaatgctttgacatgcattacacgtgtggtcatggatgaatgttgggtgcaagattcttgtcgatgttcaggttgctatggtcttggccaatatcaaaggtatcaattagctgatgaccacattgtttgatccttgtagccaacctaatcatgggagaatggacttggttctttttgttggagatagtaatgaccagcttcccttgatattaatcatttaatttaattatgtattttcttcgaggttaatgttgtttggcatatttagactcatgaatgtgatgctatctaacctatgagtaaatgagtaatactatatcttctttctccgtaaagtatgaaaatattcaaccaaaaaaaaaaacaaaactgtactactggatgtattgtgatttgtgagtgtaagaattcttatattg

SEQ ID NO: 27335 - DNA, 334 bp, Glycine max
  unsure (1)..(334): unsure at all n locations
  Clone ID: TF_GmC161288_1
caagaacgccgtgcccaagaccataatgcagctcatgagcgtcgacggcttgacccgcgaaaacgtcgcgagtcacctgcagaagtaccgcctctacttgaagcgcatgcagggtttgtcggccggtggcggagttggtagggtcgcctccgccgaactcaccaacgaacggctcttccccagtcggccgtggcgccgccttactgcagcggcgggatctgaccattattgccagtttgtccattccggctcgcacatcaccaaaagaggcaacagcaccacatttggcagggcatgacagtgtaattggcacngccaattggttncgcagang

SEQ ID NO: 27336 - DNA, 2886 bp, Glycine max
  unsure (1)..(2886): unsure at all n locations
  Clone ID: TF_GmC594_1
gaattcgagctctgtacccggggatcctctagagtcgacctgcagttaatcaactgggcctagatagtgagtttctgaaagaaaaaattttacgtttccaagttgtttgacttggtaccgtataatttcatacctcaaaatgagtactataattcctaatgtcaggtttattcaccttttattgcagaggctgttcccaagaaaatacttgacctaatgaatgttgaagggcttacaagggaaaatgtggcaagccatctacaggtataaaatcttggttttgtagttatcataattgttctatgcagtctttgacaaatcaaggaatgaaaatcttttagattggatgattccttaaattttttgtgatggaaatattaggaaaagatagtttgtagcgaaaattaataactctgagaactttatagcacatagtataagtattttagatatttctttttcttgtaataatatgtttcgataaaatatggatagataaaattaaaaaaagggcttgttactaatgggacatttaagacttctaacccaagtgtttgctaggtgatgngttgtgcacctgttcctgttcatttaatgcggcaaagtatatttttcattactggctcgaggttctacatttttttttcttctccctttatctcttgccctttttgttgttggtgaaagagtgccctagagaacaaagttcccgttttcaaaattgaagcttttgggtctctgaggtttgatctctgcacaagaaccttgttttctcatctgggtgtgttgcttttgcctctgctggctcgatatggctgtggaaaaccaaagggaagatgggggttgtgatcgttttcctgtgggtatgcgtgttcttgctgtggatgacgacccaatttgcctcaaggtgttggagaatctccttcgcaaatgccagtatcatgttactacaactaatcaggcagttgaggcactgacaatgttgagggaaaacagaaataagtttgacctcgttatcagcgatgtgaatatgcctgacattgatggatttaagctccttgagttggtgggacttgaaatggacctacctgtcatcatgttgtcagcacacggtgatacaaagctggtgatgaagggtgttacacatggtgcatgtgactatttgctgaaacctgttcgaattgaagagttgaagaacatatggcaacatgtggttcgaagaaagaattttgatagcagggatcagaacaaggcttccaatgaggagaaggctcctaattttgctgggggaggtagtcaaggcctaagatcagaaaacagtgctgaccagaataaaaggcttggtaaaaaaaggaaggaccaaagtgatgaagaagaagaaggtggggaagagaatgaagatgatgaggacccctcagcacagaagaaagctcgtgtggtttggtctgttgagctgcatagaaaatttgttgctgcagttaatcaactgggcctagataaggctgttcctaagaaaatacttgacctgatgaatgttgaagggcttacaagggaaaatgttgcaagccatctacagaaatatagactctatctgaaaaaggcagcccagcaagctaacatggttgctgcattgggtggtagtgattcttacctacgtatgggttcaatagatggatatggagatttttgcacctcgtctgggtctggaaggatcacaaacactactttaccatcatatgcatctacgggaattttcagtaggctgaattctccagctgccttgaacatgagagcaattagttcttctgcgcttatccggcctgttcagtctcaaaacatcaactgctccttaaacacacttggaaacattcagccatctatttttcctgcaaatcatcaagtccccggtattacatggaattccaacatcaatttagcttaaccaataaacgcatggcccaggagcgtttagcaatcagtcttctgtcagagcggcttctttgtgtgctgaatctacgtgggcttatgtggttcttctaatttggatcataatcgatgataactggaatgcgctcaattgtctaaatttcctccaattccttgccactttgtgaggctttcagcaatgaccaactcactagcatcaatgattcgaactcaagtactcatattggcaacaacagtccagttgatttttcttctaagcaaaacatgagctgtccctttaattctgtaaattcacgcttcctcaagatggggcatgttttaattcagcaatagagttgatgcatcatctttggttggccaactaaatggagcatccccatcaatcagccggtgcactgaagttgagaaattctcttcagacattcgactgaagccaaatgaagcctacattttggagcaaatgaagtcccaagatggatttatgcagaatacttttgggaccttggatgacataatgggtgtaatggtcaaaagggagcaaaatgagtcgacattgttggatggagaaatgggatttgatgcctaccctgttggatcatgcaactgatttcttcttaaccagaacgaatccaggagcaataaaatcgtgaaacttgctccagtctctgaaaccgattaatgtacacctatttttatgttctgctactaaatttattttcttggccaacattttgttgtttcacttatggacttttgttagccatctgatctgttccatcttttttttttttcaatctgtagtgtatccccataaaaattgtctttggtttagataaaataattgtaatatgaatgtttcttggtgctcaaaaaaccaatttttaaaaatttaaaaaaaccccccttacccgggaattaaccatgggggggggggttggt

SEQ ID NO: 27337 - DNA, 1658 bp, Glycine max
  Clone ID: TF_GmC381_3
tttctttctctctcaaatttctttcccttctgttcactcaaaagagcagaaagagacaagatcccggaaaggcgtgccggcgtcagagactcatcagttctcactcgtacggcgttgtgctttgctttctcaccttcttcttcatttctttcatcatcatcatcatcacaatataaagttcgctcctttctcagttttcacccatacccagatgggtaacagcaccatctcggatctgtgtccctcctttaagtgaaaaaggttcaatctttggtctctgaggctgttgggttttcgtcattgaagaagaagaagggtattattatcatgtactcgaggctcatacacccccacgatgggattgtgacgcaggatgacttgcagggtgctgcttccaatctctctcacgctcacaagggagatccttgtctcgttctgacggctgatcccaagcctcgtcttcgttggactcaggacttgcatgaacggttcgttgatgcggtaacgcagcttgggggagcaagtaaagctacaccaaaagcaatcatgcggaccatgaatgtcaagggtttgactctgtttcatttgaagagtcatcttcagaaatacaggcttggtaagcaatctgggaaggatgtgggtgaaggatgcaaagatggttcatatcttttagaaagccctggcgctgataactcatctccaaagttgccaacttcagatacaaatgagtaagaatttgcattaattcataaaaaaatatttttttcttctggctgatgtctcaatggatttgaattaccaaattgagtgagtgattaattttatgcctaggggttatgaaatcaaggaggcattgagagcacagatggaagtgcaaagtaaattacatttgcaagtggaggcagagaagcacttgcagattcgccaggatgcagaaaggagatacatggccatgctcgaaagagcttgcaagatgctggctgatcaatttattggtgccacagtcatagacacagacagccaaaagtttcaaggaattggaagcaaagcacctagaggtaccttggttgatcctcttggtttttactccatgccatccactgaggtggctggagtgaatgtcccagaagaagaaataccgctgagtctcccaccccaaagggctgattgttcaaccgaaagttgtttaacctcacatgagagttctggaggattggctttagaaggatctcctggcgagggaaaaaggaggatgcttggcatggactcgatggcagcacctttgatatggagtgaagctaagatgagaactcaagccatcaatgtagcccaaggtaatcttcctcaaggaataactaggtatggcatgtagggatggaaggtctacttgatggtttatcccggcatgatatataaacctttgggctttcattcattccctttttttataggtacttgaactcttcatgtcttgtaagttagtgagacataggtggaatcaattttacccctttgtaaattcaatctactctgtgactttaaaaattgcaaaaaactagctttgactatacaaaaattgtgtgctttggtgacttctatggattccttattgctcattgcatcatgctgaataaagaagatggagagtcattagtaaa

SEQ ID NO: 27338 - DNA, 966 bp, Glycine max
  Clone ID: TF_GmC381_5
cccacgcgttcggttcactcaaaagagcttaaagagacaagatcccggaaaggcgtgccggcgtcagagactcatcagttctcactcgtacggcgttgtgctttgctttctcaccttcttcttcatttctttcatcatcatcatcatcacaatataaaggtcgctcctttctcagttttcacccatacccagatgggtaacagcaccatctcggatctgtgtccctcctctaagtgaaaagaaaggagcgaactttatattgtgatgatgatgatgatgaaagaagggtattattatcatgtactcgaggctcatacacccccacgatgggattgtgacgcaggatgacttgcagggtgctgcttccaatctctctcacgctcacaagggagatccttgtctcgttctgacggctgatcccaagcctcgtcttcgttggactcaggacttgcatgaacggttcgttgatgcggtaacgcagcttgggggagcaagtaaagctacaccaaaagcaatcatgcggaccatgaatgtcaagggtttgactctgtttcatttgaagagtcatcttcagaaatacaggcttggtaagcaatctgggaaggatgtgggtgaaggatgcaaagatggttcatatcttttagaaagccctggcgctgataactcatctccaaagttgccaacttcagatacaaatgagggttatgaaatcaaggaggcattgagagcacagatggaagtgcaaagtaaattacatttgcaagtggaggcagagaagcacttgcagattcgccaggatgcagaaaggagatacatggccatgctcgaaagagcttgcaagatgctggctgatcaatttattggtgccacagtcatagacacagacagccaaaagtttcaaggaattggaagcaaagcacctagaggtaccttggttgatccctcttgggttttactccatgccat

SEQ ID NO: 27339 - DNA, 794 bp, Glycine max
  Clone ID: TF_LIB4164-003-Q1-K1-D8
cggtccggattcccgggtcgacccacgcgtccgacagatcccggaaaggcgtgccagcgtcagagagactcatcagttctcactcatgagtaacagcaccatctcggatctgtgtccctcctttgagtgaaaaaggttcaatctttggtctctggggctgttggggttccgtcattgaagaagaagaagaagaagggtattattgttattataatcatggacccgaggctcatacacccccacgatgggattgtgacgcaggatgagttgcagggtggtgctgcttccaacctctctcacgctcacaagggtgacccttgtctcgttttaacggctgatcccaagcctcgtcttcgttggactcaggacttgcatgaacgcttcgttgatgcggtcacgcagcttggtggagctagtaaagctacaccaaaagcaatcatgcggactatgaatgtcaagggtttgactctgtttcatttgaagagtcatcttcagaaatacaggcttggtaagcaatctgggaaagatgtgggcgaaggatgcaaagatggttcatatcttttagaaagccctggtgctgataacacttctccaaagttgccaactcctgatacaaatgagggttatgaaatcaaggaggcattgagagcacagatggaagtgcaaagtaaattacatttgcaagtggaggcggaaaagcacttgcagattcgccaggatgcagagaggagatacatggcgatgctcgaaagagcttggcagatgctggctgatcaatttatcagtgctacagt

SEQ ID NO: 27340 - DNA, 512 bp, Glycine max
  Clone ID: TF_GmC804873_1
cctcgtgccgaattcggcacgaggataacttgtgtccacaaggaccacgtcaccgtcaaccagtcggagcttgcagcggccttcagtatgtcactagagccccaccgaattgtcctcaacgtcaaacgcggctcgtgcaacacgctctccacaatccgcagtgacaggaccatgcagcatgccttcttctccaacaacaacttcttccttgcactacaatggcgatggagacgtcaacgacaaggaagacaacgatgacaccgattgcaaagactcgaggtcggattctcgaacggagacctcagcgaagcgaacgacagtgaagcgactgcaactagtgtggaccctgcagcttcacaagacgttcgtggacctggtggcccacctccccatcaaaggcgctgtgccgaagacgattatgcaattgatgaacgtggaagggttgtccctataattgttaacttgtttgttcttattgcaatttatttgaacaaaatgctatttatgaatgt

SEQ ID NO: 27341 - DNA, 1886 bp, Glycine max
  unsure (1)..(1886): unsure at all n locations
  Clone ID: TF_GmC942_2
ccacgcgtccgaccgtagttaaacctcctaactcactctagttgctttgtttgtcttcaatggaataagaacagcagaaagaaagaacacaactttggccagaagacttggtgggggcattttcttttcagccaagaagggattcggtgttgatgagcaatattgatctgttgctgcagtaggggaccgagtaagaatgccaaaccagctatggtttgcactgccaatgatttacaaggatggaaagatttcccaaagggacttagagttcttctgcttgaaggagatagtagttctgctgctgagataagagaacaacttgaggccatggactataaggtttccactttctacgacgagaatgaagccttgtcagcactctcaagtagtcctaaaggcttccatgttgccatagtggaggtgagtacaagctgtagccttggaggtttcaaatttcttgagaatgcaaaggacttgcctaccattatgacttcaaaggaccagtgtctgaacaccatgatgaagtgcattgcgcttggtgcagttgagtttctcagtaaaccactctctgaggacaagctcaagaatatttggcagcatgttgttcacaaggcatttaattctggggaaaatgtcctttctgaatcactaaaacctgtcaaagaatctgtagaatccatgctgcagctccaaacagacattggacaagataaaagtaggatttcaattgatttagagaatgtgtcgaggtttagtgataatgaccatgagcagtctgctgtatgtgataaatatccggctccgtcaacccctcaattaaagcaggggacaaggttactggatgatggagattgccatgagcagactaattgctcaacagaaaaagaaagtggggaacatgatagggaatgtaaatctgtcgaaacttcatgtgggaatttgaatgccgaaagttctcctcagccaagggaacctgataagactctgattagggaggaagatgattttgccaatgtttccaagggtgagagcgctgtttcactgaatccacataataaaaagtttctcagcaatgccgatggtaatacatctccaaataaaacgggtgtacttaatgattcatgtgagattaaagctaatcggaagaaggtgaaagtagactggacacctgagctgcataaaaaatttgtaaaggctgtcgaacaactaggtattgatcaagccattccttctagaatattggagataatgaaagtggaaggtttgacaaggcacaatgtggcaagccatcttcagaaatatagaatacacaagagncaaagaattcggctcgaggaagatcggaaatggcataatcaaggggatgcaatgcaaaggaactattatatgcaaagaccaatcatggcataccctccatatcattcacatcacaccctttctccagctcctatatatcctatgtggggacaacctggcagtcaaacagccggtgtacagatttggggccatcctggttatcccatgtggcatcctacagaaagttggcactggaagccttatccgggggtgcatgtggatgcttggggatgcccgttggtgccacctcctcaagctccttgttttccctacaatcaaaatacacctggattgcacaatcctaaagcagttgactatagattcagcatgccacgaagttcctttgagcatcatccggtaaggcagtactttcctttcagttccttctaccatgtcatgaatttttttctctagttgaaaaataataagaattgtatatcgagcaaggtatgtagatgggaaaatatctcaaatattttgtatcaagcatgtatcttaaaatgacagcagtcgtataaagccatttatct

SEQ ID NO: 27342 - DNA, 806 bp, Glycine max
  Clone ID: TF_GmC1335_2
attatttccacgcagggtatcactgtgtatgaagagagagaaaggaagagagaggaaggaagagcacagcactacacagctccgaaataggagggggagaaattttgtatgcgttggatttcgtagatctgaataaatgacaaatgtatcattcaaagaatgttcctagtgcaagtttaattggtggtaattcattaagtcatggtcagcacatagattgtggtggcagcacaatggatcctggcagtggaggaaatggtcttagcaacaactctaatctcacctcaaaacaacgtttacggtggacacatgaattgcatgagcgctttgttgatgctgtggctcaacttggtgggccagatcgtgccacacccaaaggcgtgctcagagttatgggtgtacaaggcttgaccatttaccatgtcaaaagtcatttacagaaataccgacttgcaaaatatttacctgactcctcatctgatgaagggaaaaaggccgacaagaaagaaacaggggatatgctttccaatcttgatggttcatctgggatgcagattactgaagcactaaagcttcaaatggaggttcagaagcgactacatgaacaattggaggtgcaaagacagctacaattacggatagaagcccagggtaaatacctgaaaaagataattgaagacaacagcggactcagtggtgttctttcggaggcacctggctttggggtttgcagcggttgttcccaggggatgcatgccaagaacctgatataagactgacccgtcaacccctgaccctgaaagctg

SEQ ID NO: 27343 - DNA, 976 bp, Glycine max
  unsure (1)..(976): unsure at all n locations
  Clone ID: TF_GmC242282_1
gaattcccgggtgcgacccacgcgtccgcacactctccacattgtgttgcgcttctccgactctgaattttcgccaaaacgacgtcgtttcatggctccctgtgcggctgcggcggagtttccggtgggtctccgggttcttgtggtcgacgacgacgccaccacgttgaagattatcgagcaaatgtccattcgctgccgttaccgcgttaccacatgcactgaggctactgtggctttgaatcttctgcgggaaaggaaaggttgttttgatgtggtgctgagtgatgttcatatgccagacatggatggctataaactccttgaacatgttgggctggaaatggaccttcctgtaattatgatgtctggtgatagtactacaagtgctgtcatgaagggaatcaggcatggggcttgtgattatttgattaagcctgtacgtgaggaagaactaaggaatatatggcagcatgttgttaggaaattctggaatgacagcaaagaacaggataattctggcagcatggaagatagtgatcaaaataaacgggggaatgatgatgctgaatatacttctgttgctgacgcagcagtagttaaagcaccaaaaaagaggagcagtttaaaagaagaagatattgaattagagagtgatgatccagctgcatctaagaagccccgtgtagtgtggtctgtggaactgcatcaacaatttgtcagtgcagtgaatcaacttgggcttgacaaggctgtgccaaagagaatacttgaattgatgaatgtccctggtttgacaagagaaaatgttgcaagtcatttgcagaaatttagactttatttgaagcgattaactggagtggcacagcaccagaatgggatgctatacacagttcctgggcctattagaatccaatctgggaactaatggaagatttgacgnacatgctttggctgctgctgcccatgttccccc

SEQ ID NO: 27344 - DNA, 1395 bp, Glycine max
  Clone ID: TF_GmC16929_1
caatttataaagagaaactatagtctatagctgccacacattcaaacagtagctaaaagcatcaaaagtagtatatatttttatgtttcagtaacaacactaccaaaaaaaaggcaaaatggatctgcaaaatgtgcaaaaccaaagcatgatgcgtttggttctgtccactgatgccaagcctaggctgaaatggactcctgagcttcaccaacggttcactgaggctattaatcagcttggaggtgcagaaaaggcaactcctaagagtctgatgagagtgatggggattccaggactcactttgtaccacctcaagagccatttacagaaatataggcttgggaaaagccaaccactagaaacctgttctgacaacaagcaacaaggttacagtgaaatccagaacagtgatggtcattgcagcaaggaaatcagcattgggacccagaatcagatgactgaaagcttgaagattgctgaggctctccaaatgcaaatggaagtacaaagaaaactctatgaacaaattgaggtacaaaaacatttgcagcttaggattgaagctcaagggaagtacttacaatcagtgctaacaaaggcacatgaagcacttgcaagacacagttcttccacaactggtgtagaacttgcaaaatttgaactttctctgttagtgtcaataatcaataatgcatgtccaagctctccaatttcagaactcacagaaacacgagggttaagtttgaactgtggagagaggaaacaagacagaggaaccatgtgttcacttgaaagctctttgacatcatctgaaagctctgaacaacaacacatcatggatgaggcagaaaaccctcaaaagtttgatggtgtttcagttgaattgccgttgatttccattcatccagcagaagttaaagcattcaagggagatacaagtgttgatgggagaaagagaagtgcagaaactgattctgatcattgtgttgatcaagcttgtggcaaaaagaagttgaggaaatctgaagtgtcacaaatgcttgacttgaacagccaataccagagagacattgactcaagtgtgaaagaaatagatttaaatttcagttcaagcttttagggacaataaagatgtgtctggttatgttaaaaacatatgcaacaaaaatcattctcaaaagaaaatatgtttataaactatgtatatttttataatcagaaagaaaaaaaaagtcaagaatagtttcaagcttttagggacaataaagatgtgtctggttatatcaaaagcatataaacaaaagttcgcagaagaaaataaaattatagcaagtgcctattttgaaaacgattaccccccttcttgggtggtgttatacaaaaaaagggggg

SEQ ID NO: 27345 - DNA, 991 bp, Glycine max
  Clone ID: TF_GmC795_2
acgaaacacgattcgctcgaggagggctccgaggatgcgttggacttctaccctccatgctcgctttgttcatgctgttgaactcttgggtggccacgaaagggctacacccaaatccgttcttgaactaatggatgtcaaggatctcactttaacttatgttaagtcttatttacagatgtaccggacggtgaaaactacatatagggcggcggcttcatcagggcaatcagatgtgtatgataatggatcgtctggagatacttctgatgacttaatgtttgacataaaatcctcaagaaggtctgatctatccgttaagcagggaagatcaagtgttaatcaagataaggagtatcatggtctttggggcaattcttccagggaagcttggttgcatgggaagacaaagactgattctgttggaaacgtgcctttttctcttgagaaggaaatggatccaaagtgcctaagctatgagagaatatcagatggaagttcatcctcaaatctttcaggatcaagcccgaagaagcctaatttggatttggaattcagcttgggccagccactttaatttgagatctgaatatatatattattcattaactactatgaaactgaaagagggtagagctctggaatgagaatcaggaacccgctgagaaaatcagagaaagagaaagctaaaaagaaaacaaaagagaaaaaagaaaagtaaaaggagctaaagaacacaaggagacaagaaagacagaatgcaacaaaaaggaaggggcgagggaaaaaagcatggccttcctatcagagctcttgtgatgagatccaaatcaacatattatattttcttggtaaatatatgaaatctaattgatttgtatgtttttgcaatctgagagaaagagagagttatgttaaaagtatgaagtgatccttggtaattgtaatggagcactttacacttatgaaatatttagatatttccaccaaa

SEQ ID NO: 27346 - DNA, 2700 bp, Glycine max
  Clone ID: TF_GmC683_1
cgaagctcttattcggctggacctgacccaaaatccgtcttctctttctttctactccgattcctgcgttgcttttggtcttggtcgaattgcgaactcagcagcagaagaagttcctcaattgtttcacctcaaattcgattcgaactatgtaaacgccactgtcgcgtcgggtttgttgtctctgtttttgttgcggtgttactgttcctcggttcggatctccgaagcatgaatctcagcaacggaaagggatccatgtcaacccttactgcaagcgtggttatgaaatccggcgacgccgtctccgaccagtttccggcgggtctccgggttctcgtggtggacgatgatcccacgtgtctcatgattcttgagaagatgctccgcacgtgcctctacgaagttaccaaatgtaatcgagcagaaactgctctctcactgcttagagagaacaaaaatgggtttgacattgttataagcgatgtgcatatgccggacatggatggatttaaacttttggagcacattgggttagagatggaccttcctgttataatgatgtctgcggatgatggtaaaagtgttgttatgaagggtgtgactcatggtgcttgtgattacttaattaagcctgttcgcattgaggctttgaagaacatatggcagcacgtggttcggaagaggaagaatgagtggaaagacgcggagcaatcagggagtgctgaggaaggagatcggcaaccaaaggcttctgacgaagcagattactcttcctcagcgaatgaaggcagttggagaaactcaaagaagagaagggatgaggaagaggagggcagaggatgactcatccacgttaaagaagccgcgagttgtttggtctgttgagcttcatcaacagtttgtggctgttgtggatcaacttggaattgataaggctgttcctaaaaaaattttggaattgatgaatgttcctgggcttactagagaaaatgttgctagccatcttcagaaataccgtttgtatcttagaaggctgagtggagtttcacagcagcagggtaacttgagcaactccttcatgagctcacaagaagcaacatttgggggaacctcaatcaatggaattgatcttcaaaccctttcagctgctggccagttcccatcacaaagtctagccaagtttcaagctgctggacttggcaggacaactgccaaagcaggtatacctatgtctctatccgatcaaaagaaccttttcagttttgagaacccaagattaagatttggagaagggtcactaactcatatggatatccgtaagccaaaaaacttgcttcatggaattcttaccaacatggagccaaagcagcttgccaatttgcaccaatctacccaaccccttggtagcttgaatatgcgagtcaattctcctgccacgcagaacaaacccttgctgatgcagatgactcaggctcaaccaaaaggtcagttgctgagtgagaatgtcaatacgaattaaaccaggtatccgtcatctttgttgcagactacagaagaagaagatctttcaactggtgtttcgggaaatgcaattgcttgttccagaaacattactaccacttataaccctgttcaacagaaatcttctttggtgaaggtggccatgaatagagatgataaatccacagcaaagaagccccaggttgttaggtccctggagatccatcgtaagtttgttgcagctttgtttcaacaagaaggtacctctggtgttaaagaatctgttgtattatttaaaagttatgacatgtttaatgaccttcaccatcagaagtcccatgattgggacttaacaaacacaggcatgacatatgatgcttctcagcatgcaaaaccatctcaaacaacccttttttcggccccacaagacgcgattcatgagagtttttcctctatgcaagagactgatcttcatacagatactacttcaattggaaaagctatgttctccacaggtgaaggcatgcatcagagtagtctccaaaatattggtcaacaccgagcaataaccttcttcttgacaattcagtaagggttaaggctgaaagaattcctgatcctagctgtcagattaataacctcttctctgaccaatatggtcaggaggatcttgtcagtgcatttctgaaacagcaagaaggcgttggaacagctgaaaatgagtttgactttgatggatattccttagacaacattccagtttagaacagattctgcccgttctcttcctaattgcagtcgccaatgcaaatagttggcgttccatttgaaccaaatcgcactgcaattagtttgtttggatcttagtttaaatttttcaacaaatagaatttaattgatgtaaaaaattcaggcttcagggagtagtatgttattatgatttagtctggatgcttaaaagatgaataacaacaaactttaaatgcatgtgtgcaaaaggcatatttgcaattttttggctgctttcgtttgccaaggttctagcaagcttatgttgttaaggtgtacatgaagacactggtttagggaaaaactgtagagggcaaggctttgatacacctgcagacttgtaggagcattttaacttaataacacattatgaaatattttttcccttactccttggagataacaaac

SEQ ID NO: 27347 - DNA, 303 bp, Glycine max
  unsure (1)..(303): unsure at all n locations
  Clone ID: TF_LIB3109-028-Q1-K1-G3
gaaatggctctggtgattctggacttgttctctcaactgatgctaagcctagattgaaatggacacctgatcttcatgcaaggtttatagaagctgtgcagcaattangaggagctgacaaggcaactccaaaaacggtaatgaaactcatagggattccgggtcttaccttatatcatctgaagagccatctncagaaatacagattgagcaagagtctgcatggacaaagtaacaatatgacacacaaaataaccataaattcaggtgcagcaacagacgaaagactcagagaaaataacg

SEQ ID NO: 27348 - DNA, 1812 bp, Glycine max
  Clone ID: TF_GmC27103_1
cccacgcggagggaagaaaaaagtgacctttaaaacctccgtcgtcgttgctttcttctctctcttcctgtccgtggccgcatgagcttttcgttctgaaatttccttcacatccaacccactttccttttctctctccctctctttttatttatttattcattcattcatttcgctctctctctcccccttctcctttcttcctctgcaaccaaaatctgaatcttagggcaccaacacctttgatccaatgggttcggttgccgcagaagaactgaacttagatttaagatcctccttcgtccccaaaaccatcaccgatttcctccgccacctctccgccaacaacaaccaccctgccaccctccgcgatttcctctcccgcctcgaagacgagctccgcaagatccacgccttcaaacgcgaactccccctctccatgctcctcttaaacgacgcaatttccgttctgaaggttgaatcgcagaaatgctgcagggtggcgcgcgattcgccgccggtgctggaggagttcattccgttgaagaaggagcttggtgatcagagcgaggaggaggaggagaatgatgatgacaaggacgataacgaatgcagggataagaggaattggatgagttccgttcagctctggaataacaacactaccaccactactactaataacaacaacaatgcctctgatcgcaaacaactacttcataaattacaaaccaagaaaagtgaagaagggcagtctgtggctgaggatccttttcagacttgtagtaatagaaatgggggaagaagggcatttatgcctttctctaggtactcttcttcatcatcatctgtgccggtgacaacagtggggctgggggctgcatccaaagaagagaaggaagagagtgttaggaataggctttctcttctgacgccttctgtgaaagcttggtgtggttcaaggggatcaaggagcagttctatcagggctgtttcttcttctcctcccacggcccaggcgggttttgcgtgcgacttcagtaccaaaaccaaagcaaattagagagcgttgctggtcccatgagttgcacagacgattcgttaatgccttgcagaagcttggaggttctcaagcagctacaccaaagcaaattagagagcttatgcaggttgatggcctaactaacgatgaagtgaagagccatttacaaaaataccgacttcatacgcggagagttcctgctgcaagttctaatcagccagttgtggttcttggaggtttgtggatgtctcaagatcagtacaatgactcttcaaaagttagcagttcagggtcaggttctcctcaaagtcctcttcatttggctgcagggtcccggggagggacatctcctactgaaggtgacagcatagaagatgatgaagatgcaagatccgagagttatagttggaaaagtcatatgaacaaaccaggaaaagttgatgtataggatactactctccaccatgaattttgcagataaaagtatacatgggaggagttttaccactacataagaataatactacatgatacataaaaaagagggtcaacgataagaggcagttgtagtttttttttaaggtttagctttgccttatatactgcgtgagttttgatatgagactccgaattaaaatatcattttccttcgctttaagaagctggatatttttttttctctatcataaaattcttttatttcgttttgtcatgggaactctctgatccccccagaagaaattaattactagtccaatatttagatggtc

SEQ ID NO: 27349 - DNA, 257 bp, Glycine max
  Clone ID: TF_701008362H1
cgcatctcaggttcctccgtagcagcatataccatctggcgaagttgttggtaagtcatcatcaactgcatcgcagagtaaggctagaactacgcggactccagaacttcacgaggcctttgcggcagcagttaatcaccttggtggtcgtgtgacggctactccacatggtgtgttgaatcaaatgacagttgaaggtctcgatatcgatcatgtacaaaggcacttgcagaactatagaactgccagttacaaac

SEQ ID NO: 27350 - DNA, 1716 bp, Glycine max
  Clone ID: TF_GmC575_1
aaaaggttcaaaccacgcgtccgctctttctctctgcttctacaaaacgccatttccttatatatcccttctccctcccactcttcttctcgttcttcttcttaacgccatcaccacctttggcttcctttaaaaatgtattttttcactgagaaaatgcacagtttgaagatgggcttccctgactacatccaaacattggaagaagaacgccgtaagattcaggtgttctccaaagagctacctctttccttggaactggtcactcaagccattgaagcttgcaagcagcaattgtctggaactgcgagtgagtataatttgaatggccactcggagtgttcggagcagacaacatcaacggaagggcctgttttggaggagtttattccaatcaagaaaatggcatcatcatcccctttttgtgatgaagaggatgaggatgatgagcaacattctcacaagcaaagggtttcaaaggaaaataataacagtgataagaggaaatccgactggcttagatctgttcagttgtggaatccagatcccccagctgaggaggatgtgaataagaaagtgcctggattggaattgaagagaagtggaaatggtggcgctgccctccaccccccccgcctgctgggttgtggggcgttgcccagggtttctgtgagtaaagcaccctcttcaacctcggtagccgccgcgagttctagcgccgcagaacccgcagcagaaaaatctctgaatgagggacagagaaagcttcgcaggtgctggtcacaggacttgcataagcgcttcttgcatgcccttcagcagcttgggggtgcagattgtgagtatctcaatatatactgccacaccaaagcaaatcagagagctgatgaatgttgatggcctcacaaatgatgaagtcaaaagccatttgcagaaataccgtttgcacactagaaggccaattcccatggttcacaacagttccgatccacaagcagcaccttttgtccttgtagggaacatttttgtccaatcaccagaatatgcagctgtagctacctcaacagcatcaagagaagtggccacagttgcagcacctgctagaatttatgcaccagtggccacacatcctacacctgtttcacacccaccagatgattcaattaagaatccacagtttaagaaagtaaagctgtttgagcattcaaattcagatgatagggctaatcacagtgaaggagctgttcattcaaattcccctacctcatcctcctccacacatacctctacttcccttggctattgagttttaagatattgcacaagttttgtaaccaagttgttgtagaaagtccttagatattttcttatgactttttttttttactaaaaatgttctttactcctgttatctgggatttaaatcatagaggtaaaatacacagaaggtgacagttttgatgtcaaataaagtcccaccctcttggctggttactatgttatctccttggtacagaaggtgaactgaaatttcaaaatttaaaatttggaagcatgctcaatgtttcaattggtccagcttctcaagattgtgacaaattaaagctactgttctgacttagtcatattccttacaccttgggtaaactattaatcacaccactgtgttagttgggaattaaaagtggtccacctaagcacctacactgtcttggt

SEQ ID NO: 27351 - DNA, 1066 bp, Glycine max
  Clone ID: TF_GmC62574_1
gaattctgcattagggaacaacggctccaccatggcggcgtgtagggctgccacggccacaaggtttaatgggttctccggcgatgctttcaaatcttattttccattgcaccaatatggggtgggcccttcagaagcctcttctgggttcatgagatcaaggtttctgcagaagcttcccaacaagaggagcatgagagccccccacgcgtccgggacaagcaccctccatgcgagatttgttcatgcggttgaacttcttggtggccatgaaagagctactccaaaatcagttcttgagctcatggatgtgaaggatctaacactagctcatgtgaagagccatttgcagatgtatcgaactgttaagaccactgacaagcctgcggcatcttcaggccattcagatgggtctggagaggatgatttatctccgatggttagcaccgccgatcgtggtggtctccgacaatttcccaaccacagagggcggccggagtgggcggcacaacaagacatggactactcttccaccaccactactctatggagtaattcttcaagttgtggggagtcacggctaagacctagttctaacgacatagatggtctcagatcacctatcctccattcacaaacaatatcaggagggcatcaaattcaggagtgtgattcaatccaactcaagagcaacatgccaggttctaatttggagtgcaagatcccaagcttggaattcacattaggaagaccagattgggatggcaaagaacaagcctagctaataattttgataattggttcccttgcttaatttcttttaattttgcaatttatttataaaccatggtgacaacttcgtcatcttatgaaatgtagagctaattatttagataaatataaattggtgtctaggagaggaagaaaagaccctccgtgcgtagttctacttagctagctttcgaaaagtgtttttgagtttatgaacagttttgtttatattttattttgtttttatttatttgtgaggatgagaaggagggaaattaagatgtggcaattaaca

SEQ ID NO: 27352 - DNA, 1076 bp, Glycine max
  Clone ID: TF_GmC12582_1
cgctgctgccggggcgtatagggctgccacggccacaaggtttaatggaatttccggggaggctttcaaatctcatcatccattgcaccaccatcactcatcatcaccacactatggggttggacttggaccctctcatgagacctctgcagggttgatgagatcaaggtttttgccaaagttgccagcaaagaggagcatgagagcaccgagaatgcggtggacaagcacactccacgctcgatttgtccatgctgtggagcttcttggtggccagctcgaggctacaccaaagtcagttcttgagctcatggatgtgaaggatctcacattagctcatgtcaaaagccatttgcagatgtatcgaactgttaagaccactgacaagcctgctgcttcttcaggcctttcagatggatcaggagaagatgacatgtctccaatgggaagcagtggtggaatgcgtcaattttcagaccaaagaagcctttctgatcgaccactgcaacaagatatggactactcttcaggcaacaacactctatggagtaactcttcaagcagtagagaaacatggcaacaaaataactctaatgacgtagatggtttcagacccccaatcttccagtcacaacaaatatcaggagggcatcaaattcaggagtgtgattcaacccaactcaagaacagtttgtcaggatcgaatttagagtgcaagaacccaagcttggagttcacattaggaagaccggactggaatggcaaagggcaagcctaattttcattggttccctttattgtctctagctagtttgcttaattagtttaattacaacccggtaacatgtgacaaacttcataatctttcctgaaatagaaaggtggtactatatataaaaatatatattcaggcagaaaaagtaaaagccctatatagttccgctaagtttatccttttttggaagttttatgacttcatgaacaattttgtttagcctttttcttgaatttaacattttaatcattggagacaggatgcacaatgaaaacaatgtggttgagaataagggttaccc

SEQ ID NO: 27353 - DNA, 1503 bp, Glycine max
  Clone ID: TF_GmC51280_1
cagagattctctccaccccattcaagtcaaagaagaaagaatagagggaatttttcttctttttttaaaaaagaaaagaaggaaaagttggtatggaatgggatgagagagaggaagaaccacagctcatggcatatattcccccaacataaccccacttatgtttcctgatatggagtgagatcatagaacaacacaaccaactccaagttataaagagaactatagctggcacatattgatgcatacatagctaaaaggatcaaaaggcacatctatgtttcagtcctttgccagcaagtaagtagtaactcatccaaatatagcaaatggatccacaaagcatgcattttgtgctgtccactgattccaaaccaaggctgaaatggactcctgagcttcaccgacggttcattgaggctaccaatcagcttggaggtgcagataaagcaactccaaagagtcttatgagggtgatgggaattccgggacttactttgtaccacctgaagagccatttacagaaatatagacttgggaaaagccaagaactagaaacctgctctgacaacaaacaagaagattacatagaaaccaagagcagcagtgatggccattgcagcagggaaatcagtattggggcccagaatcaacttacggaaaacatgcagatagctcaggcactccaaatgcaaatggaagtgcaaaggaaacttcatgaacaaattgaggtgcaaaaacatttgcagctcagaattgaagctcaagggaagtatttacaatcagtgctaaagaaggcacaagaagcacttgctggatacaattcttccccagtggggatagaacttacaaaagctgaactttctcagctagttaccatcatcaacaatgcttgtccaagttctcccatctcagaactgacagaaacaagagggttgagtttaagctgtggggagaggaaaagagacagaggcactatgtgttcactggaaagttccttgacatcttctgaaagctcggggagaaaggaagagaaacagccaatggaagagattgtggagttcaaaagttccattaatgtttcacttcaattgccattgatggaaattctcactgaggataaagcatccaatggaggctcaagcaatgaggctagtgggagaaagagaagtgcaacagcagcagaatctgatgatggtagctgtgttgttgagcaaccatgtgggaaaagatgtggcaacaagttgaggaaagccaagttgtcagaaatgcttgacttgaacagccagtgtcagagtgacatggactcaacaagctcaaaaacattagacctaaattgcagtttaaacttttgggaaccatgaagatggtttttatatacttcacttcctaattaattatatgaacgtatgaagcaaaatcattgtcataaaagaaatctgtttatatagtatgtatatttttattattataatggaaaaaagaaagaacaattgactgtaa

SEQ ID NO: 27354 - DNA, 558 bp, Glycine max
  Clone ID: TF_18691984
actcgttgatgttcacttgccaaatatggatggctatgaattccttaagcatatcaataaggaaattgatatccctgtcatcatcatgtctgttgatggttctacgagtgctgtgaggaaggctattacacatggggcatgtgattattggaccaagcctttcagtgagaaccaattcaagattatgtggaagcatgttgctatgaaagcctggaatgaaaagaagctacaaaaaaaagatttttctgaatttgcttcttctgttcttgatgcaaacttgaaggaccaaaaagagatcagttccaattccaaagaatctgatgttgatgattgtgatgcacaaccaaagaagccccgtatagcatggaaaggagaactgcattgccaatttgtcaaggcagtgatgcatattgggcttgacaaggcacagccaaagaagattcttgaagtgatgaacattcctggtttgacaaaagaccatgttgccagtcatttgcagaaatatagatttgatttgaagaaatctaatgaagtggctgtgcaacagaatgagatgca

SEQ ID NO: 27355 - DNA, 571 bp, Glycine max
  unsure (1)..(571): unsure at all n locations
  Clone ID: TF_LIB4392-050-R1-K1-E7
tcgccctctgccaactaccaagctccggcttcctctgccaattcaatccgtcgtcgttttcgccaattccgaatgcgtcgatttcgggttggagaatgagttctccgacctcttcttggatctctgttcaaaccgtcacacagtctctgcgttcggattctcttgtccaattttaactctctctccctctttttttttctctctctctcagttagtataactacgtatcaggcaaagaagttttcgccggctagcatggtgccgcataaatctcaaggtggtgtggagcagcttgcaaatgctggggttttgggaggatctgctgtaaaaattgccgctgcacctgctgggggaagtgggaagcagcgtttgaggtggacatctgatcttcatgaccgttttgtcgatgccattacacaacttggtggaccagatagagcaacaccaaaaggtgttcttagagtgatgggtgttcctggactgaccatttatcatgttaaaagccctttacagaaatatcgccttgcanaatacttgcctgaatcaccagctgatggttaagactctaaag

SEQ ID NO: 27356 - DNA, 712 bp, Glycine max
  unsure (1)..(712): unsure at all n locations
  Clone ID: TF_GmC594_2
ttgagctgcatagaaaatttgttgctgcagttaatcaactgggcctagataaggctgttcctaagaaaatacttgacctgatgaatgttgaagggcttacaagggaaaatgttgcaagccatctacagaaatatagactctatctgaaaaaggcagcccagcaagctaacatggttgctgcattgggtggtagtgattcttacctacgtatgggttcaatagatggatatggagatttttgcacctcgtctgggtctggaaggatcacaaacactactttaccatcatatgcatctacgggaattttcagtaggctgaattctccagctgccttgaacatgagagcaattagttcttctgcgcttatccggcctgttcagtctcaaaacatcaactgctccttaaacacacttggaaacattcagccatctgtttttcctgcaaatcatagctcaagtttattacagggaattccgacatcaattgagcttaaccaatctaagcaaagcaactgtacaactggaatatcacagttaagtcaagttgagttatacttatggacttttgttagccatctgatccgttccatctcttttttttttcaatcttgtagtgtatccccataaaaaaatttctgtctatggtttagataaaataattgtaatatgaatgcttcttggtgctgngcnnnnnnnnnagattttacaaaccc

SEQ ID NO: 27357 - DNA, 2038 bp, Glycine max
  Clone ID: TF_GmC942_1
ccacgcgtccgtagaaaatgtgtcgaggtttcgtgctatagatgcttagcagtctgctgtatgtgatagatatccggctcggtcgaacacaactttggccagaagacttggtgggggcattttcttttcagccaagaagggattcggtgttgatgagcaatattgatctgttgctgcagtaggggaccgagtaagtatgccaaaccagctatggttttttctgccaatgaagttcaaatatagaaagagtacccaaaaagactcagaattcttatgagtgaaggaggtggggcattttcttttgagataagataacagcttggaaacaagaaaaaaaagtgaattagtgaaaagaaccgcctttcctactacatccctgattctaccttgattcatgtatgcatgttttggagacaaagctatccggtttaggtttaaagtagactggactcctgagctacataaaaaatttgtgaaggctgtcgaacaactagggatcgatcaagccattccttctagaatattggagataatgaaagtggaaggcttgacaaggcacaatgtggcaagccatcttcagaaatatagaatacacaagagacaaagtgcacccagggaagaagatcggaaatggcataatcaaagggatgcaatgcaaaggaactattatatgcaaagaccaatcatggcataccctccatatcattcaaatcacaccctttctccagctcctatatatcctatgtggggacaacctggtagtcaaacagctggtgtacagatttggggccatcctggttataacatatggcatcctacagaaagttgtcactggaagccttatcagggggtgcatgtggatgcttggggatgcccattgttgccagcccctcaagctccttgttttccttacaatcaaaatatacctggattgcacaatcctaaagcagtggactatagattcggcatgccacaaagttcctttgagcatcatccggcagaggaggtggtagacaaggttgtgaaggaagcaataagcaagccatggctaccattgcccttaggactcaaacctccttccatggatagtgtgttggctgagctctccaaacaaggcatttccggcatccctcttggcaacaagcgttcttctactcctaaactccgctgacatgtatgaccgaccccaccactgggtcccacagagtagtggttttgatgatggggccagccagttacatatcaacgccctgttgactcttgtaattattttgtttctcaaatttccctcccaggttgcaactagtggtagatttggctggaagttgggaccatttactttgccttgccatccccgcctccacaccaaccactcaagatgtctctccttaagctgctgagcaatgatggttgatatgatatgatatgatatcaggtcaggtcatacaccaccatgatgcatcacaaatgggcaatacattgatcctattccatggccacttgccaaaacaaaacgctaaaaataacattaaaaaaaaaggttaagctatgcagcagcattcagcagtttcaatgcagtgcatggcatcatttgttgaaactaaggactggccacgcatttgttgaagctttatacaaaatattgtggctgaaagaaagataacaatgtggactttttgatggttgtggtggtgaggggtttttggttgtaagtgaccagcttcggggtccatgtaaaaatagcatgacagggactggaggtgtcttggttctgttggtgttgttggggagggggtctagttgaggtctaataatggaaaaaaaggatagttaggatagtgttgtgaataaaaaatgagtccaggctttggtttatgctaacttgttcttttcccaattcaatttgttcactcagctattttagcttaagttcagcattgagaacaacactttgtgcatgttcagttgtttttgctcactttatctttttaacgttttgaaaataattctaagctatgatcattactttcttttaaaa

SEQ ID NO: 27358 - DNA, 2818 bp, Glycine max
  Clone ID: TF_GmC577_1
aaaaagacaccaactttttcgctccttccttgcatttattcattcacattctcctcaaaacttactattccttcctcacaaaataaacaaaaaaaaatctttccttattgttttccgtgtttcctttgtttcatagcttctgggttttggttttcagacccacaatacaaagttcacaagtgtgtgtaaagattgaagaagaaaatgaccgtagagaagaaaatgaatgattccggcgacgagtttcccgtcggaatgcgtgttctcgccgtcgacgatgatcccacttgcttattggttctggaaactctcctccgaagatgtcaatatcatgcaaccacgactaatcaagcaataaaggcgttggcgctgttgagagaacacaaagacaagtttgacctggtaattagtgatgtgcacatgccagacatggatggatttaagctgcttgagctagtgggacttgagatggatcttcctgtcataatgttatctgcaaatggtgatacgaagctggtgatgaaggggatttctcatggggcctgtgattatctgctgaaacctgtaagaatggaggagctcaagaacatttggcagcatgtaatcaggaggaagaagtttgactcaaaggagaagaacaaaacccgcaacatagacaaacctacttcaaacagtagcaatggactagggtcatcaggaacaggaaattctgatcacaatgagaagctgactaagaaaaggaaggatcaagatcgaacagcttatgaacagcagtagaatgatcatgacaatgacgacccatcagcccagaagaagcctcgggttgtttggtctgtggagctgcaccgcaaatttgttgctgccgttaatcagctaggcattgacaaggctgtacctaaaaaaattctcgatttgatgaatgttgaaaagcttacaagggagaatgtggcaagccatcttcagaagtataggctttatctgaaaagaattagctgtgtggctaaccaacaaaccaatatggtggtggccttagggggtgccgatccatcctatttgagaatgaattctgtgagcggggttggacatatacaatcaataagtggttctggacagcttcataacaatgctttcagatcctttccacctagtgggataattaatagattgaatactcctgctggtttaaatgtgcatggatttccttctggagtacttcaattgagtcaatcacaaaatttaaaaaacaccaatgataatcttaagttccagtcagccattgttcctgctaatcagaatggtgttcatggaatgacagtatctgtagggcttgatcaactgcaaaacaataagggtgttatgtctgttcaaaacctgactactgtttttgatgccaaaacaacttttcccatctcgaataaactcccagatccaagaccaaaaataaccaactctggctctcacactccagatgtgagtttctcaaacaatgccttgatgttggaaccacgccctcaaggcacacaagggagtgtaagaattgaaactttatcttcttcagtagcctctcaacattcagaattttctttgtctttgctggatcaaggtagatatagtgataattgggcaagtactgtgcagccatctgtgatccagacaaactcttaccctccaagtgaatgttttggacagactaatatacctcctacagataacatggcttctgtacccttgcaaggtgggaatctaagtggtgcgtccatcacttcactgtccaggcaatcctatgattcaatgacagatatgcactctgaaggagtgacttttaccaacagacctgggcatataagcagtaatgtgccatatcaagggtggcatgacaataatcaggatgctactcaccattcaaatattttgtcaataaactcactgactccagtcaatggtgctgctgttccagctggccatgcagcaatgaactcagccttacacagaaacttggactttaattattgtgatcccttacaaatgaagcatgagggatttgtggagttaactgacgaggccttatcgaaacaacatcaggggaatatcatgaacctaccgaaatctcaacaaagtcatttctctaataatcttggttcactggaagacttggtcagttcaatgatgaaacaggaaaatgataagatgaaattattggatggaaacctcatttgcaataattactctggtgggttatctcgatgtgatagcaggtttagcagcacattccagaatatcatgcatcctcgctgatgaatttttttgtagttttcatcgtgttttaagggctttagcttttgtcttctcgtagttactataggatttagcttctccagattactttgttctctaggtttgttccactaagggctttctattttttaaacaaatgcattgttgtccttgccttgagtccagcaatgcaatatggagtgttattgatcactttgtttaatctccttagatatgttggccttcaaattggacctagatcttctgtcacagccacacttgcagcgaggagagagacacaaggtcctggtggagcccatcacacaaatgggatccacttgaaccctgtgtctttttcatgccttgatgcttggtgtaggtgtggcagcttgagagagatcagggattgcaaatttaaatgttagggatccataaacaagattatagtgattaagttgaatgacaataaacacgaattcccccttttatgcttggaaatgttgtctattaaaattacacattcaatattatttattgacgtagc

SEQ ID NO: 27359 - DNA, 2343 bp, Glycine max
  Clone ID: TF_GmC606_2
tgacatggatggttttaaacttcttgagcatgttgggcttgagatggatcttcctgtcattatgatgtctgtggatggggaaacaagcaaggtgatgaaaggtgttcaacatggagcctgtgattatctccttaagcctataaggatgaaagaactgagaaacatatggcagcatgtctttagaaaaaagatacatgaggcaaaagaatttgaaagttttgagagcattcacttgatgagaaatggatcagagctatcagatgatgggaacctgtttgctgtagaagatgttacctcatcaaagaaaagaaaagatgcagatagcaaacacgatgacaaagaatgtttggatccatcatccaccaagaaagctagagtagtctggtctgtagatcttcatcagaagtttgttaaagcagtgaatcagattggatttgataaagtggggcccaagaaaatactagatctgatgaatgtcccatggctgactagagagaatgttgctagccacttgcaggtgatgctatattttcacaccagtatgttatacttagactatagagaaagaaacatgtatactttctttcattcagatgagcatctagattcttaatattttttattgtatgcatgattacatctcatttatatcaccgtttggtagacttagaatcacaacaaagcttcactttaatacaatagggtgtaagtgtaacctccaaaccataggtcctgtacaaatgtttcgtagaaatattacaacttaacacgttactcagcatgtccatctccatctaatgtaggttttgttactcaaacttgcacaccaagaagatacagatcctctcataaattcaataaagcaaaataataggatagaaaaatggcaaaacttatatacagttccttatgttctgtttgtactatttactaatcaaaattgaagtttcatctcgataatctgcacaattctttaatgcaaacctttatatgatgaaactgcaattctaattagataacaacacaaacatctatagaactgtatctaagttttgtccatagaagaaatgtatgtttctataatgtttcataagtttgaaaccaaggttcttactaagaaatctttaattatgcagaaatacaggctttatttgagtaggattcagaaagaaaacgatcagagatcttcctcaagtggaatgaagcattcagattttccttcaaaagatatgggaagttttggttttcagaactcagtaatcaagcaacaaaatgatgttgcaattgacaactacaatcattcagatggatcattacaacttcagaatgtggaaactaaaagtcatgaagctgatcccaagggaattgtttcacagtccaccatagcaaaaaaaggaaggattttgactggtaacattgctgacacgaacatgagagagagtttaagggttggccttaatcaaacttttccccctctagagtcagaaggaaaccatgcagtgtttgattgttccatgccaacaccatactcttggactgaagttccacacatgcaactcaaagaagaacacaagtcacttgtttatttagaagatagcttcaatcagttgccattacatggtaagcagcagcaacacatccatgtggatcaatcacaatcagttgcttcaattagttccgctccctcaataaccgaggaagaggctgctgcttgtatagaaccaaaacctttgtttgcagattacaacaatgattatgccagttctgtgagttcaacagggaatgcagttgccacctttcctattcaaccaggaagtcttattatgaatggtcaatcttcagaacgcatttccactacaacttctggattgaaaacacaggaatataataatctcagtagcatttctgatcaggaaatttaccaaagaaaccttttgggatgtgaggcagcttctgcatcattggacgaggacttgcatttctattggctagaaggcgaatgctataataatatgaacttcggtctgcagaatataggaatgtctgaatattatgatccaggacttatttcagaagctccaatccacttatatgattcagctgattactcagttatggatcaaggtctattcatagcatgatttgctttgcctttcctgcatcttcaacaaaaatcaaaatttactcatgaaaggacaatttagtgtttcttgtagctaactacagctttattggagaatttcaacctcaagggttggggtattcttttttccaatcatcgaggatttggatatatattgcagtatgtataaaaatgggtgctgacaagtattgagcttactt

SEQ ID NO: 27360 - DNA, 2084 bp, Glycine max
  Clone ID: TF_GmC29852_1
ccatacggctgcgagaagacgacagaaggggaactcaagtcattagcattcttctttgactttttggtctaaaaccggtttctcttgtcacaccaaatggaccgacccgccgccatattttccgacaccgtcaacctcaacggcacggtgacgcagctgtctctgctcgccgacgggaggctgtggtggccggagggcggtcaacgcaatttgagcatcgagaaagaggttctcgggttcaccggcgacggtcccgatataaggctcaaaacaatcgtggaaaccgaagatggatgctgtggcggtgcaagcagagcaaaactagtccgaaacgacgtcgtttttcggccatcgtccgaggaaacgcataggctctggtgccagaagcttggcgaattcatcgattctctcggacgacccaagaggctttttgtttttgttaatccattcggggggacgaaatctgctgtcattgtttttcgtgatcaagtcaagcctctgcttgaagacgcacaagtgcagcttacagtccaagaaactaagcatcagctccacgcaaagcaagttgttcagtcattagatttttcaaagtacgatgggattgtttgtgttagtggagatgggatcttggtcgagtaggttgtaaatggactgcttcagaggcaggactgggacactgcaattaagatgccccttggagtagttcctgcaggtacgggaaatggcatggcaaagtctcttcttgattcagttggtgatccttgtacagtacccaatgctgttcttgccatcatacgaggccgtaagcgaaaacttgatgtggccaccatcacacaaggggagaccagatttttcagtgtgttgatgcttgcatggggtctggttgctgatattgatatcgagtctgaaaagtataggtggatgggaagtgctcgtattgatttttatgctctcactcgaatcttgcatttgaggcattacattggatgtctttattttgtgcctgcacctggatttgaagcttacggggaccccactagttaccctggaagttctaataacaaaggcagcaatagtgaactaattgatgaggaacctttgaagttacaaaggctaggctatcaaggacctgaaattgacctggagaatcagagttggagagttttaaatggaccatttatttctgtctggcttcacaatgtggcttggggtgctgaaaacaccaaggcagcaccagatgcaaagttctcagatggttatctggacttgatcattacgaagaattgcccaaagttaccattgctgtcgttgatgtcagatttgaataatggaggtcatgtaaaatcaccatatgtcatgtatttaaaggtgaaagttttggtcttggaacctggtccacgcttgggggaccaagagaaggaagggatcatagatgcagatggtgaggttctggcaagggggaaagggtcgtaccaatgtgagcagaaggctttgatggcctatgataaacttcaaataacagtagatcaaggtttagctactattttttctccaatataaaaaccttgatttttataacaaaaaagaaaaaaaaaacaaaagaaagaataatcttggtttaataattttggaaaaaagcaactatcagtgcaaccttatttcagcctggagagaaagagatgttagagaggagaaatgtaaatataataaattgtaaatgatataagagatgttcatataacattgtttgataataaacaaaaaaaaaaatccgtggtcgctcactttgacatcttatcctccgttcactagacgcacatgcagctcatgagcgtgactggtttgacccgctaaagcgtcgctagtcgcttgcagaagtccggtcttcacctcaagcgcatgcaggggatatccgccaccggtcctgacggcgcctccggtgcagtcgccgaccccgccaccgaccacttgttcgccagctcgccggtgccggcgcatttcttgcacccggccgcgaggcggaattcggatcatttcctgccgttcgtgccggcgctcctccaccaccaacagcagcagcagat

SEQ ID NO: 27361 - DNA, 267 bp, Glycine max
  Clone ID: TF_LIB3242-572-P1-J1-E2
tgaattcggctcgagatcaaacacatggtcattaacatcatgttttttaatttggacagaaaggcacagatgcatcccggcccttactcaggaaatgggctcctgcttagccacttatgcgtaggacaccataacttcatgaggcgtttgtggaggctgtcaaccaccttggagggagtgaaaaagctacttcaaacggcgtgctgaatctcatgaaagtagcaggattaactctatttaatgtcagaagccttctgcagctcattc

SEQ ID NO: 27362 - DNA, 684 bp, Glycine max
  unsure (1)..(684): unsure at all n locations
  Clone ID: TF_LIB4392-004-Q1-K1-A1
aagaacagcagaaagaaagaacacaactttggccagaagacttggtgggggcacttttcttttcagccaagtaggggaccgagtaagaatgccaaaccagctatggtttgcactgccaatgactttacaaggatggaaagatttcccaaagggacttagagttcttctgcttgaaggagatagtagttctgctgctgagataagagaaacaacttgaggccatggactataaggtttccactttctacgacgagaatgaagccttgtcagcactctcaagtagtcctaaaggcttccatgttgccatagtggaggtgagtacaagctgtagccttggaggtttcaaatttcttgagaatgcaaaggacttgcctaccattatgacttcaaaggaccagtgtctgaacaccatgatgaagtgcattgcgcttggtgcagttgagtttctcagtaaaccactctctgaggacaagctcaagaatatttggcagcatgttgttcacaaggtagactggacacctgagctgcataaaaaatttgtaaaggctgtcgaacaactaggntattgatcaagccattccttctagaatattggagataatgaaagtggnaaaggtttgacaaggcacaatgtggcaagccatcttcagaaatattagatacacaagagacaaagtgcaccca

SEQ ID NO: 27363 - DNA, 1469 bp, Glycine max
  Clone ID: TF_GmC200_1
gatccacgcgttcgcatggttgtttgcgacttctgggagctcagtctcgctcagagtcagagaaaaacacccaaatcaaatattatcatggagcccagcttggatttgagactgggctttgtccccaaacccctttccctgtttttcggcgacgtttctgggaacagagacaagtgcgacaaagtggtcacactcgatggcttcgtgcagagattggaggaagagttgacaaaggtcgaggctttcaaacgcgagcttcctctctgcattctcctcctaaacgatgctatagcgagattgaaggaggaaaaagtgaagtgttcgggaatgcaagatccgcctcttaaaaccagttcaggaggaaatgaaaatgaaaactctgctcgacagaaggggaattggatgagttcagcgcagctttggagcactcagaaaaccaaatcgagaaatgaggaagatgataggtctgtgccagcgaacccaattaatgggaattcgtgtgtcctcgagaaggagggttcccaagttccgaggtttggtttgatggctcgtgcttctgaactgagtcatagcaattccaagagtgttggtggagatattagttctggctcctctttgctccgtgttgaggtacagagtcagccacaaccgccgcaacatatgcaacagaatccgaggaaacaacgccgctgctggtcgccggagcttcaccgccgctttgtggacgctcttcaacaacttggtggagcacaagtggccactcctaaacagattagagaaccgatgcaggtggaaggccttacaaatgatgaagtgaaaagccatttgcaaaagtacaggcttcacgttaggagatttccagtttcttcaactggccaggctgataatgggtcatggatgtcacaagatgaatctggggataaatcaaagggaaacaacatgtcacagtctggttctccacaaggtcctctcacacctctgatcctaggaggagcaggaggaggatctgctaagggtctctcaagccctggacagaacagtgtggatggagaagatgagcaatctgattgccggaattggaaaggagggcttcaccaccaccagcttgaagctgataatcaatgcctctaatattttgcagataaattataatacaatacataaatgatgaagagttgaagacccagaatttgacaacataagaataatagatctaacacatagaagaactatagggatcaagttttatgctaccattattttaaactgtttggtagagagcaactgaggttttacaaatttttcgggtttcttcttttttaaactcggtatagttgtatggagcttaacttttactgggcaattttcatagattaatcctcaattatgccatgtgctttaatttgtggttgggtttggcttttggatgttgaattttatgcaaaatgccacaaaggtttatttcaggt

SEQ ID NO: 27364 - DNA, 352 bp, Glycine max
  Clone ID: TF_LIB3028-002-Q1-B1-G9
ggcagtgctggtcaccggagttccatagccggttcattaaagctttagatgtccctcgatgttctcaaacatctactcagaacgaaattaaggaactcatgacggtggattagctgacaacttcagaagtccagactcatttacaaaacaagcgacttcatacatagcgagttccagttgctacaactccaagttttagtcagtcagctgtatatctagcatgcttgtgcacgcacactgaatccattaagggtggcagttctgatactcctcacagtccactccatcaatccacacactcgggggaatcaccatcgaccacataaggtgaccacatgatggatcatgatga

SEQ ID NO: 27365 - DNA, 2396 bp, Glycine max
  Clone ID: TF_GmC577_2
gcgagaagacgacagaaggggagagaacacaaagacaagtttgacctggtaatcagtgatgtacacatgccagacatggatggatttaagctgcttgagctagtgggacttgagatggatcttcctgtcataatgttatctgcaaatggtgatacgaagatggtgatgaaggggatttctcatggggcctgtgattatctgctgaaacctgtgagaatggaggagctcaagaacatttggcagcatgtaatcaggaggaagaagtttgactcaaaggagaagaacaaaaccagcaacctagacaaacctacttctaatagtggaaatggactagggtcatcaggaacaggaaattctgatcaaaatgagaagctgactaagaaaaggaaggatcaagatgaagatgaagatgaggatcaggagaatgatcttgacaatgaggacccatcagcccagaagaagcctcgggttgtttggtctgtggacctgcaccgcaagtttgttgctgctgttaatcagctaggcattgacaaggctgtacctaaaaaaattcttgatttgatgaatgttgaaaagcttacaagggagaatgtggcaagccatcttcagaagtataggctttatctgaaaagaattagctgtgtggctaaccaacaagccaatatggtggcggccttaggggttgcagatccatcctatttgagaatgagttcggtgagcggggttggacatgtacaaacattaagtggttccggacagcttcataacaataatttcagatcctttccacctagtgggataattaatagattgaacactcctgctggtttgaatgtgcatggatttccttctggagtacttcaattgagtcaatcacaaaatttaaacaatgccaatgatcatcataaattccagtcagtcattgttcctgttaatcagaatggtgttcagggaatgacagtgtctgtagggcttgatcaactgcaaaacaataaggttgttatgtctgttcagaacctgaccactgtttttgatgccaaaacaacttttcctatcccaaataaactcccagatccaagaccaaaaataaccaactctgtctctcatacttcagatgtgcatttctcaaacaatgccttgatgttggaaccacgccctcaaggctcacaagggagtgtaagaattggaacattatcttcttcagtagcctctcaacattcggaattttctttgtctttgctggatcaaggtagatatagtgataattggacaagtgctgtgcagccatctgtgatccagacaaactttttccctccaagtgaatgttttaggcagactaatatacctcctgcagataacatggcttctgtacccttgcaaggtgggaatctaagtggtccatccatcacttcattgtccaggcaatcccatgattcaatgacagaaatgcactctgaaggaatgacttttactaacagacctgggcatacaagcagtaatgtgccatttcaagggtgggatgaccataatcaggatgctactcaccattcaaatattatgtcaataaactcactgactccagtcaatggggctgctgttcaagctggccatgcagcaacgaactcggtcttacacagaaacttggattttaattattgtgatcccttacaaatgaagcatgaagggtttgtggagttaactgatgagaccttattgaaacaacatcaggggaataccatggaccagcaaaaatctcaagaaaatcatttctctaataatcttggttcactggaagacttggtcagttcaatgatgaaataggagaaagataagatgaaacacttgatggaaacctcatttgcaataattactctggtgggttatctatgtggtagcaggtttggcagcacataccagcatatcatgcacatcctcgttgatgaattttgtagctttcattgtgtttaaccacttttttcttctcatagttactataggctttagcttctccagattactttttcctgggtaaagttttctaggtttgttccattaagggctttctaattttatacaaatgctttgttgtccttgccttcaggtccagcaatgcattatgaagtatcaatcactttgtttaatctacatagatatgctggcctgcaaattggacctagatcttctctcacagcctcacttgtagtgaggagagagagacaaaaggtccaggtggaacccacttgaacctgtgtctttctcactcctcgctgcactctgtgtagcagatggggagagatctggggttgcaaatttgtaaaatgttagggatccataaacaaagattgtagtgattatgatgaatgacaataaacatggatgcccccttttatgcttgg

SEQ ID NO: 27366 - DNA, 1833 bp, Glycine max
  unsure (1)..(1833): unsure at all n locations
  Clone ID: TF_GmC89825_1
gttttccgtccacgctttgacaaatcgccattccctatatattccttctcatccctccttctcaaacngtttttcctttccttctcacacccacaaaactcataactcaccaacacacaatcaaagaggaaaaaaaaagaagcttcaaaatttcaatgcaatttgctgagaaaatgcaacccttgaaaatggggttccgtgagtacatcgaagctttggaggaagaaaggaaaaaaatccaagttttccctaaagagcttcctttgtcattagagcttgtcacacaagcaattgaggcgtgtaggcagcaattgtctggaacggttgcggagtacaatttgaatgcccaatcggagtgttcggagcagacatcaacggatggacctgtttttgaggagttcattcctataaagaaaagggcatctcaagaatctgttgaagaagaagatgaagatgaagaacattttcataaacacaaaaaaaccgccactgataaaaaaaaatcagattggctcagatccgttcagttgtggaatcccaatccccctcctaccaaagaggacgttgttgtgcctaggaaaactgatgttgtggaagtgaagagaaacggtggagcttttcaaccgttccaaagagaggaaaaaagtggtgatgcaaaggctagtattaataatgatgcatcagcaattggtaaagcaccctcttcaccaccagtgcctgctacaagttctacaggaccagtgagagtagaaaacaaaaaagaagagaaaggacaagctcagagaaagcaacgcaggtgttggtcacaggaattgcacaagagattcttgcatgcacttcaacaacttgggggtgcagactctgccacgcctaaacagatcagggagctgatgaaggttgatggcctaaccaatgatgaagtcaaaagtcatttacagaaatttcgtcttcacactagaagaagccccataatccacaacaatgcaagttcacaagcaggccctttatttcttgtggggaacatttttgttcagccctcagaatatgctgcagtagcaaccacctcaacagcatctggagaggaattgaccacagttactactactactgctccaactggaatatatgcacctgtggctgcacaccctccagctgtcacccacacattaccaattatgaagcagaaggagcattcacactctgaggaaagacctaatcatagtgttctttcaaactcacctgcctcatcatcctccacacacaccatcacaacttcaccacctgtccccaattgattttgatcaacttgttgtaaaaaattttgtaaacatattctagtacaaaagaaagtctctattgttattctcttagtgtatgtttagattaatttattttaagaaaatagttttattttctgtattttaactagatgatgttttcagttttcacaaataattaatattcgaaaaaacaaacatgttaaactacaaatcacccttttagctggctacactaatatttcctcagcagtaaaatatgtaactgactntttaaagcatcttggatttggaagcacgttcaacatccattaattttaaagtaaagtgttttatctttagatgttttaatttaaaaaatgagttattaattaaatggagtatagaatttttattcaataccaatggtttcattcaatgcctctagtatttctcaactcaattaattttataccgaaaataatttccttgatataaattaaatgtgggactatttaatttaaaatacaataaatggaaattttaatggaattttaaatgatctaatctgaattta

SEQ ID NO: 27367 - DNA, 2060 bp, Glycine max
  Clone ID: TF_GmC606_1
ggactctcctctcaaacaacatggtcaatggttgcttctctagttctccacgccacgatgcttttccagctggtttgcgagttcttgttgttgatgatgatctaacatggttgagaatccttgaaaagatgctcaagaagtgcttatatgaagtgactacatgttgtttagcaacagaggccctgaaaaaacttcgtgaaaggaaagaagcatatgacatagtgatcagcgatgtgaacatgcctgacatggatggtttcaaacttctggagcaagtaggacttgagatggatcttcctgttatcatgatgtctgttgatggagaaacaagcagggtgatgaaaggtgttcaacatggagcatgtgattatctccttaagcctataaggatgaaagaactgcgaaacatatggcaacatgtctttagaaaaaggatgcatgaggcaagagattttgaaagccatgagggttttgactttgagggcattcacttaatgagaaatggatcagatcactctgatgatggtaacctgtttgctgtagaagaaactacgtcaattaagaaaagaaaagatgcagataacaaacatgatgacaaagaatttggagatcattttcccacaaagaaagctagagtagtttggtctgtggatcttcatcagaagtttgtcaaagcagtgaatcaaatcggatttgatattggtcccaagaaaattctagatctgatgaatgttccatggttgactagagaaaatgttgctagtcacttgcagaaatacaggctctacttgagtaggttgcaaaaggaaaatgatcagaaatcttcatcaagtggaataaagcactcggattcaccttcgaaagatctaggaagttttagttttctgaacactgcaaacaagcaacaaaatgatattgccactgacagcttcagttattcagatggaactttactaattcagatggatgctacaagttatgaaggtgatctcaagggaattgtgtcagagcctacaacagaaaaaagaagagcttccactagtgaaattccggatccaaaggtacaaaaaagttcgcagaagagcctcaacaaaccttttacatctgtagagtcatcagaagcaaaccatgcagtctttgattgcaccataccaacagaatactcttggagtgagtttccaaaaggtccactcaaagaagaacagaagacacctgttcaattagaggatagcctctgccagttgccattgcatggtacacagcatcacattcagattgatcaatcacaatcaattgcctcaattaattccaatccctctataacagaagaagaggttgctgccaaattagagaccaaacctttgtatgctggttacgagagtgattatgtgaatcctgtgagttcaataggatctgcagttgaagcctttcgtagtcagtccaaaagccttatggtgagtgatcaatcttcagagcccactttcacctcgaatttgagcttgaagactcagggattcaatctagattgcatttctgatctggatttttaccaaaggaacctattattgggtggtgaggtagcttctgcacctttggatgaggacctgaatttctttttgctacaaagtgaatgctacaacatgaattttggactgcagaatatagatatgtcagagtattatgatccaaggcttactgctgaagtccctagccacttttatgattcagcagattattcatcggtagatcaaagtctattcattgcatgatcggtcctgctcttcccttttctgcatcttcaacaaaaatccaactaaatgcacgaaaggacgatttactgtcacaacttgaactttctttttcctttccaagaatatcaactttagggggctggggtattcttttttccaattagaaaggattttgatattgaagcacagataaaagtggatgatgtgtgatgacaaacgttaagcttatcaataagcttgcttcctttaatactaataactgaatatttggagaagcataatcttgtgtttgtaagttcagagtgattc

SEQ ID NO: 27368 - DNA, 2206 bp, Glycine max
  unsure (1)..(2206): unsure at all n locations
  Clone ID: TF_GmC13720_1
acaatttcacaaatttagaaagaaaaaagaattattcaccattatttcattcatctttctttactcactttccttgtcgcaaccacacacccaccgctgaatctcccgaaatatcttcaaaacacaagaaattcaatttgtgctttcttttccttctcttctttctatctatccaaatccaattccacgctccttaatttatttattttttttctcttcggatccaaattcaataccataaccgtttcagtttcagtttcagtttcacatatatatccctgtctctgtttgggttagggacatagaagagtgtgtgagagacggttatatatatatatatatatatatattttttttttttacggttacaactaacccgcgcgaatgcggcacgagagacgagcgagtacgacgaagagcgcgtgatggagtgggaggcgggtctcccaactgccaacgatctcacgcctctctctcagccgctgatcccgccggaactcgcgtcggccttcagcatcttgccggagccccaccgcaccctcctcgacgtcaaccgcgcctctcgcaacacgctctccacgctccgcggcggcggagggagcgtgcaccaggccttctcctcctccaacaacaaccacaactacgacggcgacggcgacggaggcgtcgaggaggaggaggaggaggacgacgatcgcgacggctcggggccggattcacggaagcagcggaagatcgactgcggcgcggccgaggaggcggactcggcggttcagacggagacctcggcggagcggacggcggtgaagcggccgcggctggtgtggaccccacagcttcacaagaggttcgttgacgtggtggcgcacctcgggatcaagaacgcggtgccgaagacgattatgcaattgatgaacgtggaagggttgacccgcgagaatgtcgcaagccatctccagaagtatcgtctctacctgaaacggatgcagggtctctccaacgagggtccttctgcttcggatcagttatttgcgtcgacacctgtgcctcagagcttgcatgactctgctcctcccagtaaccatagcaatggtcatgggcatgggcatggccatagcaatggccgtggtcatggtcatggtcatggtcatggtcatctctctgttccgatgatgtccatgccatatccacctcccctgatgtccatgccatatccacctcccatgatgtcgggcatgccccatggccacatgggcatccccatgcctaattcctccgccacctcagcttaccatccttataatatgttgcatcaaagggattggcctcaccttgctcctaatgataaatgaacctataaggtcagccatcaccatcatatgcaaaagattcaaaggcttgattattggtagtatagctttctgagaagggaggagctgcattgatgattaccctgtaattcactcaaaaggattattgaggaagtatatgaagaagagtatatggagctagattacaatcttagtcagtagtgtgtatcctgtgggagatttacaaacttattggtacacatctctaattcctgtcacctaattgtatgacgagaattctggcttatttcttctggtctgcctagacagctgattctaaagtaaattcttaactggttctctgattcataaattatagattcctattatattgtgtaatcctgaatgtgttaactctctttttcagaaccattgaataaaagaaagactgaacaacagacagcaaacatttataccaatgctctggcattaaatgtttttctttatcttatagccttgatcattatttatttcctttgaaagagatgttccatttttttgaattgggtgctgtaggctctcatgttaaagaaatggtacactgggagtggaacgggagaatttttaccttgtgtaacacacgcatacacacattccgacctggggaattcttgtttaacccataacgcaattcacttgtctcctttttcctgtgagaatttcaactggacttgctgtctttttggtggtaatgaacaaaacctccaccattctatggtttaatcgattaaaagagtatgcactcttacgagaaaggcaaaaatctattttgagcaaaataaataggagtttggggaagatcgatattctgagtttttnnncttcnnnnnccatta

SEQ ID NO: 27369 - DNA, 2110 bp, Glycine max
  Clone ID: TF_GmC381_1
tgggtctcccataacacaatcttgaccttttttttttttcctgtttctttcttcttcgcttatcggaggggcttcaagtttcaccataggatggtgtataggttgatacatactcatgaagggcaagaagacatgcagggtggctccaatcacgctgtgcccacagacaataaccctttataaaaaaaaaaaaaatctcggtctgttttttttctcttctttttctctctctctctcgccaatatcctttccagtcgtgccggcttaaaagagcagaaagggacaagatcccggaaaggcgtgccagcgtcagagagactcatcagttctcactcgtacggcgcttttgctttgctttgcttcatttctttcatcgtcatcataaagttcgttcctttctcagttttcacccatacccagatgagtaacagcaccatctcggatctgtgtccctcctttgagtgaaaaaggttcaatctttggtctctggggctgttggggttccgtcattgaagaagaagaagaagaagggtattattgttattataatcatgtacccgaggctcatacacccccacgatgggattgtgacgcaggatgagttgcagggtggtgctgcttccaacctctctcacgctcacaagggtgacccttgtctcgttttaacggctgatcccaagcctcgtcttcgttggactcaggacttgcatgaacgcttcgttgatgcggtcacgcagcttggtggagctagtaaagctacaccaaaagcaatcatgcggactatgaatgtcaagggtttgactctgtttcatttgaagaggcatcttcagaaatacaggcttggtaagcaatctgggaaagatgtgggcgaaggatgcaaagatggttcatatcttttagaaagccctggtgctgataacacttctccaaagttgccaactcctgatacaaatgagggttatgaaatcaaggaggcattgagagcacagatggaagtgcaaagtaaattacatttgcaagtggaggcggaaaagcacttgcagattcgccaggatgcagagaggagatacatggcgatgctcgaaagagcttgcaagatgctggctgatcaatttatcagtgctacagttatagacacagacagccaaaagttccaaggaattggaagcaaagcacctagaggtaccttggttgatcctcttggtttttactccttgccatccactgaggtatccggagtgaattgtcccggaagaagaaatactgccaagtctcccaccccaaagggccgattgttcaaccgaaagttgtttaacctcacatgagagctctggaggattggctttagaaggatctccaggcgagggaaaaaggaggatgctaggcatggactctatggcagcacctttgatctggagtgaagctaagatgagaactcaagccatcaatgtagctcaaggtaatcatcctcaaggaataactaggtatggcatgtagggatggaaggtcttcttgatggttcatcccctcataatatataaacctttgggcttcatgcattccctttttttatgggtacttgaactcttcatgtcttgtaagttagtgagacataggtggaatcaattttacccctttgtaaattcaatctactctgtggctttaaaaattgcaaaaaactagctttgactatacaaaatttgtgtgttttggtgacttctatggattccttattgttcattgattcatgctgaataaagggtgtgacgtcctttccttcaagatatagagtcattattaaactcttgaactctaaaaaaaaaaaaaaaaaaaaaaggttagttcctcatgaagagagttcatgacattgtgctttgtcccaagcttttaggattaagtactgagtagggaaggttagctcctcatgaagagagttcatgacattgtgctttgccccaagcttttaggattaagtactgagttagattattatcggttgttgtccattaagttggtgagaatcaacttatctcacatcattgtgtaaattgaaatactatatggcttaacttggcccgtcactaaatgttggcgctgaccatttatgatc

SEQ ID NO: 27370 - DNA, 1744 bp, Glycine max
  Clone ID: TF_GmC59217_1
cgagaagacgaaacaaggcaggcacaaacaaggcaaagcaccacaagttgacagtgagagcttatatattattaccgtcaattcttataataacacttgcaaatagagcattatcaactttcgacctttcataggtatagtaaagtgatcattcagggaaaatgtaccttcatcagcaacatcaaggaaaaaacattccttcttcttccagaatgccaatcccctctgagaggcacatgttccatcacacaggctcggagaggcatatgttccttcaaacaggaaatggctctggtgattctggacttgttctctcaactgatgctaagcctagattgaaatggacacctgatcttcatgcaaggtttatagaagctgtgcaacaattaggaggagctgacaaggcaactccaaaaacggtaatgaaactcatggggattccagggcttaccttgtatcatctgaagagccatctccagaaatacagattgagcaagagtctgcatggacaaagtaacaatgtgacacacaaaataaccataaattcaggtgcagcaacagatgaaagactcagagaaaacaacgaaactcatatgaatagtttaaaccttgcccctcagtctaacaacaagtaaaaaaatttcagttttcacacatgctttcttaagaactttctaatttctatcactaaaggttttatactgacattcattaacttcccttgtacctggcagagatttatacataagtgaggcactgcatatgcaaatagaggagcggagaagactaaatgagcaacttgaggtgcaaagacttctgcagctacgtatagaggctcaaggaaaataccttcaggctgtgttggagaaagctcaagaaacacttggaagacagaatttgggagcagtaggacttgaagctaccaaacttcaactctcagagctagtgtcaaaagtgtcctctcagtgtctgaattcagcattttcagatcggctgaaggagatacaaggatttagcccccaccaacaaacacaaaaccaaccagccaaatacaaatgactgttccatggacagttgcctcacatcttgtgagggatcacaaaaggagcaagagatacaaaatggagggatgagcttaagacccttcaatgttcacacattcatggaaagaaaggaagtcatagagggtccaaatcttaataatctaccaaacactgacctcaattggtgtgatccagtgaagaagaataccttccttaccccattgagcatgcatgcagataaaagaagtccaagcaacttgtctagcattggattacttgaaggagaaacaactgagaatagaagcaccattgttaggacagaatcaattaaaccagctgtggctgagaaagtttctcaagattatggattgccatctaactactttgctgcttcaaaactggaccaaaccactgaagataataaagacactaaaactagttgcaaacaactggacttgaatggattcagttggaactgatgagaagagaaagcacaatggaagcacacagaaagcaaagttactccaatttctggcaggaaacaatgtatttactgtaaacaatgtatcagcttctgtttctttcagctcatggtggtcatgactagccaaatatgagttacttttagtagaatgcaaagttgcaactaacaaatttgtaagcagtaattataatggatatagagtatctcgttttattcc

SEQ ID NO: 27371 - DNA, 1383 bp, Glycine max
  Clone ID: TF_GmC381_2
gagaagctgagcgtgaaatgcaaaaaagaagagaagaaagtgacaaaatcccagtaaagcgtgacagtgccagctccctacctcaaccccaaagtcttgtgcttttcacatccccattttccccattcccctttctgcttcctctttctttcgccaaatgggtcatcatctccttctcccataacacaatcttcttcaccttttctttcttcttcgcttcccttcggtggggtttcaagtttcaccataggaataggatgttttctaggttgattcatccccatgaaggccaggaagacatgcagggtggttccaaccacgctcacctcggagacccttgtcttgttctcacctctgatcccaaacctcgtcttcgttggaccgctgaccttcacgaacgctttgttgatgctgtcactcaacttgggggtgccagtaaagccactccaaaagcgataatgaggaccatgaatgtcaagggtttgacgctctatcatttgaagagtcatcttcagaagtacaggcttggtaagcaatcaggaaaagattctgatgagggactcaaagatgcttcatatcttcaagaaagccctggtactgataactcttctccaaagttaccagcttctgatgctaacgagggtcatgaagtcaaggaggcattaagagctcagatggaagtgcaaagtaaactacacttactagtggaggcagagaagcacttgcaaattcgccaggatgcagagcggagatacatgggcatgcttgagcgagcgtgtaagatgttggcagatcaatttattggggatgtaattatcgacagggatggccaaaaatttcaaggactggaaaacaaaacatcaagaagtcccctagttgatcatggaggcttttttcccgcagcgtgtactgaggtgggtggaatgcatgtttcagaagtaccacccattctccagcctcaaggggctgagtgctccagtgaaagttgcctaaaatcacttgagagtctgggagggttgacactagaaggatctcccggcggatcaaagaagaggatgctgaacttggactcaatggtagcacctttgatctggagcgaagccaacaccagaactcaaggaatccatttagcccaagttaatcctccaggaatgactaggtatggcatgtaggtaggatagggaaggctagttcctcatgaagagagttgaggacattgtgctttgttccaagcttttaggatgaagtaccgagttagattcttatctgttcttgcccatcaagttggtgggaatcaacttgtctcacatctttgtgtaaattgaaaatactatgtggcttaacttggactatcactactaaaggttggcgctgaccattgac

SEQ ID NO: 27372 - DNA, 1327 bp, Glycine max
  Clone ID: TF_GmC381_4
ccacgcgtccgatctccttctcccataacacaatcttcttcaccttttctttcttcttcgcttcccttcggtggggtttcaagtttcaccataggaataggatgttttctaggttgattcatccccatgaaggccaggaagacatgcagggtggttccaaccacgctcacctcggagacccttgtcttgttctcacctctgatcccaaacctcgtcttcgttggaccgctgaccttcacgaacgctttgttgatgctgtcactcaacttgggggtgccagtaaagccactccaaaagcgataatgaggaccatgaatgtcaagggtttgacgctctatcatttgaagagtcatcttcagaagtacaggcttggtaagcaatcaggaaaagattctgatgagggactcaaagatggaatgtcagcttcatatcttcaagaaagccctggtactgataactcttctccaaagttaccagcttctgatgctaacgagggtcatgaagtcaaggaggcattaagagctcagatggaagtgcaaagtaaactacacttactagtggaggcagagaaacacttgcagattcgccaggatgcagagcggagatacatgggcatgcttgagcgagcgtgtaagatgttggcagatcaatttattggggatgtaactatcgacagggatggccaaaaatttcaagggctggaaagcaaaacatccagaagttccctagttgatcacgttggcttttatccccaagcgtgtactgaggtcggcggaatgcatgcttcagtagtatcacctattcttcaacctcaaggggctgactgtttcactgaaagttgcctaacatcacttgagagtctgggagggttgacactagaaggatctcctggcggatcgaagaagaggatgctgaacttggactcgatggtagcacctttgatctggagtgaagccaacaccagaactcaaggaattcatttagccaaagttaatccttcaggaatgactaggtacggcatgtaggtagggtagggaaggttagttcctcatgaagagagttcatgacattgtgctttgtcccaagcttttaggattaagtactgagtagggaaggttagctcctcatgaagagagttcatgacattgtgctttgccccaagcttttaggattaagtactgagttagattattatcggttgttgtccattaagttggtgagaatcaacttatctcacatcattgtgtaaattgaaatactatatggcttaacttggcccgtcactaaatgttggcgctgaccatttatgatcattgccttgattttc

SEQ ID NO: 27373 - DNA, 635 bp, Glycine max
  Clone ID: TF_GmC381_6
cacgcgtccggcagagagcggcaaatgcaaaaaaggaagagaagaaaggaaaagcagcagaaagtgacaaaatcccagtaaagagtgacagtgccagctccctcaagccaaagtcttgtgcttttcacatccccattttcccatttccctttctgcttcctctttcgccaaatgggtctcccataacacaatcttcaccttttttttttcctctttctttcttcttcgcttctcggtggggcttcaagtttcaccataggatgttttctaggttgatacatcctcatgaagggcaggaagacatgcagggtggctccaatcacgctcacctcggagacccttgtcttgttttaacctccgatcccaaacctcgtcttcgttggaccgctgaccttcatgaacgctttgttgatgctgtcactcaacttgggggtgccagtaaagccactccaaaagcaatcatgaggaccatgaatgtcaagggtttgacgctctatcatttgaagagtcatcttcagaagtacaggctaggtaagcaatcaggaaaagattctgatgagggatgcaaagatgcttcatatcttgaagaaagccctgagactgataactcttctgcgaaggtaccagatgctggc

SEQ ID NO: 27374 - DNA, 716 bp, Glycine max
  unsure (1)..(716): unsure at all n locations
  Clone ID: TF_LIB4390-015-R1-K1-H4
tgcaaatgaggagaaagcctgctatatggctggggaatgtagtcaagccatggcatcaaaaagtaatgccgaccagaatataaaactgggtcaaaaaaggaaggaacaaagcgaggatgaggaagaggaagaatatgatcaagaaaatgaagaaccctcaaatcagaagaagcctcgtttagtttgggatgccgagttgatatgatantcttgctgcgattaatcatctgggaattgacactcctaacgtgaggtttcaacttttattgcagaggctttccccaagagaatactggacctgatgaatgttgaaggacttacacgagaaaacatagcaagccatctgcagaaatacagactcggtctcaaaaaatccactcaacagcctagcatggttgctacgttgggtaatagtgatccttaccagcagatggattcaatagaaggctttcgcactttgtcgggatcaggaggaatgataagcaccacactaccatcatatgcatctggtggactgttttgtaggctgaactccccatctggcttgagaggaattaactcttctcttcttgttcagcctgttcattctcaaaacattgatagcaagtccataaaaacacttgggaacatgcagctatccatgttttctgcanatcaaacctcaagtttattacaggggcattccaacatcaatcgatgggtaaccattttcagca

SEQ ID NO: 27375 - DNA, 504 bp, Glycine max
  Clone ID: TF_jC-gmro02800038h07a1
ggctcgaggcttcttgcatgcccttcagcagcttgggggtgcagatactgccacaccaaagcaaattagagagataatgaatgttgatggcctcacaaatgatgaagtcaaaagccatttgcagaaataccgtttgcacactagaaggccaagtcccatggttcacaacagttccaatccacaagcagcaccttttgtccttgtaggaaacatttttgtccaatcaccagaatatgcagctgtagctacctcaacagcatcaagagaagtggccacagttgcagcacctgctggaatttatgcaccagtggccacacaccctatacctgtttcacacccaccagctgattcaattaagaatccacagtttaagaaggtacagctgtttgagcattcaatttcagatgaaagggctaatcacagtgaaggagctgttcattcaaattcccctacctcatgctcctccacacatacctctacttccctggctattgagtttaagat

SEQ ID NO: 27376 - DNA, 949 bp, Glycine max
  Clone ID: TF_GmC436_1
aaacggctgcgaaagaacgacagaaggggacaaagaaaacattctatggtcgatgctgctgctttcatattagatgtaaaacataacaagtcttatttatacacatattctttcattgagccttctcttgctgttaatttctgcacgacgtgaaagcgaagaaaaatgaagaattctaagaaaacttgcgcgcggaagtaccacaaatcggaaaatccacgcttgcggtggacacctgaactccatgaatactttgttgaagttgtggaaggtcttggcggaaaaaacaaggcaaccccaaagagcattctgcatatgatgcatgtgaaaggactgaggatctctcacattaaaagccatcttcagatgtacaggaacatgaagggaggtacgattctcacatcaatgcaacaggaaatggaagaaaatgtgcatgttaaggatcatcacccaatctgctccaactgttcatcccaaagcataatcttcagatcacaaggaactaaatttaaattaaaggcatcaaaatatgatacggggattgtcaatcaagaaattcacccgctagaaaataaaggactttcgcagaccagtgaaactgattatgatctaaatcaggaacccgagtcaagtgcatgcttatttagtgaatcgtcaaatgaagaaaagagtaggacaatgaaatttcttgatctctcactctctttcggctcttcaccaattccaacaatggacggtgatcaagagagaatgcgtttttcttcaccaaatacagcagataatcatgttatcgattctaattctgtacaatctcatgggagcaattatataaatttagacctaacaatatgaatatgtatcatttctgtaaccacgtacgcaatatttatcatagatttagggttttggcaaagatttataaaattaaagctttaatgaattattctat

SEQ ID NO: 27377 - DNA, 647 bp, Glycine max
  unsure (1)..(647): unsure at all n locations
  Clone ID: TF_GmC381_8
ggcgccacgcgtccgagatgagtaacatcaccatctcggatctgtgtccctcctttgaggcaaaagtgatgagttgcatggtgcggctgcttccaacctctctcacgcgtccgctttttttttttttttcctcttaacggctgctccccttcccggtggggcttcaagtctcaccataggatgttttctaggttgatacatcctcatgaagggcaggaagacatgcagggtggctccaatcacgctcacctcggagacccttgtcttgttttaacctccgatcccaaacctcctctgtttcagtccgctgaccttcatgaacgctttgttgatgctgtcactcaacttgggggtgccagtaaagccactccaaaagcaatcatgaggaccatgaatgtcaagggtttgacgctctatcatttgaagagtcatcttcagaagtacaggctaggtgagcaattcggaaaagattctgatgagggatgccaagatggaatgtcagcttcatttcttcaagaaagccctggtgctgataactcttctccaaagttccccggtgctcacgaggggtctgaagtcaagggggcctttttgagccccgttgggagggcaaagtnaacttcccttactagggggggcggggaagc

SEQ ID NO: 27378 - DNA, 1848 bp, Glycine max
  Clone ID: TF_GmC498_1
caaaagcaagagcctatagttgacggcgttggttggggttctaagattgttttgtttgagttaaacgcgacaaactcaaatacgtgtgcattacaactcctaacccctcaccatcctcttcttctctctcattcatacccctccttttttatttgtattctcagctttttagattccgtttctggtttttcccaattccatagtactctgttatcatcgtcatccctttataggacagacaaagctgattcacttaggagcctcgagagctatgtctacatcttctcgtgctcttcccactccattggaaaacaagtatatgaaacccccagattcttttcagctttcgccagtcagagatctgactgcaaattctgcctcatcaaattcaatcagaagtgctgggaagatgttttcttcaccttctaaatgtcccgatgacttccctttttcctctgtttcacagcatgataggcaatatcaagatcccccctttgtttctcagacaattggtgatagcgtgtcttccgaaatacattcaatgacattcatttctcaccctcaagaaaatgaagatctttcctggggaccagatccatgtcaggatattcttggctttcctgaaaatgtttctgtccagcatgatcaggtggaaaacaatggttgttacataaatgatgataatgtcaaaagatctgattttggggagtgggttgatcagttaatgtcaattgatgattctcttcacccgagctggagtcagcttcttgctgatgacaatgtagcagaaccaaaaccaaaggcatctcaggttcctccgcagcagcatataccatctggagaagttgttggtaattcagcatcaactgcatcgcagactaaggctagaatgcgttggactccagaacttcacgaggcctttgtggaagcagttaatcaccttggtggtagtgagaaggctactccaaagggtgtgttgaatcaaatgaaagttgaagggcttactatctatcatgtaaaaagccacttgcagaagtatagaactgccagatacaaaccagagccatcagaaggaacgtctgagaaaaaggtgactccaatggaagaaatgaaatctctagacttgaaaacgagtaaggggatcactgaagcattacgtttacagatggaactccagaagcgacttcacgaacaacttgagatccaaagaaagttgcagattcaaattgaagaccaagggaaacgtcttcagatgatgtttgagaaacagagagagatgggtgacagcaaggttaacgtctccttggacgagccttctgctgctgcaccatcagacacagtagaaaccacaaatgaggaacgccacaaatttgaaagcattccaaaagccatacccgaagagaaggagtcaagcacaacaaaacaaattgcaggtgaagctgaagaaatgatcaaggaagatgaagttgcaccacccacaaaacgggtgaaaagttcgtaacagcaggatcgttgttttatgccttctagatttgtttaatattcttagactggtttggactccatggaacttgtagaaatattattggatccaaggatgtttcaacttgctcatttatcacagccatttcctatgaaaatatggcatgagtgccacaagtaatggtggctcattgtgatggaaattttgttaccatcctcttagtggtccttgaggtttttttttttttcttttctttttcacatgtaaactagcatttatttatacctgtgtttaatgtattatatagaaaatcagaattgaaaaataaaagtaatattaagactccaaagaaataatacattttc

SEQ ID NO: 27379 - DNA, 1734 bp, Glycine max
  Clone ID: TF_GmC1091_1
cattaccaccctttctctgtctctctctctctctcgcccccaccaaaatctcaaaggaagaagccaaagaccctcttttgctcttgtttgttcccacataccaacctgttcctattttggcatgaacatatcttacacagtgtgaacttgttaattagttggttatctatacacgtgaatttaaagaatggcatcaccctcagaactaagtctggattgcaagcctcaaagctattccttgctactcaaatcatttggagatcaaactgatcattcctacaagcttgaagaattcctcaatcgcttggaggaagaacgcctcaagattgatgctttcaagcgcgagcttcctctctgcatgcaacttctcaccaatgccatggaagcttcaaggcagcaacttcaggcctttaaagtaaaccatggagcaaagccagttctggaagaattcatacccatgaagcacttagcctcagagagctcagagaaggcaacaaacatgtctgacaaggcaaattggatgacatcagcacaactatggagccaagcatcaagcgaaggaaccaaacaacaaccaccaatcacaacccttaaagaatctgatataggcttcagcataagcccaaagttggctcttgacaacaaacaaaggaacggtggaggagccttccttccattctccaaagagagaaactcttgccagggctctacattgcggcctctccctgaacttgttcttgcctctgcggagaaagaaatggaggataagaaacgtgcagaggtagaaattaagggagtttcgtgtcagagtaggaaggagaattcaggaagtgatggagctgtggttgatcaaggaaaaggtggtagcccagttgcatcgtctcatgcacaaacaaccacaaccactactagtgcacaaactcataggaaagctagaaggtgttggtcaccagacctgcaccgaagatttgttaatgctcttcaaatgcttggtggatcacaagtggcgaccccaaaacagataagggagttgatgaaggttgacggtttgaccaatgatgaagtaaaaagccatttgcagaaatataggcttcacacaagaagacccagtccaagtcctcaagcgggtgcagcagcaccacagcttgtggtcctcggcggaatctgggtcccaccggaatatgccacggcagcacacacagccacccctactctctacggcgcccaccctacctcccacgcgccgccgccacattactgcgctgccactcccatgccacaagacttctacaccacggcgccgccacagccgctgcttccgccgcctccgccgcaccacaacgctctgcaccacctgcacatgtacaaggcggcaccgcacggccaaggctcgccggaatccgacgttcccagcaacggagagcgatcggagagtattgaggatgggaagtcggagagtagcagctggaagggggagaatgaaggggagaggaaagggattagtaaagggagcaatgggagtgagatcactctcaagttctagggttttagaattagggttttgcttgcatcccataaccgatgcatgttcaactactattcattattgttcaacaaaaatggggaaaaaaaacaaactaagtagaacaaaatatccttggtggtactttttgcctatatttctgtggtaaaaaggcataaaactggacatttgttttgtattttttgctttac

SEQ ID NO: 27380 - DNA, 1572 bp, Glycine max
  Clone ID: TF_GmC496_1
acgacgtgaagagcggctgcgagaagacgacagaagggggactacatgcttggccaaagctcctgtgctctgtatctcagtcttcggtatcatcttctgcatccagactacttgttttatagaataaggaagttgcagaagaatttcaagcttcgtgtggttttatgccatgttggaagatgtaataaagcctcttcttgaagttacaaaaacagctttgcttcatgactgtacactcctatatggatggagcctggaggaatgtggccgttacttggaaaccataaaagtctaagaaaacaagcctgcagacattattcaaggccaaatggatacagattatctatcaaggctaacacatgcccttacaacagtccggcatgttaacaagactgatgtagtcaccctcggtaccacatttgggtctctttgtaacattatgggtgcatctatggaagatctagctcgttgccctggcataggagagcgcaaggtcaagcgcttgtttgacacttttcatgaacccttcaagcatgtggaatccagccggcaagccattccagagacttctgtccagaacaagccagctagtccgtccagtctcatcgatcaggaacaatgctgaatcttcctccttgattgaagacaagcatgaggatgcagaagatgtgagctaacgtaggaagaaagaacttgaagttactgtcaaatctgccctttctgcagcttttgccaaatattctggtagagttggaaagaggaaaagcacttcacaggtggaggaaaaaggagaatcaattatttccaaagaatcagaagctgaaacataaaattaccatgaagtttttcactggttcaataatttacccataaacaagataatctcatgagattaagaggcttcatttttaatctctatgcatgtaaagccatggaactctattgggagtgtaaaggggaacatctctaacaaatgaagaggtagttagttgtaatatgatagctgaactgttaggtagttatgaggctttaatcaaatgggaaggaagagaaaggagagaggtggggtcatatggttataacaacaaatcgagggaagaatggattttcggttgttgagaattgagataagttgggagggagagttagtacctttgaaattcttgatttgagtgatattcttatctttgtaagggaatcaattatttccaaagaatcagaagctgaaacataaagttaccatgaagtttttcactggttcaataatttacccttaaacaatataacctcatgagattatttaatctctatgcttgtaaagccatggaactctattgggagtgtaaacgggaaacatctgtaacaaatgaagaggtagttaggaggctttaatcaaatgggaaaggaagagaaaggagaggggtggggtcatctgggtaattgggtataacaacaaattgatggaagattagattttcggttgttgagaattgagataagttgggagggagagttaggacctttgcaattcttgatttgagtgatattctcatctttgtacattctgtcaaa

SEQ ID NO: 27381 - DNA, 827 bp, Glycine max
  Clone ID: TF_GmC184192_1
aaaaataattgacagggatcacactttttcaatgatgagtaaaatattgggattaattacaacatacaagaacacaaagcaaactgaatagattgctagctctagctgcggcaatggtacaatgataataaattgaaaagaataaaaatcacactttatagactaaatttaaaagagctgagaatggacttcaaccgagtattgaatcttcagctttatcttcaaatagcgtttttgcagcttttgtgaacaagttatgggcctgcttggaagagaggcctatcttctccaaatcatttaacgattttaggggactttcttctctaaggtctattatgtattctgccattttctctcctataccctttaactctagtagctcctctctgcttgcattattcaagaaatcaatgtattcttgaactaaacagttcttcagtgtaaaacttcgtgtgctgaatttgccaactcgagcatgatccttttactcccctttattctctgagcaggtttgaattgaaatcaattttaattcaaggggttactcattaccaaggatggagataccaaggagagcgtttgctctacctccttgcattatacaagaaataacagtattcttgaactagactgcccttcagtgtagaacttcgtgtgctgaatttgccaagtggagtgtcattcttttgtggccctttattagtggagcaggttgccagaaaaggtgtttgtgattcaaggggtttctgattaccattgatgttgatgggggagagggcttttcttaaaggactttgtgctgcatctttactcttaatagtaattga

SEQ ID NO: 27382 - DNA, 1003 bp, Glycine max
  Clone ID: TF_GmC708193_1
ccttctcaatacaatttccaacacatctaataatattacactagtcaaggaacatctcataatattacacaagtcaagggcaactttgggttgccaatagatatattctccatggatatacattaatacataaaaaatattccagaaacttgtataaatcccgcaatgcatttataactaactgaaaagctctccgacttccttcttcattattcctttaacctgctttgctgaaagcccaatatccttcaaatcatccagactcttgaaaggttctggagattcttctcggagttcaagtatgaaggtagctctcttctccccgattcccttcaatttttttaattcctccttgttagctgtatttaaaaacctgaggtattcttgaacaagagaactcttcattccagaacctcgcatgctgaatgtctcccagggacttttggcattcattgcatccaatctgttaatgctcatgttttgttcaattgtaggagtttttggttcaacaatatcaagtggaatgggctccttttctggtatctgcatgcatgatggggttgaagaatatagcattttaagactattagaaagatcccgcaactgagaactgataggtggtgaactaatagtagccgatgaatcatctccgattgcccttgaattgttgttctccttgttcatgctatggtcttcctgaactatttttgccaatgcttcagagtaattccgggcataaggagtatgctccttttgatgatcctcctcatccaccgaaataccctgatctgctaggggattaagttccacttcaatgttagcattaaaagatgaatcatcattttgcaccatcagatcaagtttcacgttctctctagcttttgaaaatgagtcatccttttccactccagagttgagtacaacatgatttctggtcttcttttccattccagagttgagtacaacatgatttctggtcttcttttccattccagagttgagc

SEQ ID NO: 27383 - DNA, 1340 bp, Glycine max
  unsure (1)..(1340): unsure at all n locations
  Clone ID: TF_GmC202_1
ggcaatatattattttggcgcccctccaattcttttgaatcctcacccccacacaacaccactccacacattttcgttcttccctttcacccatctcatctcaacaattgaatctttgaggggtctttcagaatcagaatgatggcagcaactatggagcagcagcagcaacgcccccaacaacaagacgaagctgaagaaatacaacatggccctttacccgtcgagcaacttcaggcatcgggcatagccgccacggacgttaagaagcttaaagacgcgggaatttgcaccgttgaatccgttgcttacactcccaggaaagatcttttgcaaatcaaaggtatcagtgaagctaaagttgacaagataattgaagcagcttctaagctggtgcctatgggtttcaccagtgctagtgaactccatgcccagcgcgatgcaatcattcagataaccacgggatcgacagagcttgacaagatattggagggtggagttgagactggttctatcaccgagttatatggtgaatttcggtctgggaagactcagttgtgtcacactctctgtgtcacttgccaattgccactagaccaaggaggcggggagggtaaagctatgtacatagatgctgagggcacatttaggcctcagcgactcttacagatagcagataggtttggattgaatggtgctgatgtattggaaaatgttgcttatgctagagcatacaataccgatcatcaatcacggcttctgcttgaagcagcttcaatgatggtggaaactagatttgctgtaatgatagtagacagtgctactgccctctataggacagatttctctggaaggggggagctttcagctcggcaaatgcatctagcaaagttcctgaggagccttcagaaattagcagatgagtttggtgtggctattgtcataacaaaccaagtagtttcacaagtagatggttctgcagtctttgcgggacctcaaatcaagcctattggaggcaacattatggctcatgccacaactacgaggctagctctcaggaaagggagaggggaagagcggatctgtaaagtgataagttctccttgcttagcggaagccgaagcaaggtttcagatttgtgcagaaggagtttcagatgttaaagactaactgatttcagaatgtttgaattttttgttttcctatttgcatatcattttgtaaggtgtaccagttgactttcaacttgcaacttgcaagtatccagtatcaaaattttcaatatatgtcagtttggtgccccctattttttaaaaaaaaaaaaaatannnaagggcggc

SEQ ID NO: 27384 - DNA, 311 bp, Glycine max
  Clone ID: TF_LIB3242-368-Q1-J1-E12
ccggaggttgggaatcactattatggtctatgacacccttttattccacatcaaatacggatgacacgggctcttctaacacaggatggaggggtacagcacattcaattccacaagccatctcctacttaatactaccacctttgtcacttacatgctgatgactatgtatatattacttcaaaacataactcctgaaacacaaaatgatcatctaaagcaactaatacgctataatgttaaacaagaccggcccataaaaaacaaccaaaaaaatccctccctttcttttacaaaaggtgcagaccccc

SEQ ID NO: 27385 - DNA, 708 bp, Glycine max
  Clone ID: TF_GmC129_2
agaatacataaatgaactggtagaagttgataaagaaggggggaagcagctttgtggtgggacatttttgaaccctggatcatgggatgctgcacttcttgctgctgggactacactatctgcgatgaagcatttactgaatggggatggaaaagtttcctatgcattggttaggccccctggtcaccatgctcagccttctcaggccgatggctactgtttccttaacaatgcaggtctagctgtgcaattggctttagattccggctgcaagaaggttgcggtcatagatattgatgtgcattatggaaatggaacggcagaggggttttatcgatctaataaggttcttaccatctctcttcatatgaaccatggatcatggggtccatctcatccgcaaagtggctctgttgatgagctaggtgaaggagaaggttatggctttaacttgaacatacctctaccaaatggaactggggacaagggatatgtacatgccttcaatgagttggttgttccatccatccaaaagtttgggcctgatatgatagttttggttcttggacaagactctaatgcagtaagttattctatttttgctgttggcaatttatattttgatcattttagcattttattgcctagtttatgtagacttgaattcatgctctgagataaattaaaacctgataagatattagcaca

SEQ ID NO: 27386 - DNA, 2309 bp, Glycine max
  Clone ID: TF_GmC1634_2
ccacgcgtccgatcaatttcagaggcggagcctggaggctggagctgcttcaagtcttcaactatctgaatttctgaactcatccattcgttagcgcagctagaacgaaaactgagtaatggaaagtggagggaactcccttccatcagggtcagatggtgtgaagagaaaggtttcatatttctatgatccagaggttggaaactattattatgggcagggacacccaatgaaaccacacaggattcgaatgacacatgctcttttagcccactatggattgcttcaacacatgcaggttctgaagcctatggctgctaaagatagggacctttgcaagttccatgctgatgattatgtggcctttctgagaggcatcacccctgaaacgcagcaagatcaattgagacagctgaagaggtttaatgttggcgaagactgccctgtatttgatggtctttactctttctgccagacatatgcaggaggttctgttggtggtgctctaaagttgaaccatggagtatctcacgcgtccgtaaattgggctggtggtctacatcatgcaaagaagtgtgaggcttctgggttttgctatgttaatgacattgtgctggctattttggaacttctcaaaatacatgagcgtgttctgtatgtggacattgatatccaccatggtgatggtgtagaggaggccttttacaccactgacagggtcatgactgtttcgtttcataagtttggggattactttcctggaacaggtgatattcgcgatattggatatggtaaagggaaatattattcactaaatgttcccttggatgatggaattgatgatgagagctatcagtccttgtttaagccaataatgggaaaggttatggagatttttaggcctggtgctgttgtattacaatgtggtgccgactctttatctggggacagattaggttgtttcaatctttccataaaaggtcatgcagagtgtgtcagacatatgagatcttttaatgttccccttctattgctcgggggaggtggctatacaataagaaatgtggcacgttgttggtgttacgagactagcgttgctcttgggattgaactagatgataagatgcctcaacatgagtattacgaatattttggtcctgactatactcttcatgttgctccaagtaacatggaaaacaagaactcccgacatttattggatgaaataagagcaaaacttcttgataatttatctaggcttcaacatgcaccaagtgtcccattccaggaacggccacctgatgcagagcttctagagagagatgaagatcaagatgatagagatgaaagatgggatcctgattctgacagggaggctgacaatgacagcaatcctgttcgcagaagggtgaaaagtgaatgtgttgaagctgaggataaagatgcagtgttgggggtggactcaatggcagtggatgaaccatgcatcaaagaggagcaggataatttaaaagagctttctgatcacaggtcacgatgaagcaataataagcattattgatcaaccttctccttgactagtaaactgaagacatatatggtgcaagcttgccttggcttttgatgtttaatattactgcaagatgaatgtagtagttattttttctgtatgttacactatggtaggagcctttgtcaagggagcagctcattgttggatccgttgagatgaagtaataacattcatcttgtgtttcttggaaaaatgattaaacaaacacatgctttcaccataaatctagtttgtcatttatcgatagcggtgcttagtggcattgggccactacaaggagaccgttgcatctcagttcagtggtgcgtgcggccattgcggctgtatcccagagtggtggaacgtcagattgtttcaaatcttctagaagatctgtctgaagttgtttcaaaatcagtgtctgtcgccctgtaaattatagtttcctcctaaagcagtttggcatgcattcatctgacgtctgtagtgtttcaaatttttgctttatctggaaactgaaaagatatggtgcaagcttgccttggcttttgatgtttcatattactgcaagatgaatgtagtagttattttttctgtatgtttcgcaatggtagcagactttgtcaagggagcagcttattgttggatccgttgagatgaagtataacattcatcttgtgtttcttgcaaaaatgattaaacaagctcattctttccccataaggggggggggggggggggccccggggggcccagg

SEQ ID NO: 27387 - DNA, 1089 bp, Glycine max
  unsure (1)..(1089): unsure at all n locations
  Clone ID: TF_GmC974_3
ccagtgtgagcaagactcacttgctggcgatcgcttggggtgcttcaatctctctattgatggtcacgctgaatgtgttagcttcgtaaagagattcaatttgccattgctggtcactggaggtggggggtacacaaaagaaaatgttgctcgatgttggactgttgaaacaggagttcttctagatacagagcttccaaatgagattccggaaaatgattatattaaatattttgcaccagaattttctttgaagattccaaatgggcagatagaaaatttgaatagtaaatcatatcttagcaccattaaaatgcaagtcttggaaaatcttcgttgcatccaacatgctccaagcgtacagatgcaggaggtgagttcatacttgaaatagaatcaccccatctagtaggcaggctcaattattttatcataaaattgtttcttgtaaaaactgttttgactttagaggcactatgttactagctcttcaactttcttgtattcatgaactcttacaaatgtggttaatcatcaattatttgcattggaggtaaatctttaaacaattgaagtggaaaatgttccttcttatagaacttctaaattaaggtgagagtcgctagttagattggggagagaaaagggttcaaaacttgggtggtatttcaggaactaaatatcaacttgtgaatggctttgaatgggttctgcggatgtatgcatatcaggtggaggacattttgatatatggttgtatttctggctttatagtctagagctgtagttgtagttctgcattgtagatttttctgttttgacacctgatatctttttgtactgatacagctttgtttggatcacaccttgtggttcaaccatgctctttctttaatataatattcatttggcctcttaaaaaaagactgattcattaaaactgcttaagctgaaggaccacggccatggaaattgggcatttgggctctctttctcacatgagactganatctattatttagggtatgtatgttagtaaacttggaatgtcacaacttggcattaatactttcatgtctggagttgctc

SEQ ID NO: 27388 - DNA, 623 bp, Glycine max
  Clone ID: TF_GmC1790_2
ccacgcgtccgagacttgtgtgaatccaacggttcaaaaagttgctggagggagccggagaagatttcccgctgtcggctcgctgcttccaaaaagcagtgagggctgtgaggcgcttttggccggagttgcttctctcatcgtcagttgtcgttacgttggtcgaccgagtgtctgtgcagctaattctgcaaagcgaagagggaattttgttaggatggttgaatattgacaagagaaataacgggaaacaatagacatggataccggtggcaattctttaccatctgcacctgatggggtgaagagaaaggtgtgctatttttatgatccggaggttgggaattactattatggtcaaggtcacccaatgaagccacatcgtatacggatgacacatgctcttctagcccattatggattgctacagcacatgcaggtccacaagccatttcctgctagagacagggacctttgtcgttttcatgctgatgattatgttgcattccttcgaagcataactcctgaaacacagcaggatcatctaaggcaactgaaacgctttaatgttggtgaagattgtcctgtttttgatggcctctactctttctgtcaaacttatg

SEQ ID NO: 27389 - DNA, 1798 bp, Glycine max
  Clone ID: TF_GmC974_1
gcaaaagggaatggattttattgcacaggaataatcattcttgcaccattttgaggaattttttcagataagaccagtacaatagtttctttaagcacatagagtgattaggctggtagcaagcgcgacatggcactgcagtgcaggttaagctcacaccattgatatcactagccatattctcctttcgctaattcccgcaagctactactcttcttcaacgctctctctgcaaaagatgcgctccaaggacagaatcgcttacttctacgacggtgatgtcggtagtgtttactttggggcgaagcatccgatgaagccccaccggctttgcatgactcatcatcttgttctctcatacgatcttcataagaagatggagatttatcgtccacacaaggcttatcctgttgagcttgcccagtttcattcagctgattatgttgagtttttgaacaggattacacctgacactcagcacttgttcttgaatgaactgacaaaatataatcttggagaagactgccctgtatttgacaacttatttgaattttgtcagatttatgctggtggaactatagatgctgcacgtcgattaaacaatcaactgtgtgatattgctatcaactgggccggtggactacatcatgccaagaaatgcgaggcatctggattttgttacatcaatgacttggttttaggaatcttggagcttcttaaatatcatgctcgtgttttgtatattgatatagatgtgcaccatggtgatggtgtagaagaagccttctacttcactgacagggtgatgactgtcagttttcacaagtatggagattcgttcttcccgggtactggcgatgctaaggaaataggagaaagagaaggaaagttttatgccataaatgtcccattgaaggatggaatagatgacagtagcttcactcgacttttcaagactattatttccaaagtagttgaaacatatcaacctggtgcaatagttctgcagtgtggagcagattcgcttgctggagatcgcttgggttgcttcaatctctctattgatggtcatgctgaatgtgttagcttcgtaaagagattcaatttgccattgctggtcactggaggtgggggatacacaaaagaaaatgttgctcgatgttggactgttgaaacaggagttcttctagatacagagcttccaaatgagattcccgcaaaatgattatattaaatactttgcaccagaattttctttgaaggttccaaatgggccgatagaaaatttgaatagtaaatcatatcttagcaccattaaaatgcaagtcttggaaaatcttcgttgcatccagcatgctccaagcgtacagatgcaggaggtccctcctgacttctacattccagaattcgatgaagatgagcagaaccctgatgaacgcattgatcagcacactcaagacaagcacatccagcgcgatgatgaatattatgacggtgacaatgacaatgatcaaatgaatatttcatgaagtgcagttgccgtttgccttttggcgggggattgaccgttttaagagagaaggaaaatgttaattagacaaacacctagatgtatcaacaaagcggtagtactagcccaagaaacttgtatatttataagatttttattgttttcagttgctaatatatttgctcaaagttacattattaatgatgtttcttccctgtcatttttttgaatgaaaatggacggtgttagagcaactctgacaacaagagcttgcataacattcttttt

SEQ ID NO: 27390 - DNA, 1719 bp, Glycine max
  Clone ID: TF_700841470_FLI
taacattttaaagtagataagccttccccgcccactagaaatagagagaaggtaaggagggtttggttttgggtactttacaaattacaataattagcgaaagagagaagacatagcacatagagtcatagagacatcatcatcgtatgggaatggaagaggagagtagcaacaacagcagcatcatagaaggtggtgcttcgctgccatcaacgggttcagacgccaagaagcgaagagtgacgtacttctacgagcccacgatcggcgattactactacggtcaggggcacccaatgaagccgcaccgaatccgcatggcgcacaacctcatcgtccactactccctccaccgccgcatggagatcaaccgtcccttcccggcctcccccgccgacatccgccgcttccactccgacgactacgtcgactttctctcctccgtctcccccgagaacctcgccgattccgccttctcccgccacctcaagcgcttcaacgtcggcgaggactgccccgtcttcgacggcctcttccccttctgccaggcctccgccggcggctccctcggcgccgccgtcaaactcaaccgcgccgacgccgacatcgccatcaattgggccggcggcctccaccacgccaagaagtccgaggcctctggattctgctacgtcaacgacattgtcctcggtatcctcgaactcctcaaagttcacaggcgcgtgctgtatgttgacattgatgttcaccatggtgatggtgttgaggaggccttttacaccactgatagagtgatgacagtgtctttccataagtttggggactttttccctggcacaggacacgtcaaggacattggggtgggatcaggaaagaattatgcagtcaatgtcccattaaatgacggaatggatgatgagagtttccgtagtctgtttcgaaccatcattcaaaaagtattggaggtctatcaaccagaggcagttgttctacaatgtggagctgattcattgtctggggacaggttgggttgcttcaacttgtctgtgagaggtcatgcagattgccttcgttttcttagatcgttcaatgttcctttaatggtcttgggtgggggtggatatacaattcggaatgttgcccgttgttggtgttatgagacagcagtggcagtaggagtggagcctgataataagttgccttataatgaatattatgaatattttggcccagattatactctctatgtcgatccaagcaacatggagaacctaaacacacccaaggatatggaaaaaataaggaacacactactagaacagatttctcaacttccccatgctcccggtgtaccttttcagacaacaccacctaccttacaacttccggaagaggcagaagaggacatggatagaagacctaaacttcgcaaatgggatggtgaagattatgattctgatcctgatgaaggtggaaaggctaattccaagtttccaaacgtcactgcccatatgagggacattacagatgaaatggaagaagagaaaccagaagtgcatccatcatcttgttgttgatagaacagagcaagttcttgcacagcatgtttgtattgttatctttattccgtttatgggggagatcattactaaacagtaccacatgcagctgttgagaatgcaaatataatcaatacattgtgcaaatgtaatatagtgt

SEQ ID NO: 27391 - DNA, 736 bp, Glycine max
  unsure (1)..(736): unsure at all n locations
  Clone ID: TF_GmC141697_3
attagcatgggaattccgaaaggacagatagttgtgtaagaaagagctcctgagccaatcaaacaatctctctgtcttcccttgaagaaggagaaatggggggaaattaaaagggaaaaaggcatataaccggaaacaatcgcgtttcgaattcaaaatcactcgtttctcgcttctcctttcgttcgacgcatgaatgcaggggcttcaccgcttcagacttcagtagcagagtgacagaaattagaaactcaaaaaagtaggcgcagccgagtgagaaaccatggaacgtgaaaacgacaacagcgccaaaagcagtgtcaacggtcagcgccgcgtgggtttactctacgacgagaggatgtgcaagcaccacacaccagacgacgaggaccatcccgagacccccaatcgcatcagagctatttggaacaaactccaaagcaccggcgttccccaacgatgcgtgattttggaggccaaagaagctgaggacaaacatctactgttagtgcattctgaaaatcatgttaatctgattaagaacatcagctcaaagcagttcaattcgcggaggcataagattgcctcaaaattggattccatatattttaatgaaaggttcatcggaagctgcgtaccttgctgctggctctgcagtaaaggttgntgaaagagtggcaagcagggaattggattctgctgttgccattgntaggcctncaggtcatcatgc

SEQ ID NO: 27392 - DNA, 1480 bp, Glycine max
  Clone ID: TF_uC-gmflminsoy057h02_FLI
cgcatggagatcaaccgccccttcccggcctcccccgccgacatccgccgcttccactccgacgactacgtcgacttcctctcctccgtctcccccgagaccctcgccgattccgccttctctcgtcacctcaagcgcttcaacgtcggcgaggactgccccgtcttcgacggcctcttccccttctgccaggcctccgccggtggctcccttggcgccgccgtcaaactcaaccgcgctgacgccgacatcgccatcaattgggccggcggcctccatcatgccaagaagtctgaggcctctggattctgctacgtcaacgacattgtcctcggcatcctcgaacttctcaaggctcacaggcgtgtgctgtatgttgacattgatgttcaccatggtgatggtgttgaggaggccttttacaccactgatagagtgatgacagtgtctttccacaagtttggggactttttccctggcacagggcacgtcaaagacattggggtgggctcaggaaagaattatgcagtaaatgtcccattaaatgatggaatggatgatgagagtttccgtagtctgtttcgatccatcattcaaaaagtcatggaggtttatcaacctgaggcagttgttctacaatgtggagctgattcattgtctggtgacagattgggttgcttcaacttgtctgtgagaggtcatgcagattgccttcgttttcttagatcgttcaatgttcctttaatggtcttgggtgggggtggatatacaattcggaatgttgcccgttgttggtgttatgagcagtggcagtaggagtggagcctgataataagttgccttataatgaatattatgaatattttggcccagattatactctctatgtcgatccaagcaacatggagaacctaaacacatccaaggatttggaaaaattaaggaacacactactagaacagatttcccgacttccacatgctcccagtgtaccttttcagacaacaccacctaccttgcaacttccggaagaggcggaagagaacatggatagaagaccaaaacttcgcaaatgggatggtgaagattatgattctgatcccgaagaaggtggaaaggataattccaagttctcaaacatcactgcccatatgagggacattgcagatgaaatggaagaagagaagccagaagagcatccatcatcttgtagttgatagaacagagcaagttcttgcacagcatgtttgtattgtaatctttatcgtaaactatttttgtttatttaagtcattttcttttatttggtccctgacttacacttagtttcgttttagtctcatagtgaatttagtttattttgaatattttcatttgtgcatattttcatttggtcaaatggagacgtcactttaattttggttcatgtatatttcttttacatgtatgatgaggatattaaagaaagtgatgaaggggc

SEQ ID NO: 27393 - DNA, 545 bp, Glycine max
  Clone ID: TF_GmC382331_1
ggcacgatatttcctggaaaatgctattcaattcctgctagagggctcgagccagaagaacttattacggttcattcgttggagcatattgaatctgtggaagttacaagtgaatcactttctagttatttcacgtctgatacatatgccaatgagcattcagcacttgctgctaggttggcagctgggttatgtgctgatctagcatcagcaattgtttctgggcgagccaaaaatggatttgctttggttaggcctcctggtcatcatgctggtgtaagacaggcaatggggttctgccttcacaataatgctgccgtggctgcattggcagctcaagctgcaggggctaggaaggtgctaattttggattgggatgttcatcatggaaatgggacacaagaaatatttgaacaaaacaaatctgtcttgtatatatcattgcatagacatgagggaggaaagttttatcctggtactggagctgccgaagaggtacatgactgcagacaaattttcaaattaaactgctgctgctggcaaac

SEQ ID NO: 27394 - DNA, 1356 bp, Glycine max
  Clone ID: TF_GmC1063_1
ggctcgaggcatttttggaaatgtggccattgcagcccgttattctcagcgtgttcatggattgaagcgtgtgtttataattgactttgatgttcatcatgggaatggaacaaatgatgctttctatgatgatccagatgtatttttcctttcatttcaccaagatggaagctatcccggtactggtaaatttgatgaagttggaagtggagatggtgaaggaaccacattaaatctgcctcttcctggaggttcaggtgatactgctattagaactgtgttcgatgaagtcattgtaccatgtgctcaaagatttaaaccagacatcattcttgtttctgctgggtatgacggccacgtgttggatccactagctaatcttcaatatacaactggaacatattacatgctagcgtccagtatcaaacaactagcgaaagatttatgtgggggccgatgtgtgtttttcttggagggaggatataatctgaagtctctttcatattccgtggcagacacattccgtgctcttcttggggaccgaagcttggcatctgagtttgataaccctaacattttgtacgaagagccatctacaaaagttaagcaagctattcagaagataaaacacattcattccctgtgaggtcaaaatagaaactgacatgacaagcatctaaatgtctagcattaataatttccttttctgtgggttcaatctataagtacatgtctttacactcttgggtgggcattctcccacttatcacatagaagcaaaaccattgtacaggattgcttgtggtctttgaacgagtctccagttacagtttctatatgccatgcagccatattgatcatgtggtcatagccatatacataaaggagtaaaccctaattttatatatttacttcattgaggaacactagcaacacaatttttaacacactcttattagcacattctctctatcaaatgaaacccatgtaagtctcaccaaatgatgcatgcctcgtaattttttttaatgggtttcactttccatttcgtgagtcatatgtagcttttacccaataataaagagttgaatgcattaataggatctctaagaactaccgaacatgttacttgtgggagaatttttataatgccattctttgtagattcaatagtggcatttactgtgtctgtgttgtaggaatctgctacttgagccttgttagatagatcaaaagcctcctcctattgggctaggtgggtgtatcaattatcatgtatgttagcttctttgatttttttttttattatcagcaaatcaaaatatattaaatagatgaccacctggctaatctcaa

SEQ ID NO: 27395 - DNA, 1980 bp, Glycine max
  Clone ID: TF_GmC305_1
ttctttcgtccgggtatattggatctcgcactttagaaattagcgaaagagagacgtatgggaatggaagaggagagtagcatcatagaaggtggtgcttcgcttccatcgtcgggttcagacgccaagaagcgaagagtgacctacttctacgagcccaccatcggcgattactactacggtcaggggcacccaatgaagccgcaccgaatccgcatggcgcacaacctcatcgtccactactccctccaccgccgcatggagatcaaccgccccttcccggcctcccccgccgacatccgccgcttccactccgacgactacgtcgacttcctctcctccgtctcccccgagaccctcgccgattccgccttctctcgtcacctcaagcgcttcaacgtcggcgaggactgccccgtcttcgacggcctcttccccttctgccaggcctccgccggtggctcccttggcgccgccgtcaaactcaaccgcgctgacgccgacatcgccatcaattgggccggcggcctccatcatgccaagaagtctgaggcctctggattctgctacgtcaacgacattgtcctcggcatcctcgaacttctcaaggctcacaggcgtgtgctgtatgttgacattgatgttcaccatggtgatggtgttgaggaggccttttacaccactgatagagtgatgacagtgtctttccacaagtttggggactttttccctggcacagggcacgtcaaagacattggggtgggctcaggaaagaattatgcagtaaatgtcccattaaatgatggaatggatgatgagagtttccgtagtctgtttcgatccatcattcaaaaagtcatggaggtttatcaacctgaggcagttgttctacaatgtggagctgattcattgtctggtgacagattgggttgcttcaacttgtctgtgagaggtcatgcagattgccttcgttttcttagatcgttcaatgttcctttaatggtcttgggtgggggtggatatacaattcggaatgttgcccgttgttggtgttatgagacagcagtggcagtaggagtggagcctgataataagttgccttataatgaatattatgaatattttggcccagattatactctctatgtcgatccaagcaacatggagaacctaaacacatccaaggatttggaaaaattaaggaacacactactagaacagatttcccgacttccacatgctcccagtgtaccttttcagacaacaccacctaccttgcaacttccggaagaggcggaagagaacatggatagaagaccaaaacttcgcaaatgggatggtgaagattatgattctgatcccgaagaaggtggaaaggataattccaagttctcaaacatcactgcccatatgagggacattgcagatgaaatggaagaagagaagccagaagagcatccatcatcttgtagttgatagaacagagcaagttcttgcacagcatgtttgtattgtaatctttattccgtttatgggggagatcattgctaaacagtaccacatgcagcagttgagaatgcaaatataatcaatacattgtgcaaatgtaatatagtgtaaaacattgttttggtctccctcgtaaactatttttgtttaagtcattttcttttatttggtccctggcttacacttagtttcgttttagtctgtcatggtcaatttagttgattttgaatattttcatttgtgcatactttcatttggtcaaatggatacatcactttaatttggttcttgtatcttttacatgtatgatgaggatattaaagaaagtgatgaaggggcaaaatgttgttttcttgttactatttcatttttgaaagattcttatgtataatccaaatattttaattaaattgttagttaattaaaaaaaaaaaaaaaaatatagggcgcccgccgactagtgagcgcgtc

SEQ ID NO: 27396 - DNA, 1419 bp, Glycine max
  Clone ID: TF_GmC1092_1
gcctcaacgaagtgtgaggcttctggattttgctatgttaatgatatagtccttgcaatcttagaacttctcaaacaacatgagcgtgttctatatgtggacattgacatccaccatggagacggtgtggaggaagctttctacactactgacagagtcatgactgtttctttccataaatttggtgactattttcctggtactggggatgtacgtgatattggatatggaaaaggaaaatattactctcttaatgttccacttgatgatggcattgatgatgagagttatcattttttgttcaaaccaataattggcaaagtaatggaagtgttcaggcctggtgcagtagttctccagtgcggtgctgattctttatctggagaccgattgggatgtttcaatctttcaattaggggtcatgctgagtgtgtcaaatacatgagatcattcaatgtgcccctcttgctactaggtggtggtggctacaccattcggaatgttgctcgttgttggtgctatgagacaggagttgctcttggaatagaagttgatgacaaaatgccacaacacgagtattatgaatattttggtccagattatacccttcatgttgccccaagtaacatggaaaacaagaattcccgtcatttacttgaagaaattcgatctaaactacttgagaatctttccaagctgcagcatgctcctagtgtccaatttcaggaaagacctcctgattctgatcttggagaggccgatgaagatcatgatgatggagatgagccttgggatccagattctgacatggacgttgacgttgaacgtgagcttgtctcgagcaaagtaaagaaagaaattgctgaacctcagcccaatgatctggaggaccagagaagtggagagcatttgagagactctgatactgcagttgcggaaacctgcatgaaggctctagatatttcttctcagaaagctgatgaagataatgtgaaagtagaacagaatactgtgaatgatttggccaaagagacggacctgaagggttaagcaacataggctttaactgattggtgaacagttaaattgattttccatttatgctgtcgcatttccaaattaattgagatgtggctgctgcttggttccatcatagtccattgtatacaccagtcgcattttcctaatgttaggggcaagtttgcaaatttaaattggttttttttttatctcatccagatggttttttgtactgttacattacatcttgttacagaatagtattacgtgctattattgagccgggtttatttttcttatactgatctttgtttaaaactttatgtgtgtaatgtctaattggtaatgtgaaacatattatcttgttaaataatctagttataagttttagcggtttac

SEQ ID NO: 27397 - DNA, 728 bp, Glycine max
  unsure (1)..(728): unsure at all n locations
  Clone ID: TF_LIB4201-008-Q1-K1-G3
ccggaattcccggctcgacccacgcgtccgctctgacagacactatcagatttcagaggcggaggcggaggctggagctgcctcaactcaagtcttcaactatctgaatctgaactcatccactcactcgttagcgctgctagaacgaaaactgagtaatggaaagtggagggaactcccttccatcagggtcagatggtgtgaagagaaaggtttcatatttctatgatccagaggttggaaactattattatgggcagggacacccaatgaaacctcataggattcgaatgacacatgctcttttagcccactatggattgcttcaacacatgcaggtcctgaagcctacggctgctaaagatagggacctttgcaagttccatgctgatgattatgtggcctttttgagaggcatcacccctgaaacgcagcaagatcaattgagacagctgaagaggtttaatgttggcgaagactgccctgtatttgatggtctttactccttctgccagacatatgcaggaggttctgttggtggtgctctaaaattgaaccacggagcatgcgatgtcgcaataaattgggctgggtggtctacatcatgcanaggaagtgtgagggcttctgggttttgctatgttaatgacattgtgctggctattttggaacttctcanaatacatgagcgtgttctgtatgtggacattgatatccaccatggtgat

SEQ ID NO: 27398 - DNA, 1917 bp, Glycine max
  Clone ID: TF_GmC305_2
cggctcgagcggctcgagtaacattttaaagtagataagccttccccgcccactagaaatagagagaaggtaaggagggtttggttttgggtactttacaaattacaataattagcgaaagagagaagacatagcacatagagtcatagagacatcatcatcgtatgggaatggaagaggagagtagcaacaacagcagcatcatagaaggtggtgcttcgctgccatcaacgggttcagacgccaagaagcgaagagtgacgtacttctacgagcccacgatcggcgattactactacggtcaggggcacccaatgaagccgcaccgaatccgcatggcccacaacctcatcgttcactacgccctccaccgccgcatgcaggtcaaccgccccttccccgcggcggaggccgacatcggccgcttccacgccgacgactacgtcgacttcctctccaccgtctcgccgcaaatcctctccgagaattcccactcccactaccgtcagctcaagcgcttcaacgtcggcgaggactgccccgtcttcgacggcctcttcgacttctgccgcgcctccgccggcggctccatcggcgccgccgtccgcctcaaccgcgaagacgccgacgtcgccatcaattgggccggcggcctgcaccacgccaagaaggccgaggcctccgggttttgctatgttaacgacattgttctcggcattctagaacttctcaaagttcataggcgtgtgctgtatattgatattgatgttcaccatggagatggcgttgaggaggcattttacactactgatagggtgatgacagtgtcatttcataagtttggggattttttcccaggaactgggcacattaaagacattggggtgggtgctggaaagaattattctctaaacgtcccactcaatgatggattggatgatgagacttttccgtggtctgtttcgccccatcattcaaaaagtcatggatgtttatcaaccggatgcagttgttcttcaatgtggagctgactcgttgtctggtgatcggttgggttgcttcaacttgactgtgaagggccatgcagattgccttcgtttccttagatcattcaatgtccctctaatggtcttgggtgggggaggatatacggttcgcaatgttgctcgttgttggtgttatgagactgcagtggcagtaggagtggagcctagtcctaagttgccttacaatgaatattatgaatattttggcccggactataatcttcatgttgagccatccacaatggaaaacctaaacacacccagggatctggaaaaaattcggaatacattactggaacaactttccaggcttccccatgcacccagtgcaccttttcaaacaacaccatcggtcatcgaagttccagaagaggaagaggaggacatggatgtaaggccaaaacgtcgtatatggagtggtgaagattttgattcggatcatgatgatgacatggctagttcaaagaactctgatttaactgcacaaacgagcaggtctgttgcagatgacatggacgaagataaagattaaagcaggagtgcatccctcatcttaataatgatagaacagagcaagtaccagatttagcattttacaaattagtgggaagcttattgctgtttgatctattgcatattttctctagactttttatggataaagtagggagcagtgttgcctttggcttgttgggggatggtgccctagtaatggcgggtttctactttttagaacacaccaccccccgaaaataacattgccttgcatgtttgctttggcggaccggattttaaatttcaatagaaaaatatacacaattaccattttacccttttggttattttaaaaaataaattaatttctattctt

SEQ ID NO: 27399 - DNA, 796 bp, Glycine max
  unsure (1)..(796): unsure at all n locations
  Clone ID: TF_GmC1790_1
ccacccgtccggtccgctttcctttttatccttagtataagagagactactagtttaggacgaaatttatggtttacttcggagaataattttaaaatatcatcgaacaagcagttagagttgtgaggcgcttttagccggagttgcttctctcatcgtcagttgtcgttacgttggtcgaccgactgtgtgcagctgattttgcaaagagaagagggaattttgttaggatagttgaatactgataagagaaataacgggaaacaacagacatggatactggtggcaattctttaccatctgcacctgatggggtgaagagaaaggtgtgctatttttatgatccggaggttgggaattactattatgggcaaggtcacccaatgaagccacatcgcatacggatgacacatgctcttctagcccattatggattgctacaacacatgcaggtccataagccatttcctgctagagacagggacctttgtcgatttcatgctgatgattatgttgcattccttcgaagcataactcctgaaacacagcaggatcatctgaggcaactcaaacgctttaatgttggtgaagattgtcctgtttttgatggcctctactctttctgtcaaacatatgcagggggttcagttgggggtgctgtcaagttaaatcatgaccaatgtgatattgctgtcaactgggctggtgggttgcatcatgccaagaagtgtgaggcttctggattttgctatgttaatgatatagnccttgcaatcttanaacttctcaaacacat

SEQ ID NO: 27400 - DNA, 1610 bp, Glycine max
  Clone ID: TF_GmC974_2
gcacacaattgatatcatcaatggcattctattgctagccattttctcctttcgctaattcttcttctacgctctctctgcaaaagatgccttccaaggacaaaatcgcttacttctacgacggtgatgtcggtagtgtatactttggggcgaagcatccaatgaagccccaccggctttgcatgactcatcatcttgttctctcatacgatcttcataagaagatggagatttaccgtccacacaaggcttatcctgttgagcttgcccagtttcattcagctgattatgttgagtttttgaacaggattacacctgacactcagcacttgttcttgaaggaactgacaaaatataatcttggagaagactgccctgtatttgacaacttatttgaattttgtcagatttatgctggtggaactatagatgctgcacgtcgattaaacaatcaattgtgtgatattgctataaactgggccggtggactacatcatgctaagaaatgcgaggcatctggattttgttacatcaatgacttggttttaggaatcttggagcttcttaaatatcatgctcgtgttttgtatattgatatagatgtgcaccatggtgatggtgtagaagaagccttctacttcactgacagggtgatgactgtcagttttcacaagtacggagatttgttcttcccaggtactggcgatgctaaggaaataggagaaagagaaggaaagttttatgccataaatgtcccattgaaggatggaatagatgacagtagcttcactcgacttttcaagactattatttccaaagtacttgaaacatatcaacctggtgcaatagttctccagtgtggagcagactcgcttgctggcgatcgcttgggttgcttcaatctctctattgatggtcacgctgaatgtgttagcttcgtaaagagattcaatttgccattgctggtcactggaggtggggggtacacaaaagaaaatgttgctcgatgttggactgttgaaacaggagttcttctagatacagagcttccaaatgagattccggaaaatgattatattaaatattttgcaccagaattttctttgaagattccaaatgggcagatagaaaatttgaatagtaaatcatatcttagcaccattaaaatgcaagtcttggaaaatcttcgttgcatccaacatgctccaagtgtacagatgcaggaggtccctccggacttctacattccagagttcgatgaagatgagcagaaccctgatgaacgccttgatcagcacactcaagacaagcacattcagcgcgatgatgaatactatgacggtgacaatgacaatgatcaaatggatgtttcatgaagttagcacttgcaatgttgccttttggttggggagtgaccatttaagagagaaggaaaatgtaattagacaaacgcctagatgtatcaacaaagcggtagtactagcccaagaaacttgtatattttgtaagatttttattattttatatatatatatatatatatatatatatatatatatatatatatatatatatatttgctcaaaagtacattattccggtcttccctt

SEQ ID NO: 27401 - DNA, 801 bp, Glycine max
  unsure (1)..(801): unsure at all n locations
  Clone ID: TF_LIB4164-050-R1-K1-G7
cgaattcgagctcggtacccggggatcctctagagtcgacctgcagtagaggtcgtatttacagcgaacttatgagttttttgtgttgttcattaaatgtgaatgtactgtattattgagtgttttcggttttcgaatatatgttattgtcttttgtcatgttaatagccgtgattatgtttgatatttcagatcattgaaacatttcctgttatcgtcttactttgctttacgtagaaggaaatttaatagctgctatttggacttgataatgtttatctctgtggccaagatttcttctgttaaatccatgaaattgttataatttgacagaggtaccaatatttttaccatctgtatattttctctcttcctcttggtgacccggtggggcataggttctagctgcaaagctgcctcttcttttgtggcagtagtgctgcgtacaatacgtctaaccctctgcggaccttatgcttaatcttattaaaataagctgtgccttactcaaaaagtttatgagcctaactgattttgtcaagtaggttgttaaaagagtggcaagcagggaattggattctgctgttgccattgttaggcctccgggtcatcatgcagaacaacaagagctatgggattttgtctgttcaacaatgtggcagttgctgcaagatatctcttagacaaaaagtgagtaacgtaactcctnctaccaattcccatatttgaaaaacttttagcctttaattaacagtttggttactgtattgacacctttgcttttctggtttttgccgtctg

SEQ ID NO: 27402 - DNA, 740 bp, Glycine max
  unsure (1)..(740): unsure at all n locations
  Clone ID: TF_GmC46078_1
atttgatgctgcaagaggtgatcnnnnnnnatgttgtgatattactcnnnnnnnntatgcacatatgacaaatatgttgaatgcnnttnnnggcnnnaaattgcttgttattcttgaggggggctataatcttcgttctatatcgtcttctgcaactgcagtaatcaaggtattactgggtgagagtcctggatgtgaactggaaaatagcttcccttccaaagctggcctgcaaactgttctggaagtcctcaaaattcagatgaacttttggcctgccctgggtcccatttttgtgactttggagtcacaatggagggtgtactgttttggaagaaaaaggaaacagattaagaaacgacgccgagttctggttccaatgtggaggtggggacgaaaaagtttgttattccattttctgaacggccaccttaatgtaaaatcaaagttatgttgagctgatgaattttgtaagcacgggaaatacgtagtagttatcagcatgctgtacattccatcgtcaggacaatatgatttttgtgggatcgtgcaaatgatagatttgtgcggaagggtgagacaactcggggaaagaaggggagggtggcaagtgtaaaggataaaaatgatttcccagttccttgtttgaacatcgaattttgatagttaccaaatgggaaatatgagaaattaaagcactttctgctccaacgaatctttaataaacaacataaattttt

SEQ ID NO: 27403 - DNA, 1760 bp, Glycine max
  unsure (1)..(1760): unsure at all n locations
  Clone ID: TF_GmC1863_1
cggctcgaggtggaacattccattttttcggtgccattcatgatttttatcaaccgctggctcgagggcatcgagtatccgagttaagcaaggtgagttaagcttcgtcgattcacgaaattcccggaaatcgttactgagtcaactcggtatttcggtggctcgtccaatttgcacaaggttcgccgccgtcaaagcgtttccgattctccaccaccgccgtagctgccgccgtcaaccgtcgccatcgatgtcgtcttcttccgccaacgatgccgaggctctccggcgcaaccgcatcctctccagcaagctctacttcgacgtgtctccgtccaaggttccgctaatctactccgcgtcttacgacatagagtttctcggcatagagaaactgcatccgtttgattcgtcgaagtggggacgcatttgtggattcctcgtttcgtttggtattcttgacaaaaaatgcgtcgttgagcctttggaagcttccaaggatgatcttctagtggtacactctgaatcgtatttgaataccctgaagcagagttcaaaagttgctatgatagttgaggtccctcctgtggcattaattcccaattgtcttgtgcaacaaaaagttctttttccattcangaagcaggtaaattaactgttttattgaattctttttagcatctccaaaaatctcatcttgctcctaatcaaatggtaggttggaagaactatattggctgcgaaacttgcaaaggagagaggatgggccattaacatgggaggtggttttcatcactgttctgcacaaaaagggggtggattctgtgcttacgcagatatttctctatgcatccactttgcttttgttcggttgaatatatcaagggtgatgatcattgatcttgatgcacatcaaggaaacggtcatgaaatggacttcgcttatgatagccgagtctatatcctggatatgtacaatcctggaatatatcctttggattatgaggcgagaaactacataaatcagaaagttgaagtaaagagtgggacagttactgaagagtacctgcaaaaattagatgaagcacttgaggttgctgggcataggtttaaccctgagttggttatttataatgctggaactgacatcctagaaggtgatccattaggaaggttggagatcagtcctgaaggaattgcccttagagatgagaaagttttccggtttgctcgtgaaaaaaacattcctatcgttatgctcacttcaggtggttacatgaagtccagtgctggagtcattgcagattcaatagtcaatctttcgaagaaatgcttgatagaaacgagtggagctccaaagtctacgtaaagtgctcctgtgttttactgatcatgaatggtcccttgtaagagttttccagatcctttgtgtatttgggtatagaatgtttccattttagtggaaactttgatgtacagtattttaatataaaaaagaacttagtgtagatgaaaatgtgttctacgtgagttgtaacaagtccgtaaatgctgctggtatattagtactacataatgcataaatgagttgtatattatttcatccatttaaataataattattcgttattattctcttatatattaatttttctaccaaaaanaacttttcttttttgtgtattataattttatttttttttaaataatatttcatttttttttcgccaataatttataattttatttttatttttcca

SEQ ID NO: 27404 - DNA, 1407 bp, Glycine max
  Clone ID: TF_GmC129_1
ccacgcgtccgacggctgcgagaagacgacagaaggggaagcagtgagaagtcgcaaggaggtgcagaatggctgatgcaggtgcagaaggagcatcttcttccacggtaggccaaattgacgttttctggcacgaagggatgctgaagcatgacacgggcaatggcgtgtttgacacggggatggatccaggcttcttagaggtgttggagaagcaccctgaaaactcagacagagtgaaaaacctagtgtctattctcaaaaggggtcctatctccccttacatttcttggcaccttggtacacctgcaaaaatccctgagcttttttcttttcacactcctgaatacataaatgaactggtagaagttgataaagaaggggggaagcagctttgtggtgggacatttttgaaccctggatcatgggatgctgcacttcttgctgctgggactacactatctgcgatgaagcatttactgaatggggatggaaaagtttcctatgcattggttaggccccctggtcaccatgctcagccttctcaggccgatggctactgtttccttaacaatgcaggtctagctgtgcaattggctttagattccggctgcaagaaggttgcggtcatagatattgatgtgcattatggaaatggaacggcagaggggttttatcgatctaataaggttcttaccatctctcttcatatgaaccatggatcatggggtccatctcatccgcaaagtggctctgttgatgagctaggtgaaggagaaggttatggctttaacttgaacatacctctaccaaatggaactggggacaagggatatgtacatgccttcaatgagttggttgttccatccatccaaaagtttgggcctgatatgatagttttggttcttggacaagactctaatgcatttgatcccaatggaaggcaatgcttaacaatggagggttatagagaaatagggcgaattgtccatcttcttgcgaaaaggcacagtgcaggacgccttctaattgtccaggaaggtggatatcatgtcacatattctgcatattgtttacatgcaacacttgagggggttctcaacctaccaatgcctctactagcggatcctattgctttttacctagacgacgagacattttctgtccaagttatagaagccattaagaattatcaaaaagataaagtgcgctagtggagaaactcactagacacttcctctctgtgcgtgtgaaataaatgttgatacttttcaagaagggttaatatttatcgtgtaactattgagggattttcaaggttattttaaataaatttaatcttgtccagttgatcttttgattaaaaaaaaaaaaaagcggccgaaatagagaaaagaaaaagggcgt

SEQ ID NO: 27405 - DNA, 2212 bp, Glycine max
  Clone ID: TF_GmC305_3
aacttgctgaatttattgatagtttcttcctttgctgaattgattttctcctatctgttgtatgttactgggcagcgcgtgctgtatgttgacattgatgttcaccatggtgatggtgttgaggaggccttttacaccactgatagagtgatgacagtgtctttccataagtttggggactttttccctggcacaggacacgtcaaggacattggggtgggatcaggaaagaattatgcagtcaatgtcccattaaatgacggaatggatgatgagagtttccgtagtctgtttcgaaccatcattcaaaaagtcatggaggtctatcaaccagaggcagttgttctacaatgtggagctgattcattgtctggggacaggttgggttgcttcaacttgtctgtgagaggtcatgcagattgccttcgttttcttagatcgttcaatgttcctttaatggtcttgggtgggggtggatatacaattcggaatgttgcccgttgttggtgttatgaggtctgcttctttctcttttagtctggattataatgtgacttggtacttgtttaatttacttatttggttacatgctttttctttgttttagacagcagtggcagtaggagtggagcctgagaataagttgccttataatgaatattatgaatattttggcccagattatactctctatgtcgatccaagcaacatggcgtaacctaaacacacccaagggtatggaaaaaataaggtgtttatactattaatttcatctggttgagttaaatcgatgattctcatttcaattttattatttctcttaattatatggaaaaataatggtcataaattgttaagacagtaattccttaaatgcattacattttgctgcatccatgtcacatcctttctacaaatgatgacgttttcagaaacttactagtagttgcatagacaagctatatttcataataactgaattgttattttcatattggttgtgaagacatattgtattgtctagatataaaatatttcctatgggtttctggaaattgtacctctgtctgtggcagaagccaggaggcccaggactgaaccttagtcagaatttatatttcccttgtctcatgtgtaaaatattcagagatttcctatcatttctctggattaagcagtgacttacatgggttttccccccattaaatttcaaggaacacactactagaacagatttctcaacttcccccatgctcccggtgtaccttttcagacaacacccacctaccttacaacttccggaagaggtcagtacttaataacagttgcagttattgttcctttgcaattctcttctttttgttgattttattatgtattcaggcagaagaggacatggatagaagacctaaacttcgcaaatgggatggtgaagattatgattctgatcctgatgaaggtggaaaggctaattccaagtttccaaacgtcactgcccatatgaggtaatgattatatattgttttgaagctgaatataaacccatttggtttgtaagttcctttttcagtggataaacgtgggttgttccttgagaccgatacctatgtgacacctgctagcttgatagatattcctagagtcagtttgaatggaagttttttctggtaatggagctcactatgctataacacaagtttcttcttagccgtttgaagtgaatttaataatcatttggctcctttttttaaagcagaaatgttctctttttgctgcaggggcatttcagatgaaatggaagaagagaaaccagaagtgcatccatcatcttgttgttgatagaacagagcaagttcttgcacagcatgtttgtattgttatctttattccgtttatgggggagatcattactaaacagtaccacatgcagctgttgagaatgcaaatataatcaatacattgtgcaaatgtaatatagtgtaaaacattgttttggtctctctcgtaaactatttttgtttaagtcattttcttttatttggtccctggcttacacttagtttcgttttagtctgtcatggtcaatttagttgattttgaatattctcatttgtgcatactttcatttggtcaaatggatacatccctttaatttggttcttgtaacttttccctgtatgatgaggatattaaagaaagtgaggaaggttcc

SEQ ID NO: 27406 - DNA, 1151 bp, Glycine max
  Clone ID: TF_GmC1634_1
ttacggctgcgagaagacgacagaaggggaaaatcctctcgtctatagtctattgcactctgacagacactatcagatttcagaggcggaggcggaggctggagctgcctcaactcaagtcttcaactatctgaatctgaactcatccactcactcgttagcgctgctagaacgaaaactgagtaatggaaagtggagggaactcccttccatcagggtcagatggtgtgaagagaaaggtttcatatttctatgatccagaggttggaaactattattatgggcagggacacccaatgaaacctcataggattcgaatgacacatgctcttttagcccactatggattgcttcaacacatgcaggtcctgaagcctacggctgctaaagatagggacctttgcaagttccatgctgatgattatgtggcctttttgagaggcatcacccctgaaacgcagcaagatcaattgagacagctgaagaggtttaatgttggcgaagactgccctgtatttgatgggtctttactccttctgccagacatatgcaggaggttctgtttggtggtgctgctaaaattgaaccacgggagcatgcgatgtcgcaataaattgggctggtggtctacatcatgcaaagaagtgtgaggcttctgggttttgctatgttaatgacattgtgctggctattttggaacttctcaaaatacatgaggtttccctaattaattccccacactatcttattgatgcatggctgttctcattttaatttagattgaatttactctttacatgaccaacatctgcaaaattccataacatccgtttggaactgtgaggttccaaaattgaaagtgtattttagaagaaagagggataagtgagtatgtgctagagaacagtggtaatgtggacgggttataatagctagtggttagtggtaattagtaagggaagtatataaatataaatactgttacaatcttgagtagggattgtttttggcttcttggcttcacttggctgtttttgttgtgactgattgatgtactgcattgtggtttactattttgctttattatggtgttgaaatgttgaattattatattggtgtagaggaggccttttacaccactgacagggtca

SEQ ID NO: 27407 - DNA, 1881 bp, Glycine max
  Clone ID: TF_GmC81_1
ggatactgcatactcgctggatctcccaatctggcttcaaactcaacaatggcatacgccgcacctccgctggacccgccaggaataggcacgaactcgccttcgtctcagaagaagagagtggcttatttctatgacagcgacgtcgggaactatgcctaccagtcgggacatctgatgaaaccccatcgaattcggatggcgcattcgcttgttatgaactatggactgtacaacaagatggagatttaccgggccaaaccagcgtcaaaatacgagatgacacagttccatacggacgaatacgtggactttttgcagcgtgtcactcccgacaatgaacatcttctggctaaagagtgcgccaagcacaatgttggggaagattgtcctccgttcgacggcgtctttgagttctgcgcgattagtgccggtggcagtatggaaggagcggcaagactcaatcgtgccaaatgtgatatggcgatcaattgggcgggcggactgcatcatgcgaagaaaaacgaggcatctggcttctgctatattaatgatattgtcctcgcaatccttgagctgctccgcttccatgcacgagtattgtatatcgacatcgatgtgcatcatggcgacggtgtcgaagaagccttctataccactgacagggtaatgtgtgtctcgttgcataaatacggcgaattctttccaggaactggcgaccttcgcgatattggaatcgggcaagggaaacattactcagtcaacgtaccactgcgagatggtatcgacgacgccagctataaagacgtcttcgaatcggtgacgacgtgggctgtggagttctttcaacctggggcgatcgtcttacaatgcggagctgactctctgtctggggatcgccttggtgcgttcaacttgagcctggctgggcatgcgaactgcgtcaacttcgtgaagaaattcaacctgccgacgcttttcctgggaggtggtggctatacaatacgaaatgtcgctcgagcatgggcatatgagactggacagatagttggtgttgagctgtctcgctcgatgccatttacagactattacgagtactactcgccagacttcgaactagacgtcaagccgagcaatatggacaaccggaacagtgctgaatacctggcgaagatcaagtcatttgtttataccaatcttcgtcaagcacaaccggtcccctctgtgcagcttcaagacgtgccgcggtatccagtcggcatgagcgaacatattgacgatatggacgacagactggatgatgaagatgctgacgaggagacctccaaagatcaacggctcacggaacgggtggaagatcggatgattgaggatgatatggatatgtctggcttggaagacgcgagaggagtggactcgggagcagatgctgatcacggaagcccgtccatagtgggtgagggtggcagcgggtgtaaggttttgtcaagcgatcatgatacagaccagataactgagccggtcccatcgattgacccaggcaacgatcctgaacctgacagaacgacaatgatgctgcaggaagcgattcgtgacgagagcaacgaagtttcccagcccacgaacgttgaacaaacagtagtccagagggacgcccctgcggaacatgtcgagatcatcgcacagccgtcaatcgttctggaatcagcgccaatgcagcccgagccgcctatcgtccaatgtatgaacagagtagacagtcacacgcttgggcttagtgacgctgcagaagctgtggaagctatggagaacaatcacaaaggcggaaacgagaatatcggtctttcatagaggtacaaatatacacttgaagcatttttg

SEQ ID NO: 27408 - DNA, 1284 bp, Glycine max
  Clone ID: TF_GmC141697_2
attagcatggtattccgaaaggacagatagttttgtaagaaagagctcctgagccaatcaaacaatctctctgtcttcccttgaagaaggagaaatggggggaaattaaaagggaaaaaggcatataaccggaaacaatcgcgtttcgaattcaaaatcactcgtttctcgcttctactttccatgaatcttcactctccgagaaaccatggagcgtgaaaacgagaacagcgtcaacgctcaacgccgcgtgggtttactctacgacgagactatgtgtaagcaccacacaccagacgacgaggaccatcccgagaaccctaatcgcatcagagccatttggaacagactccaaagcgccggcgttctccaacgatgcgtgattttggaggccaaagaagctgaagacaaacatctactgttggtgcattctataaaccatgtgaatctgattaagaacatcagctcaaagcagttcaattcgcggaggcataagattgcctcaaaattgggttccatatactttaacgaaggttcatcagaggctgcgtaccttgccgctggctctgcagtagaggttgttaaaagagtggcaagcagggaattggattctgctgttgccattgttaggcctccgggtcatcatgcagaacaacaagaagctatgggattttgtctgttcaacaatgtggcagttgctgcaagatatctcttagacgaaagacggctcgagggtgtgaagaaaatattaattgttgattgggatgtccatcatggaaatggtactcagaaaatgttctggaatgattctcgagttttattcttttccgttcacaggcatgagtttgggagtttttatccagctaatgatgatggattttataccatgattggagaaggagcaggtgctggatataatataaatgtcccctgggagaatgggcgatgtggtgatgcagattactttgcagtgtgggaccacatcttgcttcctgttgctaaagaatttaatccagacataattatagtttctgctggatttgatgcagctgttggtgaccctctgggaggatgccgtgtcacaccatttggttattctgttctgttagagagttgatgaattttgctgaaggtaggattgtactgattttagaaggaggatataaccttgattccatcgcaaaatcaatgcatgcctgcttggaagttttgctagaggacagcctgttattggatcctcagaggcctatccatttgaatctacgtggcgtgtgattaaagcgg

SEQ ID NO: 27409 - DNA, 428 bp, Glycine max
  Clone ID: TF_LIB3242-368-Q1-K1-E12
ggaaaaaatatgtgagttggatgacattaagggcgcttgtggtttgtatcaccctgaataaaatatggtagtcctatgaatcaggctaccttatatttagtgatattacaataaataaatggcaaaaattttattaattgaaacaacattctacctcatagcaccaacaacgagcaacattccgaatggtgtagccaccaccacctagtatcaagaggggcacattgaatgatctcatgtatttgacacactctgcatgacccctaattgaaagattgaaacatcccaatcggtctccaaataaataatcaccaccgcactggagaactactgcaccaggccggaacacttccattatttttccgattattggtttgaacaaaaaatgataactcttatcatcaatgccatcatcaagtggaacatta

SEQ ID NO: 27410 - DNA, 292 bp, Glycine max
  Clone ID: TF_15812308
ccaatctgtcacaaccttggctcccgtttacttgtgctcacctctcgactacctatctgttgtagcgctagaactggctgtgaatgctccacctgacaccgaaaagaacaagaatattcctagacatgcgctattgcttgcaacgatcgatctggagatgctgaaatagcttgcttccgtgatcattgctcatgatggagtgctatcgaacatcaagcctgcactgttgacgaataagactgagacctcttccaaggagctctagactacatcctccgactataaatctcct

SEQ ID NO: 27411 - DNA, 239 bp, Glycine max
  Clone ID: TF_LIB3039-034-Q1-E1-H5
ggaacctttgaattcaatccattaaggattcagcaggtgctttttgaaaccagaaaccgaaatatttcgaaatggcccgtacaaagcaaactgctcgtaggtcaggtggaggaaaagctcacaggaagcatcttgcaaccaaggctgcacgtaagtctgcaccaacatctggtggtgtgaaaaagcctcatcgttaccgccctgaaagtgttgctcttcgtgatattaggaaataccag

SEQ ID NO: 27412 - DNA, 308 bp, Glycine max
  Clone ID: TF_LIB3040-010-Q1-E1-B10
ggtgtcccacgagtccataaagctgcaaaatgagaaattcgtcgtcactttcacactttctctcgcattcactcatgcacacgtatcattgcataaaggtgacggaaggcgcttcgtgcatcgaaaatcaccgcggcgaattctgacaaagctacggacagtaacaaacctaattctcgctcttcccgtgctgaaatccagtttcctgtcggacgtatccataggcagctgagacagatggtccaatccaactagacatgttgaggcaacagctgcactgtacttagcctcaactctagagtatctga

SEQ ID NO: 27413 - DNA, 417 bp, Glycine max
  unsure (1)..(417): unsure at all n locations
  Clone ID: TF_LIB3107-078-Q1-K1-F5
gaacacagacgggggttacatatttattctatgcgtggaacaggcagtaagagcgttgtggaagcagagaccgagatacttaaaaatggtcacttcgaagcgaactgctctgtactcaactggatggaaaagctcccacgaagcagtttgaaaccaaggatgtacagtggtactgcaccaacaactgatggggtgaacaagcctcatcgttattggcctagatctgttgctctttgtgagattcagaaagagcagaggagtactgtgctcttaatcaggaagctatctttccagaggatgattcgtgtaattgcgcacaatatgaagactgatctgcgttttcagagtcatgccgtgcttgcattgcaaagaagctgntgaggcttaccttggtgagctctttgaggacactaactt

SEQ ID NO: 27414 - DNA, 258 bp, Glycine max
  Clone ID: TF_LIB3170-033-Q1-K1-F2
ggaccctttgactcctatgcattgaagactgaactggtgcgtactggaagctcataccgacatacttcgagatggcccgttcaaagcatactgcttgtaagtcaactggaggaaatgctccgagatagcagcttgcaacctgggctgaacgttagtctgcacgaacaactgctggtgtgaagaaacctcatcgttatcgacctataactgttgctcttcgtgagattacgaaataccagaatagcactgagctcctaa

SEQ ID NO: 27415 - DNA, 358 bp, Glycine max
  Clone ID: TF_LIB3039-023-Q1-E1-D9
gatagcagtatctttgctcatctatattcaccaatgtacactgcatttcacttcggcgtttgcgatcatcagagcaatggcacgtgtcaccatgacgctcacacgtctaacagatgaaatgctccgaagaagcaattggcatccaaagcctctcccaaatgagccccggcgaccttcggagtgtacaatcgacacagcttcaggccattaacggtggcactaacggagattctacagtagcagcatagcacgaatcctctgatgacgaaactcccatatcagacgctcgtcaaataaatcgctcaggatatcaaaacgcatcacagctttcagtccaacgccatgtcggatcttcatg

SEQ ID NO: 27416 - DNA, 265 bp, Glycine max
  unsure (1)..(265): unsure at all n locations
  Clone ID: TF_700988871H1
cctagattcagccacagttggaaaaaaaaaaaaagttgttcganatggcacgtacgaagcaaactgctcgtaagtcccacaggaggaaaggcacctaggaagcagctcgnaaccaaggctgcacgtaagttctgcaccaactactggnggtgtnaanaagccanatcgttatcgtcctggtaccgttgctcttcgtganattaggaaatcccagaagagtnccgagcttttgatcaggaagctccccttccagaggcnggttcgt

SEQ ID NO: 27417 - DNA, 411 bp, Glycine max
  Clone ID: TF_jC-gmX3042004B07sg10K4b1
gctggcccgcccctgcaggtccacggctccggaatttcccgggtttgtcccacgcgcccgaataggctgcccgaagaccacagaaggggatcgcacaacattattctttcgcaccttgcagaatcaatattctctctgaatcgactttcatggctcgggccaagcaaaccgggtcgcaaatacaccggcgggaaggctcctacgaagcaactcgctcaccaaggctgcaagaaaatctgcacctaccaccgggggagtcaagaagccttatcgctatcggactgtaactgttgctcttcgagagatccgaaaataccaaaagaggacatagcttctgcaccgcaggcacccctcatgcgcgttagatatgcaaacgctccaagactaccagactgagctgtggagacagag

SEQ ID NO: 27418 - DNA, 349 bp, Glycine max
  Clone ID: TF_LIB3167-080-P1-K1-D7
ccgggcctggatttccgggtcggaccaaggcttccgccaacgcttccgtcaacgcttccgttcaaagcttccgttattttcaaagattaaggtccggggtttcggaagcagccacagttggctcgtccaaagcaaaccgttcgtaagtccacaggaggaaaggctcctaggaagcagttggcacccaaggttgaacgtaggtttgaaccaactactgggggggtgaagaagcccaaccgttttggtcctggtcccgtggtttttgtggaatttaggaattcccagaagagtcccgagcttttattccgaaagctccctttccaaaggttgttccgggaattggttaagg

SEQ ID NO: 27419 - DNA, 429 bp, Glycine max
  Clone ID: TF_jC-gmXLIB3564P090de03a1
tttgttttggtgttgggagaaaccctaggaatgcaattgactcctctgagtaacatggttttataactaaggtggagagagtaatatgtgacattctaaattgccacacagatggagaggattcctacaaccaaactcccaaacacattctggatgaccataaccctaaccctaagcacctaacacccaaacctctcaaccttgtttataaggactcgtaactctgacccttgatgcaagctggatatccttggccattatggttacccttttagcatgaatcgtgctgaggctagtgttctttaccaacccaacaatgtatgccttaacagcctcctgaagcgcggaacacagctctgtttttgaaacgaaaataaggacttgaaatcttgcgcaatttgtctcacgagcctatataatggaagcttc

SEQ ID NO: 27420 - DNA, 509 bp, Glycine max
  Clone ID: TF_jC-gmle01810084c01a1
atcacaacaagacgaaaagcacgcctcgcaaccatcgcaccacttggaacactctcgcgacctttgcgctagtgatcaccgtctgttcctagccgaattgttccatccggccccggcgcatcgacgcgacgcgatattcaccgggcattggccttacatttcacaatcacaacacgctttggatctttgtcgcgtacctcagaaatcgttgtaacgacaagtgcgcattgaaaaagagcagtgcgcatatccggaagccatggcgcgaacacaagcaagttctgctgctcaaagagggcgaccaagcacaggcggcaaaggcaggcccagcgacgctggaaagagcagacctagcgagtctggcaaggaagtcacaaaagcgccgcgaaggagtagtggtggcaagacacctgcaagtcccggaactcgcaaaaagccgcgctacaagccaggcacggtggcattgcgcgaaattaggagataccagaagtcgacggatctcctactac

SEQ ID NO: 27421 - DNA, 251 bp, Glycine max
  Clone ID: TF_13790103
gcaacgcttaacctctctcattccccatttcctcacctccttcaaccgctgctaaattctagggttccgaaatggacgctggcggaaagatcaagaagggcgccggaggtagaaagggcggcggcccaaagaagaagccggtttcaaggtccgtcaaagccggtctccaattccccgtcgggagaattggcccgtatttgaagaagggaaggtccctcagcgtgtcggtcccgggcccccgtatactgggc

SEQ ID NO: 27422 - DNA, 340 bp, Glycine max
  unsure (1)..(340): unsure at all n locations
  Clone ID: TF_jC-gmfl02220103c09a1
ggctcgagaccttgttgggctctttgaagtctctttttattgtgccattcacgcctatcgtgtgactgtggtgcccaaggatattcaactggcaagaaggattcttggcgagcgggcttgagttggagaatcctgtgttagtgaagatggattgttggtgggtgctgatggtagttcgtactaagatttttttttgaggaaaccgatttgctataagatccttcaacgtgtttacttggcagtcctattaattgacattggtatcaactgcctacatacacttngaaggcctggttgatagaaatttgccatgtgtgttgattttatggatcctttattt

SEQ ID NO: 27423 - DNA, 268 bp, Glycine max
  Clone ID: TF_uC-gmflLIB3260P045a12b1
gggcccgcccgcaataccgggccgaaaacgcgggcggaaaacgcggccgccaaagttttggagcttgttgagaacgctcaaacggacaacaagaggacgaggaagggaccaaggcacaaacaagtggcggataggaaccaccaggaggcgagcaaactgatgggagcagggaccatagccaaacggtggcggggcgcctaacattgaccaaaattcgccgcccaacaagggcgctggcaacgggaagaccgacatcggaacggctacc

SEQ ID NO: 27424 - DNA, 172 bp, Glycine max
  Clone ID: TF_5688045
ggacgctggcggaaggatcaagaagggcgccggaggtgtaaagggcggtggtccacagaagaagccgggttcaaggcccgtcatagccggtctccaatttcccgtcggaagatttggccgctatttgtctgaaggaaggctcgctcagcgtgtcgcgaccgggctcccgata

SEQ ID NO: 27425 - DNA, 393 bp, Glycine max
  Clone ID: TF_LIB3040-017-Q1-E1-C5
agtccaggcgtcagacggctgcaagaggagtacagaaggggattcacaccttcactccctctattgctttctcaaattccattttccaattcagaagcctatctccgtgcgaagcagcacatcgggatggcaccaaaggcagataggaagccagtatagaagaagcctgtggaggagaataaatcgactgtgggatacaaagctccggcagatatcaagtcagcggccggagagaagcttccgaaagagggaggagccggcggagaatgtatgaagaataagagaaataagaatagcgtggagacatactagatctagatcggaaacgttcagaagcacgttcacactgacattggtatctcaaccaaagcaatgggaatcataagcagattc

SEQ ID NO: 27426 - DNA, 431 bp, Glycine max
  Clone ID: TF_uC-gmropic007g05b1
ttgacgcgtgggtaaatttctgccactgcgaactctcgatcccgcgtttttcacatcaacaacatcaatcgccatttcgaccgatcggctaccgcgttcgaacccgtattgattcatccccaaatttttgatacttttatcttacgactttttttacgcgatcatctcgacaatgcctggtggaaagggaaagtcttctggcggaaagagctccggcggcaagacgagcgctgctgagggcaccaagaagcagcagagtcactctgctcgtgctggtcttcagttcccttgcggtcgtgtcaagcgttttctcaagcagaacacccagcagaagatgcgtgtgggagccaaggctgccgtgtacgttacagctggtctggagtacctgactgcccaagtcctcgagttggcaggcaacgctgcaaaggatc

SEQ ID NO: 27427 - DNA, 309 bp, Glycine max
  Clone ID: TF_LIB3049-043-Q1-E1-G8
gatagcatatcatgaggcgttcgcaacttgcacactcaattttctcactcaagcgtcgttcaaggctcgtacaaatgaagcggttcgcaagtctacgggtgggaacgatcctaggaagcacatcaccaccatggctggagtaaactctgtatctacgaccgattgagtcaagacgactcatcactatcttcttgcaactgttgctcttcgagagatcatgggctaccaaaatagcacagagcttcggatgcgcaagctcgactttcagcgtcctgttcgtgagatcgcgcaagaagtcaggactgattt

SEQ ID NO: 27428 - DNA, 399 bp, Glycine max
  Clone ID: TF_uC-gmroLIB3258P119f12b1
gttataggcactgacgatatcaagctaagacggattgctggtaccaaacagagcgctcgtgaatctacaactatatagtctgctaagaaggagatgtctaccaaatttgtgactattgtatggaccaactgcagatggagtgaggaatatactctgggatgtattgactccgttgctcttagtgagactgctaattaccagaggatgaccgaacttttgatgctgaatctcctcttacacatgctgaattgggaagttgctcatgaattaaagacatgatctgtgttctcagatccacgccgttcttgcatggtgagaagctgctgaagtatacctagttgggctctttgaggacactaacctgtgtgccattcatgccaagcgtgaaaccaattatgc

SEQ ID NO: 27429 - DNA, 272 bp, Glycine max
  Clone ID: TF_701136208H1
tttgctttctaggtttttttttttttttcttgctctttctctgtgtcgatggcgggaaaaggaggaaaggggtttttggccgaaaaaaccagggaagcgaaaaaggacaaagacaaggttaagaaaaggcctgtctctggttaatcccgtgctgggatccattttcctgggggtcgaatccataggcatttaaaccaaagggtgcaaccaaatggacttttgggggcgactgctgctgtgaacttggccccaattctggaatatctgactgc

SEQ ID NO: 27430 - DNA, 346 bp, Glycine max
  Clone ID: TF_GmC411_4
ccacgcgtccgaattgagcaagcttcttggtgacgtcaccatcgctaacggtggcgttatgcccaacattcacaatcttctccttcccaagaaggccggtggctcatccaagggcgctgctgctgacgatgactcttaaatagggattcgcttttcttgatttttttattatcaaatttagattatcttttggcctctctgttttgtagtttcttttttagttttgataattatgctctgtagttgtagttaggttttcattactgatgtgaatagagaatgctcttgttcttcaagaaagattgttgaaaatttgaatcattttaatttgtaatttttcagtctc

SEQ ID NO: 27431 - DNA, 391 bp, Glycine max
  Clone ID: TF_LIB3049-056-Q1-E1-C3
gactgacagagtcaaagtctctggttgtgttcacttgttatgtttaacgcttactggcgtcgtggcacgctctaagcgttacaatcgtgggtctcttcgacgaagggtgccatgcaacatgttgccacgatggtgcaggtttgtctgcaacaacttctggtggtgtgcattatgccgaccgttattgtcgtgtttgcgttgctcctctttacattaggatgatgccacaacagttccgtccttttgatcaggtagctccccttctagaagctggttcgtgaaagtgctcatgacttcaacactgatctgcgtttccagagccacgccgtgcttgcattgctagaacctgctgaggcataccttgttgggctctttgagggacactaactgt

SEQ ID NO: 27432 - DNA, 414 bp, Glycine max
  unsure (1)..(414): unsure at all n locations
  Clone ID: TF_LIB3242-257-Q1-J1-B9
attaaatgtcaaagttctttcaaaaactaaattaatgtctattttatctttgagttcnaatcacacaaggctggattcaatccacaagggggctacccttaaccaactttcaactaataccttcctcaagtcttctccttcgaccgccctagtgaagaagccacacatgttcatgccatgaaccgttgcccttatggatatcaagaagtaccataacagcactgaacttctgatccaaaagcttccttttcaacgtttttttcatgaaatcgctcaagacttcataactcatctttctttccataacatcacccttttctttctccaataatcccttgaagcttactttttttttcttttttaaaaacactaaccttttttcttttcacactataattgtttaccattttttcc

SEQ ID NO: 27433 - DNA, 705 bp, Glycine max
  Clone ID: TF_LIB5068-070-A1-XP1-E5
tcgggaaccatagtcgtgtctcattatcactcaccattggacaaccgacttcacttctccgttacccactatgagagatacggcatcgtaccaagctcaccgcgtccaagtgcaccgatacgaaaggctgcgaggaagcagttgccgaacaaagtagatcgcgagtcaaccacggcgaccggcggagagaaggaaacccgccgcttaatgccaaaaaggatgactctggagggacattcaaacgtgccacaagatgaccgaacttccgatcagaaaactcacattccgaggatcgccagagaaatcgctcaagattgctgaaccgatctcaggtgtcaaaggagcgccgattcagttcttgaagaagccgtagaggttaatctcggtgaaatcattgaggacactacccactgcgctattctggctaaacgaggtaccactatgtccaaggacatgcccctcgatcggatagtctaaggagagatagcttatcattatgggtgcatgtgatgagacattagaaagaggttactggtgattggactgcgagatatcttcaaatgcctctgaattgaaagatgcaacttatgtcatgcagagtatattcacatagtggagctgcacaactgagatgatgatgcacaacgacatgaatctctactatcatatatccttccgtgacaaagagaaaaggaaaaggccccg

SEQ ID NO: 27434 - DNA, 414 bp, Glycine max
  Clone ID: TF_jC-gmro02910047e01d1
ttttttttttttttttttttttttttttttttttttttttttttttttcttgggttttttttttttggaaaggaaaaaaaatcccttttggtttaaccccctattcctttcaaagagggatccaaaaatcccctttttttaaataacaaatggcttccacccaaacaaaaaaagtaaccacccctttacctaaaaagattttctaaaaaaaaacccctcattcgaaccaagggggcctaatatctaaataaaaagccagtgtacttggggaccgccttgtacccctaaaaaacggggttcttggccaattcaccgggaaaaaaaatcctaacccgggggtaaatttcccttgaagagagggggggcctttttttgtaatcggccagattaaaaatatcctgggcaatcttcttc

SEQ ID NO: 27435 - DNA, 562 bp, Glycine max
  Clone ID: TF_LIB4202-003-Q1-K1-F3
ccacgcgtccgctcatcctctctgatccaaccctttgaacttctgccttctgcccccttcgacccccgtttttctctagacaccatgtactgcacgctctccgcacgatctagatggtcgccggatgtagaaagggcggaggtctaaaaaatacgccagtttgaaggtacaccaaagccatgctccaattccccgtgggaagaatcggccgttgttaggaataaaggaaggtccgctcatcgtgtcgggaccggggcttccgaatacttgggtggagatatagaatacctagctgcccaagtgcttgagtgggctgggaatgccgcacgtgacaacatagaacaacaggatcattccaagacacactgcttttggcactgaggaacaatgaatagttggggaaatgggtcgctggaatgacaattgcacatggaggcgtgcttacaaacatgaactctgttctgttgcctaaaaagactgacagggcttgcaaggaacctaaatgtacatccaaggctaccaaatctcctaagaaagcttagatgacttagatattgtccat

SEQ ID NO: 27436 - DNA, 193 bp, Glycine max
  unsure (1)..(193): unsure at all n locations
  Clone ID: TF_LIB3170-005-Q1-K1-C11
gatcccataaaaaacacacgcgcnaaaaaaagggggaaaaaaaaaaaaaaagcgggcgcccaaagaagaaaccggtttcaaggtcgcgtcaaagccggtctccaattatcccgtcggaagaataatccgttattttaagaaaagaagatgctctcatcgtgtcggtaccgccgctcccgtatacttggctgca

SEQ ID NO: 27437 - DNA, 372 bp, Glycine max
  Clone ID: TF_jC-gmfl02220064c06a1
ggctcgaggttttttttttaacttttttaatttctaaacctcatcttcctgatcatgaacaggcaccatattcataaattaaaggccctactttgttttccaagtgccatgcgcatacttcagaactggcagcgagaaattccccttgatgcaaggcatcatccactgctaagacactccatggtagactagtagatcatagacttgtgaatgccaagatattgtcctacaccagcaattgatccttttatcagggtctccaactcttccttcaggcagattgtttgttgttaacgccggggagtcttacgaatcgacttcatatccttgcttgcattccgtgccagctccaatacctcagcatgtgagacc

SEQ ID NO: 27438 - DNA, 274 bp, Glycine max
  Clone ID: TF_LIB4367-023-R1-K1-D7
tgggccacccaagacctgacaccatgcacaaagcattcttgccatctgggccacccaagttatctagatgggtgcacgttgagggttacccgaattgctgatcgacctcttggtgaggctactgacccaatctatccagactggcaccgtctcacccattaaacccaccatcactaccagggaacttcagaccgcttgcaggcttgtgctccccggtggataggccaagcacgccgtccctgttggtgcgccggcctggccccaagttcgctag

SEQ ID NO: 27439 - DNA, 232 bp, Glycine max
  Clone ID: TF_10845002
gtgtctatctaatcaaactgcttggatgtccacgccgggaaaggcgccccataagcagctggcgactaaggcggatcgcaagtcggctccggcgaccggcggcgttaataagcagcacaaattcaggcccgaaaccgtggcgctgctcgagatccagaatattcagagaagcacggctactttgatggcgaagcttccggaaaatcagtcgatcacagagatagagctagaa

SEQ ID NO: 27440 - DNA, 416 bp, Glycine max
  Clone ID: TF_jC-gmXLIB3563P053bb05d2
gggaaagaaaaaaaaaccctcttttttttaccacctttttccttacaaagaggggtcaacaaaccccttttttttcatttaaaaatgggtttccccaaaaaaaaaaaataaccccccccttcaacataaaactttttcctaacaaaaccccctaaatcgaagggagggggcttaatagccatttaaaaaccttgggaacttggggacccccttggccccctaaaaaacggggggtttggccatttccccgggcaaaaaaaccctgaccgggggttaaatttcccttgaagggagggggggctttttgttggaccggccaattttaaaaaattccggggcaaccttctcaaaaatggcgtgaaaaaaacttgtcataatccccagggccttgtttgaaaaaccaagggggggggggc

SEQ ID NO: 27441 - DNA, 335 bp, Glycine max
  Clone ID: TF_LIB3242-722-P1-K1-G12
tcgtcggctgcgagaagaacaaaggggctgttcttggttaacaaatacaggggggattccaattcgaaacctattcatttatggaaccattggagtgtcgtcatggtccaaggcatgtagagcctgtggaatttagcccgcgtggaaatatgtcacggtgggagacaaggtccggcggataagaagccataggccggaaagaagctctcgtaggagggaggcgccgtcggtgaagggatgaagaagaagagaaacatgatgagcgtggtgacatacaagatctacatcttcaaggttctgaagcaggcccaccttgacattggtatcttaggcaa

SEQ ID NO: 27442 - DNA, 491 bp, Glycine max
  Clone ID: TF_GmC1625_2
ccacgcgtccgcgaaatgcaggtgttggagctggccgggaacgctgcacgtgacaacaagaagaataggattaaccctaggcacgtgttgctggcggtgaggaatgatgatgagctggggaaactgcttcaaggtgtgactattgctagcggtggagtgttgccgaacattaacccggttttgttgcctaagaagagtaccactgcgccttctgagaagtcctctactcctaagtcccccaaatctcctaagaagaaatagaagtttcattttgtaaaggcttatcgttttttatttttattttttgggggtaggggttggtaacattaccatatatatatatatagttcttaggttaggtgaaatatgatggtgtaatttagcgccaggtgttcgcttttttgctttttttggtcaccccatcgatggctgaatatgatgttaaatgtagtgggttgccaattcgtgtatggaagaagcctttttcattt

SEQ ID NO: 27443 - DNA, 571 bp, Glycine max
  Clone ID: TF_LIB4204-007-R1-N1-H9
gttttgggtttttgggggttttttttttttgggcgacgaaaacaacactccttcatttaaatttcaattgaggggttacattttctgagcaaacatagcttcgggtgggacagaacaaaccaaaacctaaactaaacttcacgcgaattcaaaagaaccaatgggggaggcggcgacacaggcattaaacctaaagattctattctttaacctccaaaacgcatagagggggcttccctggctcttgagagcgtaaacgacatccataggaggaacaggtttcctcctagcgtgctcagggggggggacaggatcgggaatcagggggtccaaaaatatcttcagaactcctctgggttcctcggaaatcaaaccactggtcctcttcacgcgacctcttctcggtaacctacgaatcggaggggttcggagtccttgaatggggggacgaagaacctttctgggcctcttaactgctccctttcccaaacccttcccaccttttccacgggctgggattgtgggggggaaatttggggggaacttaagttggggtccccttttggggggt

SEQ ID NO: 27444 - DNA, 360 bp, Glycine max
  Clone ID: TF_LIB3040-009-Q1-E1-E8
gacagcaaagcaattttcaaactcaattacaattcaataaccaaacctccccttggtttccaattcaaaaagaagtggcacttccaagccaaaccgcccacaattcaaccgggggaagggccccggggacgcaattggagactaaagccgctcacatgtcagctcgggacaccggcggtgtgaaaaagccccagcgtttcaggcccgaaactgtggctctgagggatatcagattgtaccagaagagcactgatcttctgatgcgaaaactcccattccagaggctcgtcagaaaaatcgctcaggatttcaaaacatatcttcgtttccagagcagcgctgtttctgctcttcaggaag

SEQ ID NO: 27445 - DNA, 280 bp, Glycine max
  unsure (1)..(280): unsure at all n locations
  Clone ID: TF_16282480
caccgaaaccgtagaaagtcctgcctttccttttgagagcataaacaacatccatagcgggaacggtctttcttttagcgggctcggtgtatgtaacagcgttccgaataacgttctcgaggaagatcttgaggaccccacgtgtcttctngtaaatgagaccactgatttttttaacaccacctttggggaccaaacgcccaattggcggtttggtgataccctggatgttgtaacaaaacacctttctgtgctctttgcttctctcttttccaacacc

SEQ ID NO: 27446 - DNA, 604 bp, Glycine max
  Clone ID: TF_jC-gmXLIB3563P053bb05d3
gggaaaggaaaaaaaaccccctttgttttaccccccaatcccctccaaagaggggcccccaacccccatttttttccctaacaaagggcttcccccaaaaaaaaaaaatacccccccccttcaccaaaaaacattttcccaacaaaaccccctaaatcgaagcgagggggcttaatagccagtccaaaacctagggaactgggggacccccttggccccccaaaaaacggggggctgggccaattccccgggcaaaaaaaccctgaccgggggttaaattccccttgaagggggggggggctttttggtggaccgggcaattttaaaaaatcccggggcaaccttctcaaaaatgtccttaaaaaaactgttaataaaccccagggccctgctggaaaacccaagggggggggggccccccttcaaaaccttgaaaaagaaaatctgggttgccccccccccctttgggggtctttttttttttttcccttttccggggggccccccctttttaggaagcttttttccggccttgggttttttccccgccggacccttgtcccccccggggactttttctcctccgggggcttttttcccgggg

SEQ ID NO: 27447 - DNA, 387 bp, Glycine max
  unsure (1)..(387): unsure at all n locations
  Clone ID: TF_LIB3039-047-Q1-E1-H1
caaaaagggaatcaaaactttaaccaatcctcaatccaacaattccaattcccaatccaaaacctaatactttaaagaactaatattgatcaattttggaacaagaagaaaagcacgaaaaaaccgttgagaaaaatcacgtggaaaaagtccngcgaaaaagccaggccggaaaaaagcttccaangaggaagacccgccggaaaaagggggaagaggaaaagaggaacaagaagagcgtggagacatacaagatatacatattcaaagttctgaagcaagtcaaccctgacattggtatctcaagcaaaggcatgggaatcatgaacagcttcatcaacgacatcttcgagaagcttgctcaagaatctttcagacttgcccgct

SEQ ID NO: 27448 - DNA, 662 bp, Glycine max
  Clone ID: TF_GmC40_15
ggaattcggcacgaggaattgctcaggacttcaagactgatctgcgtttccagagccacgccgtgcttgcattgcaagaagctgctgaggcataccttgttgggctctttgaggacactaacctgtgtgccattcacgctaagcgggtaaccattatgcccaaggatatccagctggcaagaaggattcgcggtgaacgtgcttgaggtggtggttgtgaagatgaagatgaagatgggttgctgcgggtggtgtttttgttgttcaaattcctttttttttttttttttcaatggatagggttgttagggagtgtaggtgttttacggtattacccattaattgtgatacaggcaaatactgccaagtgtccgtgactgtgttttcctccttttagaaaattggcttgtaattgatttttggacatgtgtgtcataatgtttctgtttttagtttttacctacgggatgtagtcactttggaattgtattggacaacattcagttgccatctaatctcgtttaagctaagtttgttgtgctaattaaactgacctcccttcttggttttgaaatgagaggatttgaatatagtattacagaactggcaaaaaaaaaaaaaaaaaaagaaaaaaaaaaaaaaaaaactcgagactagttctc

SEQ ID NO: 27449 - DNA, 352 bp, Glycine max
  Clone ID: TF_LIB3170-009-Q2-K1-H1
cgatcctgtggattctattcttcaagatacacacggctcgtacgaagcgcaccgctcgtaagtgcacaagaggaaaggcttctctgaagcagcttgcaaccaaaggtgaacgtaagtctgtaccaactactgttggcgtgaaaaacccccaccgttatcaaactggtaccgctgctcttagtgagattaagaaataccagaagagtaccgagcttttgatccacaagctgcccttacagaggatgaaccgtgaaattgctcatgactttaagactgatatgcttttccagagccaccccacgcttgcatttcaagaagctgatgaggcataccttattaggctctttgatga

SEQ ID NO: 27450 - DNA, 315 bp, Glycine max
  Clone ID: TF_LIB3049-016-Q1-E1-F3
agggggagtcaatgcattcaggattcaccaattgcgttttggatccagataccggtattcttcgagatggcacgtactcacccaagtgctcgtatgtcaactggacgaaaagctcccaggaagcagcttgcaaccaaggctgcacgtaagtctgcaccaacaactggtggtgtgaagaagcctcatcgttatcgccctggaactgttgctcttcgtgagattaggaaataccagaagagcactgagctcctaatcatgaagcttcctttccagatgttggttcgtgaaattgcccaggatttcaagactgatctg

SEQ ID NO: 27451 - DNA, 423 bp, Glycine max
  unsure (1)..(423): unsure at all n locations
  Clone ID: TF_LIB3092-022-Q1-K1-E10
tttcttaacaaatgttttttggttttcacanaccgaaatacttcgcgccggcccgcacaattcaaacgcgctcataactcaactanattaaaatctccacataagcatcttgcaaccaattctgcacgtaattctgcaccaacaactgatggtgtgaacaatccttatctatatctccctgtaacttttgctcttcttgagattattaaataccacaagagcactgatctcctaatcaccaatcttcctttccacacgtttcttcctcaaattgcccaaaattttaagactgatcttcttttccaaatccatgctatactttcattgcaatacgcttcttaagcatatcttgttttcctcttttatgacactaactttgtttccattcaccccaaacgttttactattattcccaatgatatt

SEQ ID NO: 27452 - DNA, 361 bp, Glycine max
  Clone ID: TF_12015491
ggcaccaaaagcagagaagaagcccgttgaggagaagaagtccactgtgggagacaaggctccggcggagaagaagccataggccggaatgaagcttcttaaggagggaggcgccggcggagaagggaagaacatgaagaggatcatgaatagcgtggagacatacaagatctacatcttcaatgatatgaaacaggttcaccctgacattggtatctaaagcagagccatgggagtgatgaacatgttcattaacaacatttatcttaagctcgtctcaaaatcttatttacttgcccgctacgtctagagacttatcatcacttgtagggaggtagagaccgctgtcaagcttgagctg

SEQ ID NO: 27453 - DNA, 399 bp, Glycine max
  unsure (1)..(399): unsure at all n locations
  Clone ID: TF_LIB4367-010-R1-N1-C7
ctcctattgccgccggggagaaggggggaagaagaaaaagaggaaagaagagcgtggagacatacaagatatacatattaaggttntgaagaggtcaccctgaattggtatntaagcaggccatgggaatatgaacagttatcaagacatcttgagaaagttgtcaggaatgttcagacttgccgttacaacaagaagcccaccatatttnaagggagatncagaccggggtaaggcttgtgctggcnggtgaactggncaagcacgccgtttntgagggtaccaagggcgtgannaagttgaacagttgttgaacaaaatatgttaattttgtttacgtgggtgttgttttggttgatgtgtatgtgttagatgtagggaaggtatgtttaggtttga

SEQ ID NO: 27454 - DNA, 451 bp, Glycine max
  Clone ID: TF_uC-gmflLIB3260P039c07a1
aaacccccaacccattctaaaatgccggggttcctataaaaaaaaggaatcctaccccttccataaacaacttaaccactaacatttctttaattacaaaggctaacccccaaaccccccaaaaaacctactggttaaaatttaaacattggcccaacccccttaaatacaaaaacaagaccctgaaaaaatcaataaaatttattttgttcaaaacctggtgaacttggggacggccttggtcccctaaaaaacggggtgtttggccaattcaccgggcaaaaaaatcctgaccggggtgtggatttcccttgaagggagggggggctttttgttgaaccgggcaaatttgaaaaattcctgaacaagcttctaaaaaatggccttgataaaactgttaattattcccagggccttgtttgaaataccaagggcgggggggccctgcttc

SEQ ID NO: 27455 - DNA, 1182 bp, Glycine max
  Clone ID: TF_GmC1341_4
gcacactgatgtggctgtcctgctcgacaatgaagccttacaaagcagatgaagagacttttgaatcatctcatgaagcgttcaaatcagcttttcctagagggtttgcttgggaagtgatcaaagtttatagtggaccacctgaaattgctttcaagtttaggcactggggcttctttgaaggtccttttaagggacatgcccctaccgggaagatggcccaattctatggcttgggaactgtcaaggtggatgactctttgaaggttgaagaggtggagatttactatgacccggcagagcttcttggaggccttctttcagggaatcacgaagcccgcgattcggcgtctggcgcgacgtggtggcgtgaagcgtatcagtggtctcatctatgaagaaactcgcggtgttctcaagatcttcctcgagaacgtcattcgcgacgctgtcacctatactgagcacgctcgccgaaagatttccacttgcatggacgttctttacgctctcaagtgacagggcaggtctctctatagtattgacaattagagatgtgtcatgtagatcattttacctcaggctcaatcacaatcatgactcatgaggtttattggctatacaggtggatgactctttgaaggttgaagaggtggagatttactatgacccggcagagcttcttggaggccttctttcagggaaccacataaatcacccaattgaagaggatggcaccaaaacttcagcaccttcccaaggatgtcccttctccaaataattacaatgatgtttttaagtgaatggtgtcttgggatccagctatatttcttgaattaattaatgtggcagctgagatttgaaggcaaatatagtatttgtgtgaaattgggtccattgaataaaattggaaacatgtcaaaatgaattatttttccccccgctttatatggaaaattatggcaaataaatgtgatgtgttggaaagcaatgtgcatgatacaatgtcggtttggctttgctgttgcatagtttagaagttataagttattttattttattttatttttgggagggagagctttctagcaatctgatgaagagatcgatccaataagggaccaagttagctcatgtggcagcaaaatctattatattgttgaatgaaagcatttgaagatc

SEQ ID NO: 27456 - DNA, 346 bp, Glycine max
  Clone ID: TF_7233625
gagaaacaccgagaatgggaaaaacagcgacgcggagaagaagccaatttggaaagccggcagatccaatctggaattgcgcgtgcaaagaattgccggggtggggagaagaagaaatacgctcacatatcggaccaaggctcccatatacttagctacacttctcaaatacgtggctaccggaaggcgggagttaacgtaaaataccacacgtgacaacaggaaggacgggattattccaagacacgtacttttagcaaggaggagcgatgaagagtgggagaaagtactgactggagtaacgaggacgcatggtaacggacttgcgaacatcagccctgtggtt

SEQ ID NO: 27457 - DNA, 438 bp, Glycine max
  Clone ID: TF_LIB3242-704-P1-K1-A9
accggtgcgagaagaccacagaagggggaacctttgcattatattcattcaagattcagcgagtgcgttttggaagcaaagaccgaaatacttagagatggcccggacaaagcaaactgctcgtaagataactggaggaaaagctgccaagaagcagctttcaaccaaggctgaacgtaagtctgcaccaacaactggtggtgtgaagaagcctgatcgttatcgccctggaactgatgctcttcgtgagattaggaaataccagaagagcactgagctcctaatcaggaagcttcctttccagagggtggttcaggaaatacgcccaggatttcaagactgatctgcgttaacagagccatgctgtgcttgcattgcaagaggctgctgacgcataccttgatgggctctatgaggacactaacttgtgtgccattc

SEQ ID NO: 27458 - DNA, 392 bp, Glycine max
  unsure (1)..(392): unsure at all n locations
  Clone ID: TF_LIB3170-032-Q1-K1-A8
aagactacatttttttttttctttgcattctattcattcaggggtcaggtggttttttttggaagcanagaccaaaatacttcaaaattgcccgtacaaagcaaactgctcctaagtcaactgcaggaaaagctcccattaagcatcttacaaccaatgctgcacgtaagtctgcaccaacaactgctgatgtgaataaccctcatcgttatcgtcctgaaactgttgctcttcatgagattatgaaataccagaacagcactgaactcctaatcaagaagctttctttccataagttgaatcctgaaattgcccaggatttcaagactgatctgcgtttacagagccatgctgtgcttgcattgcaagaagcttatgaggcataccttttt

SEQ ID NO: 27459 - DNA, 528 bp, Glycine max
  Clone ID: TF_LIB4204-012-R1-N1-E12
ggggcaaacccctaggggaaaaacccgggggaaaaaagaggaatcttacaaaaaaaaggcattggaaaaaaacacttccctcccgtagcagaaaccaaattttaagggcaaaggacacgaaaccctaaacttaaccccccccccctttgattttggaaacaaattaaaggcccttgggcataaggggaaccccataaaaggaaaaagcccaaaggttagggccccaaaaaagcccaaaaaaaaaagcccccggggtttcctaaaaaaccaaaacgggcctgctttaaaagcggaaaacggttttaaaaacctgaacaatttctttgacaaacctttgaaaagggagttttcgaaaaaaaagttcggggctctttgggaactttaaaaaccccctaaaaaccaccgttcctggcctaaaacgggggggctttttaactccgccggtccccggggctaacttgaaaacggttttggttgccaattgcttcctcggagcctttcctccgggggacttgcaagcggtttgct

SEQ ID NO: 27460 - DNA, 467 bp, Glycine max
  Clone ID: TF_LIB3049-054-Q1-E1-D7
ccggggtcgacccacgcgtccgaacaggcgtcagtagagcagcgaaaggggtacagaagggatcgcatttcatggtactcaacctcaatatgatcacaaatgcatatccactaccttttttcgaagtctctgattgtcctaaaggcaccggtaatggaagagaagaagccggcggagaataaaccagcgtcggagaatgtaactgtggagaagaatccgaacgctgataataagatctcgactgaaggaaggagctagaagtatacgatgcgcacgatgaagagcgtggagacatacaagatgtacatcttgaaggtcctcaaacaggttcagccagacattggtatttccatcagcgccatgggcagcatgaacagcttcatcaatgatcttctctataacctcgccctagaagcgttgcgtttggcccgcttcgacatgaatcccaagatcacctcgagggagat

SEQ ID NO: 27461 - DNA, 424 bp, Glycine max
  unsure (1)..(424): unsure at all n locations
  Clone ID: TF_jC-gmX3040038G02sg9C1b1
ttctctgctgcgagaagacgacagaaggatgcggctgttagaacaccacaggggggggatcctttgaatactattcttcaagattcacacggctcgttcctagcacaccaatcgtaagtgcacaagagggaaggctcctctgaagcagcttgaacccaaagctggacgtctgtgtgtaccaactactggtggtgtgacaaagcccaccctatatagaactggtaccagcgctgttcaatggagcaagacttaccataagagtgccgagcttttgatccggcctcttcccttccagaggctagatcgtgaaattggtcangactgctagactgatctgcgtatccagagccgcaccgagcttgcattacaagaagctccttatgcataccttgatgggctctgtgtggacactaacctgtgtgcc

SEQ ID NO: 27462 - DNA, 464 bp, Glycine max
  Clone ID: TF_uC-gmflLIB3275P077d12b1
actggattataattgcctatccaagataatcgctctgtttgggagctagaaaggatagtcccgctcaaaacggacacctaccacgcgcacctttggggaggcgccgacgaatacagtggcgactaaaaccgatcgcaagtcacactcctgccaccgtaggactgaataagccttacacgctttaagcccggaacggtgggtctggaggatatcagacagtgccttaagagcactgaactattgatactagaactaccattccggatgctcttcacaaagatcaatcacgatttcaaaacatatcttcagttccagagcactgatgtttctgaccttgaggaaaccgcagatgattatctctatggactgttgaacgacaccaaactctgcgatatttacgccaagagagtcaccattatgcccaaggatatgaaacttgctcgcagaatcataagcgatagagc

SEQ ID NO: 27463 - DNA, 344 bp, Glycine max
  Clone ID: TF_LIB3040-041-Q1-E1-E10
ggatcccttgtattctattcttcgggattcacatggctcgtttcaagcacaacgctcttaagtccacaagaggatacgctctctacgaagcagcttgcaaccgaagctgcacgtatttctgcaacagctactggtggtgtgaagaccccccaccgttatcatcctgttaacgttgctcttcgtgtgattaagctgtacctgaagattaccgaccttttgatgcggaatctctccttccagtagctggttcttgaaattgctcatgacgtcacgactgatatgcgtttctagagtcacgccgtgcttgcattacaaggaactgctgtggctttccttgttaggct

SEQ ID NO: 27464 - DNA, 374 bp, Glycine max
  Clone ID: TF_LIB3040-010-Q1-E1-F10
gatcggatgtcagagcactcaacctcagtaccgctacgaaagcataaccaaaagcttttgacgaagtctcagattttcctaggggctccggcaaaggcagagaagaagccggcggagaagaagccagcggaggagaaggcaccggcggagaataagccgaatgcggacacgaagatctcgaacgaaagagggagcgacaagaataagaatcgcacgatgaagagcgtggagacctagatgatctacatcttcaaggtcctcaagcatgttcaccccgacattggtatttccagcagggccatgggcatcatgaatagcttcatcaacgacatcttcgagaagctcgcccaggatgcgtcgcgttgggctcgcta

SEQ ID NO: 27465 - DNA, 467 bp, Glycine max
  Clone ID: TF_jC-gmle01810041e09d1
aaaacaaaaaacttttaaaatccagcagcattacaatcccaggggtttcacaacagggaagttaaaagccaatagaatgaccttttacccaataacattaacatttgttcataaacaggaaagaagggctactacactaacttcttcataaacataaaggaacacttttttggggaaacaaagggggatttgattttcattttttggcaactttgttgatcaagggcttgggaatgggagggataacaccccccccaggaaggggccctttgatgaggggggaaagcttttcgtctcccctgatagcgagttgcaagggccttggggggatccttttcaccttaaaaattttggtaagattccccgccaggttcaggaccttagaagtgagattttccaaaatggaggccaagaacaccgcagcagtcgcccccacacgtccatttggttgcaccctttggttcaac

SEQ ID NO: 27466 - DNA, 284 bp, Glycine max
  Clone ID: TF_LIB3065-016-Q1-N1-E12
ttcatgtactgcgtttcggaatcagacacagatttatcgtactgagcaaagcgctcataagttcacaggatgaaaggctcctacgaagcatcttgcaaccaaggctgcacgtaagtctgcaccaactactggtgttgtgaataagccccatcgtattcgtcctggtaccgttgctcttcgtgagattaggaaataccataagagtaccgagcttttgatccgtaagctccccttccacaggctgattcgtgaaattgctcatgacttcaagactgatctgcatt

SEQ ID NO: 27467 - DNA, 425 bp, Glycine max
  Clone ID: TF_LIB3039-046-Q1-E1-C12
ccggctcgacccaagcgtaagaagacgacagaaggggagtacagaagacgcagttctcaccatttccctctcgattgtgagacttgatgttgttaactgaacttttctgagcaagaatgtctgggcgtggaaagggaggcaagggtttgggaaagggaggagcgacacgacaccgtaaggtgctgcgcgataacattcacggaatcaccaagcccgcgattcggcgtttggctcgtatgggtggcgtgaagcgtatcagtggtctcatctacgaagagacacgtggcgtgctcaagatgacagaagggggtgcacaagtgagtttgttgatcgagatatctagaaccagtgtgatgaacatgaacgtccctgttatcttcgttgctacaaatttggtagcatggcaatgacatgcgtacgatatg

SEQ ID NO: 27468 - DNA, 362 bp, Glycine max
  unsure (1)..(362): unsure at all n locations
  Clone ID: TF_LIB3049-054-Q1-E1-A10
ggaacctttgcaatccattcaatcaagaatcaacaagttccttttgggaagcaaaaaccgaaatacttcgagatggcccgtacaaagcaaactgctcgtaagtcaactggaagaaaagctccaggaagcagcttgcaaacaaggctgcacgtaagtctgcaccaacaactggtggtgtgaagaagcctcatcgttatcgccctggaactgttgctcttcgtgagattangaaataccagaagagcactgagctcctaatcaggaagcttcctttccagaagttggttcgtgaaattgcccaggatttcaagactgatctgcgtttccagagccatgctgtgcttgcattgcaagaagctgct

SEQ ID NO: 27469 - DNA, 308 bp, Glycine max
  Clone ID: TF_LIB3242-095-Q1-J1-E12
gaggagtacccagcttttgatccggaagctccccttacataggctggtgcgtgaaattgatcaggacttgaacactgatctgcgttaccagagccacgccgtgcttgcattgcaagaagctgctgacgcataccttgctgggctctttgaggacactaacctgtgtgccatgcacgccaagcgggtaaccattatgcccaaagatattcagctggcaagaaggattctgggagagcgagcttgagttggtggttggaaagatgactatgatcggtggctgcggttggagtacttgttattcagattcc

SEQ ID NO: 27470 - DNA, 446 bp, Glycine max
  Clone ID: TF_LIB3170-017-Q1-K1-H8
aggggctacagaaacattgcaagagatagaaaaagcaaaactgggttatcgcatttactccgaaacaaaccgtttcgctcgtgtgtcggatctgcgatggaagccccacccaaaggcgctgctataagaagaggcgacaggaataagtccggatccaaatacatcaatgctggcgtgcaattccacctctgccgcgtcgtcagttactagaagaaaggacgactctgttgccgacttgggaccggcgctaccatttatctacccgccgttctcgaatatgtcgtcgcagaaaagcagaagctggccgggaacgctgcacgtgacaaccagaagaataagattaaccctttgcacatgttgctggccgagaggaatgatcatgagctgtggaaactgcttctaggtgtgactattgatagcggcggaatgaagccgaacattaaccc

SEQ ID NO: 27471 - DNA, 425 bp, Glycine max
  Clone ID: TF_LIB3106-096-Q1-K1-A12
attaaacattcagcctgtgcgttttggaagcagagaccggattacttagagatggcccgtacaaagcaaactgctcggaagtcaactgcaggaacagctcccaagaagcagcttgcatcctaagctgcacgtaagtctgcaccagcaactgctggagtgaaaaagcctcatcgttatggatcttgaactagtgctactcgtgagactatgaaataccagaatagcactgagctcctaatcacgaagcttgctttacagaggttggttcgagaatattgccactatttcaagactgatctgcggtaacagagccatgctgagctcgcattgcaagaggctgatgaggcatgacccgtatgagctcttgaggacactaactcgtgtgccattcacgccaagcgcgtgactattatgcccaaggatat

SEQ ID NO: 27472 - DNA, 452 bp, Glycine max
  Clone ID: TF_jC-gmXLIB3563P075bc11a2
acggctgcgtagagacgacagaagggggatcctttgtattctattcttcaagattcaggtactgcgttccggaagcagacacagatggctcgtacgaagcaaaccgctcgtaagtccacaggcaggaaaggctcctaggaagcagcttgcaaccaaggctgcgcgtaagtctgcaccaactactggtggtgtgaagaagccccaccgttatcgtcctggtaccgttgctcttcgtgagattaggaaataccagaagagtaccgagcttttgatccggaagctccccttccagaggctggttcgtgaaattgctcaggacttcgagactgatctgcgtttccagagccacgccgtgcttgcattgcaagaagctgctgaggcataccttgttgggctctttgaggacactaacctgtgtgccatttacgccaagagagtaaacattattccca

SEQ ID NO: 27473 - DNA, 301 bp, Glycine max
  unsure (1)..(301): unsure at all n locations
  Clone ID: TF_6725068
ctccacaaatacgacatacaagttaaatatcctttaacataataatcaccctcttaacataaatcgcacacaagttaatatcctcaaacaaacccaccaagtaagcctccacagcttcctaaancgcaataacancgtgactctggaacctcaaatcgatcttgaagtcttacgcaatttcacgaacaagacgctagaaaggaagcttacggatcagaagctctatactctttgngtattttcgaatctcacgaagaacaacagttccagacgaatagcaatagaacttcttaactgcacc

SEQ ID NO: 27474 - DNA, 665 bp, Glycine max
  Clone ID: TF_GmC45_9
ttcttcgcgtccgcccacgcgtccgcccacgcgtccgcttttaacaatccacacccaaattctagggttccgaaatggacgctggcggaaagatcaagaagggcgccggaggtagaaagggcggcggcccaaagaagaagccggtttcaaggtccgtcaaagccggtctccaattccccgtcggaagaattggccgttatttgaagaaaggaaggtacgctcagcgtgtcggtacggctgcgcccgtatacttggctgcagttctcgaatacctagctgccgaggtgcttgagttggctgggaatgcccgtgacaacaagaagacacaggagtattccaagacacgtgcttttggcagtgaggaacgatgaggagttggggaaattgcttgctggtgtgacaattgcacatggtggtgtgcttccaaacattaaccctgttttgttgcctaagaagacggagagggctgccaaggagcctaagtctccatccaagggtactaaatctcctaagaaggcctagattatccctttttttttttttttttttaaatctagtgttgtatatcggtgcttagatgcttttggtgtaacaggaaatttgatgtgtttcttaaacaaaaaaaaaaaaaaaaaaaaaaaaaaaaaagcggccgctttagagga

SEQ ID NO: 27475 - DNA, 543 bp, Glycine max
  Clone ID: TF_uC-gmflminsoy091f03b1
ggaagcagagaccgaaatactttgagatggcccgtacaaagcaaactgctcgtaagtcaactggaggaaaagctcccaggaagcagcttgcaaccaaggctgcacgtaagtctgctccaacaactggtggtgtgaagaagcctcatcgttatcgccctggaactgttgctcttcgtgagattaggaaataccagaagagcactgagctcctaatcaggaagctttctttccagaggttggttcgtgaaattgcccaggatttcaagactgatctgcgtttccagagccatgctgtgcttgcattgcaagaggctgctgaggcataccttgttgggctctatgaggacactaacttgtgtgccattcacgccaagcgtgtgactattatgcccaaggatattcagctggcaagaaggattcgtggtgagcgtgcttgagttggtgcgttctgtgctgtgaagatggaatgctggtggctgccgattgtgttttgttactaaagtttcctttttgctaaagcctataggttatttaggaaaaata

SEQ ID NO: 27476 - DNA, 808 bp, Glycine max
  Clone ID: TF_GmC1224_1
acgagccggaaacaaaagtccgcccacgcgtccgctcaattccgcgctttaacaacagaaagaaatccacacatttccctttcaatggcacgaaccaagcaaacagcgcgcaagtccaccggcggcaaggctcctcggaagcagctcgccacaaaagccgctagaaagtccgctccggcaaccggcggagtaaaaaagccgcaccgttttaggcccggcacggtggcgctgagggagatccgaaagtaccagaagagcacggaacttctgatccggaagctcccgttccagcggctggtgcgcgagatcgcacaggatttcaaaaccgatttgcggtttcagagtagcgctgtttccgcgcttcaggaagcggcggaggcttatttggttgggttgtttgaggatactaatctttgtgccattcacgcaaagcgcgtcaccatcatgcctaaggatattcaacttgcaaggaggatcaggggcgagagggcttgaggttttaaaatgtttcgtcaccgctaggatacgttaaaataggatctggttcatgtagtttggggttttggtgtatttagtctatcgtgagggttgggattgttagtatgaagatgtggagttaaagatatctggcttattagtagtttagtgattactttgaattttctgattgggttaatgaattgaaaggttgattgcaatgaattttggcttcatctagttcttcttccattttggtttgcaaaatcatgcattccgttttgtattatgaggttgatggcatttgctttagcaattttaagtggtagtt

SEQ ID NO: 27477 - DNA, 1128 bp, Glycine max
  Clone ID: TF_GmC127_1
cccacgcgtccgcccacgcgtccgacggctgcgagaagacgacagaagggggcagtttcaaattttcttttccttcactttcccgagaaaaaaataacacttttcactttcttcactacgttctcacttcgatatggctcgtacgaagcaaaccgctcgcaagtccaccggtggcaaggcgccacgtaagcagctcgccaccaaggccgctcggaagtccgctccggcgaccggaggagtgaagaagccccaccgcttcaggccgggaaccgtggcgctgagggaaatcagaaagtaccagaagagcaccgagcttctcatcaggaagcttccatttcagaggctcgtgagagaaatcgcgcaggatttcaagaccgatttgcgtttccagagcagcgctgtttccgcgcttcaggaggctgctgaggcttacctcgttgggttgttcgaggacactaacctctgcgcgattcatgctaagagggttaccattatgcccaaggatatccagcttgcacgcaggatcagaggcgagagggcttagaaacaaggttgagaggtttgggtgttaggtgcttagggttagggttctggtcttgaaggatgtgtttgggagtttggttgtaggaatcctctccatctgtgtgtttatgtggaatgtgaaatgtgaatctctttgcttttgtaattatattgtgttactatgaggagttaatgaaaatgctatggttattgaagaaaaaaaaaaaaaaaaaaaaaaaaaaagcggccgatttaaaggaggaaaaatcaactattctaagagctacatagcagtgtgcgcttgttactaagatgtgaatggtcttgaaggacttgatcccggagaaattaaaactattctaagagtgacaatcaacatagcagtttgcgtgctttttatgtgtaaaattgcacttttttttcctttgcattctctaaaagagaagcattcaatagtttggagtttcttagcaggatgtttctgtttgtcccggtcgtcggtgacattgtaaatctcgcagtttgtcatgagattatgggacttgggtcctttttgaaagaaacgaatgattcaatgaaaccgcttgtggattttattgccctggc

SEQ ID NO: 27478 - DNA, 882 bp, Glycine max
  unsure (1)..(882): unsure at all n locations
  Clone ID: TF_GmC127_2
gtgcggcgctcagggccgggccgggacaccttcgaattttcttttccttcactttcccgagaaaaaaaaaacactctttcactttcttgactacggtctcacttcgacatggctcgtactaagcaaactgctcgcaagtccaccggcggcaaggcgccacgtaagcagttggcgaccaaggccgcccggaagtccgctcccgcgaccggaggagtgaagaagccccaccgcttcaggccgggaaccgtggcgctgagggaaatcagaaagtatcagaagagcaccgagcttctcatcaggaagcttccgtttcagagactcgtgagggaaatcgcgcaggacttcaagaccgatttgcgttttcagagtagcgccgtttctgcgcttcaggaagctgctgaggcctacctcgttgggttgttcgaggacactaacctttgcgcgattcatgcaaagagggttaccattatgcctaaggatattcagcttgctcgcaggatcagaggcgagagggcttaggttggttagggttctgattttgaaggaggcgagacggcttagaaaaagaatcatctatctatgtgcttatgtgggcatgtgaaacgtgaatctgtttgcttttgtaattatctcgtgtttcttagacaagttaattaaaatgctatgttggttctcggagaaaaaaaaaaaaaaaaaaaaaaaagcggccagagttgttgttaagttttaaagaaattggtttcggagaaattttgtttattttaaaaattaagggattgtgagacttttatgtttaactataatgtatttgtgattagagaaataaagattgttgtaaagcctataaatataacagcgttgattnttttntttatgnaaaaa

SEQ ID NO: 27479 - DNA, 870 bp, Glycine max
  Clone ID: TF_GmC1607_1
ccacgcgtccgcccacgcgtccgtacggctgcgagaagacgacagaaggggaggaacaagaagcgaaaatataacaaataatttgtactttcatcaaaacaaaatcccgttgtatttttctcagatggctcgaacgaagcaaacggcccgcaagtccaccggcggcaaggcgccgcggaagcagctggcgactaaggcggctcgcaagtcggctccggcgaccggcggcgtgaagaagccgcacagattcaggccgggaaccgtggcgctgcgcgagatccggaagtatcagaagagcacggagctactcatccggaagcttccgttccagcgcttggtccgcgagatcgcgcaggacttcaagaccgacctccggttccagagctccgccgtctccgcgctccaggaggccgccgaggcttacttggtcggtctcttcgaagacacgaacctctgcgccattcatgccaagcgtgttactatcatgcccaaggacattcagctcgccaggcgcattaggggcgaacgcgcttaaacctaatccctgtccttttgtatagataatttcaagcgttcttagttagattgaattgcggttttctttgagaattctgtaatgttaacgctttaccaatgaaattatcgcttttgttcttcaattgaatttggttctcttcaattttaaagcttgtttatacgatgtagagttctgttgaatgcttgtcaaagctatttgagtgaattcaagatttaacgtctgccctctctgtatgaaagaataagggccaccatgcgggtttaaacatacctcttttcatgaagattgtatatttgaaacgtgaaatttgttgaactatatggtttgatatt

SEQ ID NO: 27480 - DNA, 665 bp, Glycine max
  unsure (1)..(665): unsure at all n locations
  Clone ID: TF_GmC1638_1
ccaaaaagctctgttctgaaaatagagaaaacacaaaaagttctgttctttttcccacccaattcagttttctcaaatggctcgtacgaagcaaacggctcgcaagtccaccggcggcaaggcgccacgtaagcagctggccaccaaggcggctcgtaagtctgctccggctaccggcggcgtgaagaagccgcacagattccgtccgggaaccgtagcgctccgcgagatccggaagtaccagaagagcacggaacttctgatccggaagctcccgttccagcgattggtccgtgagatcgcgcaggacttcaagaccgaccttcgatttcagagctccgccgtctccgccctccaggaagccgccgaggcctacttggttggtctcttcgaagacaccaatctctgcgctattcacgccaagcgtgtcactatcatgcccaaggatattcaactcgctaggcgtattaggggcgagcgcgcttaaatctaattattgattctctgtatagacgatttcaatttcaagcgttcttagttagaacttttgatttggttttcttgttgttgaggattctgtaatgctgctgtgatgttaacgctttattaatgaaattatcactttttgtcttcagaaaaaaaaaaatttatnaaannnccccnna

SEQ ID NO: 27481 - DNA, 1459 bp, Glycine max
  unsure (1)..(1459): unsure at all n locations
  Clone ID: TF_GmC1655_1
cgaagctagcttatgctcatgatgttctgttcttcgatcccagcttacaccgtgctgtactcacggccgcgcaccatttgagttcatatcattcgtcttcttcttcttacaagctcagctcatagcattcttcttcttccaacgagaatcagtctttgtgttccaaatggctcgtacgaagcaaacagcaagaaagtccaccggaggaaaagctccaaggaagcagctgcgccaccaaggcagcacgcaagtccgcgatataacactgtcactcttacaatctcagctcatagcattcttcttcttccaacgagaatcagtctttgtgttccaaatggctcgtacgaagcaaacagcaagaaagtccaccggaggaaaagctccaaggaagcagctcgccaccaaggcagcacgtaagtccgctccggcgacgggcggcgtgaagaagccccaccgtttcaggccggggacagtggctctgagggagattcggaagtaccagaagagcacggagcttctcataaggaagcttcctttccagaggctcgtaagggaaatcgctcaggacttcaagaccgatctacgcttccagagcagtgctgtctccgctcttcaggaagccgctgaggcctacctcgttgggctctttgaggataccaacctctgcgctattcatgctaagagggttaccattatgcccaaggacattcagctagctcgtaggattaggggcgagagagcttagggtttatgatttacaaagccgtagtgttttctaagggttattattttgcaatcgattccttcagcttagtattagggtgaaagtccttgttttattgtgactgtattggaaactcgtttctgtaacgtgagaaatattaatgttgagtcctctcattttaagcttaaacctgcttggatctgtagaattacatcgtgtttggtcgttattctgatttcataacataattaatagatgtttgggatttttctggaactggattgtaagattgtaaaattgttgttgatgcactatcgactaggacaaagggtgaaagtccttgttttattgtgactgtattggaaactcgtttctgtaatgtgagaaatattaatgttgagccctctcattttaagcttaaagctgcttggatctgtagaattacatcgtgtttggtcgttattctaatttcataacataattaatagatgtttgggatttttctggaactggattgtaagattgtaaaattgttgttgatgcactatcgactaggacaaagggagtagatgaatttcgttgtgttgtggaaaattgcaaatctctcctacaataaccattttcaaatttcaggcgggtttagtttggaggcaagtcaaatgagttgtgattttcttgcagggatatttgatntatgctgagtaatcatgtttcacatatttccattgattggta

SEQ ID NO: 27482 - DNA, 1196 bp, Glycine max
  Clone ID: TF_GmC1655_2
cgggtgcggccgcccgaggggggggggggatactttccccctcaccatttgagttcatatcattcgtcttcttcttccaacgtgaagcaatctctgtgttcgaaatggctcgtacgaagcaaaccgcaaggaagtccaccggaggaaaagctccgaggaagcaactcgccacgaaagcagcacgcaagtccgctccggcgaccggcggcgtgaagaagccacaccgtttcaggccgggtacggtggcgctgagggagatccgaaaataccagaagagcaccgagcttctcataaggaagcttcctttccagagactcgtaagggaaatcgctcaggacttcaagaccgatctccgcttccagagcagcgctgtctccgctctgcaggaagccgcggaggcctaccttgttgggctgttcgaggacaccaacctctgcgccattcacgccaagagagttaccattatgcccaaggacattcagcttgctcgtaggattaggggcgagagggcttagggtttgttcgtgtgatgtacaaagctgtagtactttcttagtgttattgttttgtaatcgattatgaaacttctattttcactgtgactggattggaaaatcatttgtagtatggaaagtgtcagtggtgaatcttgagaattacatcgtctttggtctttaatctggtaatataatatcccttctagtaagattaattgggattttgaaagcaattaacagataataatttttttttctttcctaaaatatagtgtgaggctttgattctcaaagcaggtaaaatttgatgattatgctttggaaggatttaatcattgattattaattgagagaatatgaaagttaataacgtacctatatggactgggcttatttttgtgggccgatttatgcaattacttgtagcggagctcattctattggcgggaaagaggttttagcagagaggatagtatattttcccttttgtttttgctattgtgatgcaaaaactaagatgtgaacttaaagctcgagaaaatggaaaaaaatacttgggtttcacataaacaaccaattggagaggttcagccccttcgaaggtaaatttgttcttcgtgtgttcgatttctgtttgttgacataggtcttgagatttgttatgctataaactttcatttggaggttgcattggaagag

SEQ ID NO: 27483 - DNA, 1133 bp, Glycine max
  Clone ID: TF_GmC1680_1
cacgcgtccgcttccgaattcgaagttaatttgcaagatggctaaggaaaaggctcagataacattgtggtggttggtcatgtggaccctgaggaggcaaccaccattaacgagctgaagaagcctgttgtggagaaagaagctccagggcatgccatatgagggcatgcacgtacggcctcggaggggaaccagaaaattatgttaacaaaataatctggaaccctaatgtatcagtgtcatcatcagtgtgtagtttaagctagctttgctatggttacgttctttgagatgagagtcttgatgaacagtaccattctgatgtattgctttccttgaaagttaatgcatgcttcttatcttctgtctaaaaaaaaaaaaaaagggcggccgcacgcgtcctacggctgcgagaagacgacagaaggggattccagcaaagcgcaaagcattctccactacgattcgctcttccagaagcttccagaaaactccagatggcgcgtacaaagcaaacagcccgtaagtcgaccggcggcaaggctccccggaagcagctggcgactaaggccgcccgcaagtctgctccggcgaccggcggagtgaagaagccacacaggttcaggccaggaaccgtggccctgagggagatcaggaagtaccagaagagcacggagcttctgatccgaaagcttccgtttcagcgtttggttcgtgaaatcgctcaggacttcaaaacggatctgaggttccagagcagcgccgtttcggcgctccaggaagccgctgaggcttacttggttggtctctttgaagacactaacctttgtgctattcacgctaagagggttaccattatgcccaaggatattcaactcgccagaagaatcaggggcgagagggcttagttaaataattcactttggtttggggtttaagtgtctttgttttaacgccttgtgtgtgaatctagatcgttgagcagttgctgattagatttcttgtaatgatggtcttatatatgtaatcaagtatttgtctcttaggtaaaaaaaaaaaaacctgttaactgctatggttgtttgcctgttagttgtatcacttgatcaattaaatcaggtgaagtggttcat

SEQ ID NO: 27484 - DNA, 790 bp, Glycine max
  Clone ID: TF_GmC1680_2
cctgcccattattcctttgtctacccacgcgtcagacggttgcaaaaagacaacaaagggggccgggaaaaagcaatctcaacttccaagttaggtcactcttccagatggcgcgtacaaagcaaactgctcgcaagtccaccggcggcaaggctccccggaagcagctggcgacgaaggccgctcggaagtctgctccggcgaccggcggagtgaagaagccgcacaggttcaggcctggaacagtggccctgagggagatcagaaagtaccagaagagcacggagcttctgatccgaaagcttccgtttcagcgtttggttcgtgaaatcgctcaggatttcaaaacggatctgaggtttcagagcagtgctgtttcggcgctccaggaagctgctgaggcttacttggtgggactctttgaagacaccaatctctgtgccattcacgctaagagggttactattatgcctaaggatattcaactcgccagaagaattagaggggaaagggcttaattttgtgatcccttttggttttagggtttacatgtttttatttagccctttctggtttccgtctctgaatctttcaaggtttagatttattgtaatgatgccattctgattgaagtattgaaattatgcgtattctcttcaagtgaatgtaaacgatttgtatggtctttgtggttgacttgttgactgttggctcagttgattatgcaaattgggtggtgttgtccaaaaaaaaaaaaaaaaaaaagaaagaaagccgccgctctagagga

SEQ ID NO: 27485 - DNA, 1163 bp, Glycine max
  Clone ID: TF_GmC578_1
acaagaacagaacaggtccgagcacagcagcgtcaatacggctgcgagaagacgacagaaagggggacagcaaaacaattttcaaactcaattaccattccataacctaaatctcctctttgtttccgagtcagagagcaatggcacgtaccaagcaaaccgctcgcaagtccaccggggggatagcaaaatcgtttctccaatttaatcaccattgtacaacccaattcccttcgtcgttttcgattaagagagcaatggcacgtaccaagcaaaccgctcgcaagtccaccggaggaaaggctccgaggaagcaattggcaaccaaagccgctcgcaagtcagccccggcgaccggcggagtgaagaagccccaccgcttcaggccaggaacggtggctctgagggagattcgaaagtaccagaagagcaccgaacttctgatccgaaaactcccattccagaggctcgtcagagaaatcgctcaggatttcaaaaccgatctccgctttcagagcagcgccgtttcggctcttcaggaagccgcggaggcttatctcgttggactctttgaggacactaacctctgcgctattcacgctaagcgagttaccattatgcccaaggacattcaactcgctcgcagaatcagaggcgagagagcttaagtttagggtttcgtgtcatttgacattaaaattaggttactgcttattgtaattcgtgttttcttcaaatgcctctttattgtaagattcatcttatttcatcaggtatattcccatatggatctgcacaactgagtttatgttgaaaaacgagataattctctaattttatatatccttcggtgatgatagaaaaacaacacctcctctgcactctgcatacagtgcagaattttctgtgcactgctatcacttgactctctggaacacttgggtgtaacttcattggaagtttggcgcaatccctgagtataagttgagagaagaactcaattggttccggatttctgtcatattcgatttaatctgtctagtccatattcatgtacgttcatggtttgtatatgcaaaaattacccaggtgcacaagtaccaataatgagatatatagcccaggtagatgaccttttgtggatagtaaaaaaaaaaagaaaa

SEQ ID NO: 27486 - DNA, 724 bp, Glycine max
  Clone ID: TF_GmC578_2
cccacgcgtccgcccacgcgtccgcccacgcgtccgtacggctgcgagaagacgacagaagggggacagcaaaacaattttcaaactcaattaccattccataacctaaatctcctctttgtttccgagtcagagagcaatggcacgtaccaagcaaaccgctcgcaagtccaccggcggaaaggcgccgaggaagcaattggcgactaaagccgctcgcaagtcagctccggccaccggcggagtgaagaagccccaccgcttcaggcccggaacggtggctctgagggagatcagaaagtaccagaagagcactgaacttctgatccgaaaactcccattccagaggctcgtcagagaaatcgctcaggatttcaaaacagatcttcgtttccagagcagcgctgtttctgcgcttcaggaagccgcagaggcttatctcgttggactcttcgaggacaccaacctctgcgctattcacgccaagagagtcaccattatgcccaaggatattcaacttgctcgcagaatcagaggcgagagagcttaaaattaggtttcattgtgtgatctagaattaaaattaggttactgcttattgtaattcgtatttttcaatcgcctttttgttgtaatattcatcttatttcgaagtatatgctcatatggatctgaacattttaacttatgtcagaaaaaaagataattctctaattcttatggg

SEQ ID NO: 27487 - DNA, 811 bp, Glycine max
  unsure (1)..(811): unsure at all n locations
  Clone ID: TF_GmC913_1
cgcgtacctcacgcgtccgcccacgcgtccgtacggttgcagaagactacagaaggggacaaccactcaaatctcaatacctcaattcttcgctttaacgaaaaaggacacattttcccttacaatggcacgaaccaaacaaactgcgcgcaagtccaccggaggcaaggcacctcggaagcagctcgccacaaaagccgccagaaagtcagctccggcgaccggcggagtgaagaagccgcatcggttccgccctggcacggtggcgctgagggagatccggaagtaccagaagagcacggagctcctgatccggaagctccccttccagcgcctggtgcgcgagatcgcgcaggatttcaagaccgatttacggtttcagagtagcgctgtttccgcgcttcaggaagcggcggaggcttacttggtagggttgtttgaggacactaatctctgtgccattcacgccaagcgcgtcaccatcatgccgaaggatattcagcttgcgcggagaattagaggcgagagggcttgaggattttttaatgatttgtcactgctaggatacgttaaaactggatctggtttatgtagtttgtggttttggtgtatttattcgaccgtaagggttgtggttgttagtatgaagatgtagagttaacattatctggctaattagttggttaatgtttactttgaatttgctgtttgtgtgaatgaattaaaagggttgattgcaatggattttggttatttttaaccctttttacattttggcttgcataatcatgaattcccatttgagttttna

SEQ ID NO: 27488 - DNA, 999 bp, Glycine max
  unsure (1)..(999): unsure at all n locations
  Clone ID: TF_GmC1626_1
acccggtcccggnactttccccggaaccatcttcgtttttcagcatttctactctccaaacactcgaattcgcattctcttcactctttccccaatccatggccaagggagagaagaaaccggcggagaagaagcccgcggagaaggctccggcggagaaaacaaaagccgagaagaagatcccaaaggaacccgcctcgggcgagaagaagaagaagaagagaaacaagaagagcgtggagacgtacaagatctacatattcaaggtgctgaagcaagtgcaccctgacatcgggatctccagcaaagccatggggatcatgaacagcttcatcaacgacatcttcgagaagctcgctcaggaatcttccaggctcgcgcgctacaacaagaagcctaccatcacctctcgcgaaatccagactgcggttcgtcttgttctccctggcgagctcgccaagcacgctgtctccgaaggcaccaaggctgtaacaaagttcactagctcttgaacgggtttctgagaattttagggtttacgagatgtatattttgggagaattttaattttatatttatcctcttttattaccgtttttcttctttcaacaggtctatgttgatcctcttattcttttctcctcttaaccatgcgccggattctcaacgtcttaaatggtttaaatgagtgtgcaatttgaaattttgttgagttgtggcagttaacgttctgctgcatcatggtgatgactacaattcaattcatcgaaaaatgttgttgtcatagcttattgagtagagtggatggtgttttgtagattttgtggtaacctatattggaacctgattttgttttgttcttttaaatggattgtatctatgtatacatgcttatgttcttgtgcaattgtattatagaattgcaggggttgcattgtattattgcaggttggttatgtgatagagctggtagcacgatggagtgctgtatgttgtatg

SEQ ID NO: 27489 - DNA, 627 bp, Glycine max
  unsure (1)..(627): unsure at all n locations
  Clone ID: TF_GmC1626_2
taccggtccgnattcccgggtcgacccacgaacccgcttcgtttttcagcatttctactctccaaacactcgaattcgcattctcttcactctttccccaatccatggccaagggagagaagaaaccggcggagaagaagcccgcggagaaggctccggcggagaaaacaaaagccgagaagaagatcccaaaggaacccgcctcgggcgagaagaagaagaagaagagaaacaagaagagcgtggagacgtacaagatctacatattcaaggtgctgaagcaagtgcaccctgacatcgggatctccagcaaagccatggggatcatgaacagcttcatcaacgacatcttcgagaagctcgctcaggaatcttccaggctcgcgcgctacaacaagaagcctaccatcacctctcgcgagatccagaccgccgttcgtcttgttctccccggcgagctcgccaagcacgctgtctccgaaggcaccaaggctgtcacaaagttcactagctcatgagtgggtttctgagaatttagggtttattagatgtatattttcaatcttcgcggtgtaacggaacggcatattttgggagcaattgaattttatatttattttctttaaa

SEQ ID NO: 27490 - DNA, 400 bp, Glycine max
  Clone ID: TF_LIB3028-002-Q1-B1-F11
cgcaattcaaaactctcactccgttataagcaccaaatcctgatggcaccagcggcagagaagaagccagcggagaagaagcccgcagaggagaagaagtccacggtgggagacaaggctccggcggagaacaagccataggccggaaagaagcttccgaaggagggaggcgccggcggctaaaggaagaagaagaagagaaacatgaagagcgtggagacatacaagatctacatcttcaaggttctgaagcaggttcaccctgacattggtatctcaagcaatgccatgggaatcatgaacagcttcatcaacgatatcttctataagcttgcccaggaatcttctatacttgcccgctacaacaagaatcgcaacatcacttcaagggaaattcaga

SEQ ID NO: 27491 - DNA, 370 bp, Glycine max
  Clone ID: TF_LIB3054-001-Q1-B1-C7
cagaagagcactgagctcctaatcaggaagcttcctttccataggttggttcgtgaaattgcccagtatttcaagactgatctgcgtttccagagccatgctgtgcttgcattgcaagaggctgctgaggcataccgtgttgggctctttgaggacactaacttgtgtgccaatcacgccaagcgtgtgactattatgcccaaggatattcagctggcaagaaagattcgtggtgagcgtgcttgagttggtgcgttctgtgtttgtgaagatggattgttggtggctgcggatggtgttttgttactaagttatctttatgttgaagcctatatgttattacggaaaaatacgtgtttacttggtagtc

SEQ ID NO: 27492 - DNA, 648 bp, Glycine max
  Clone ID: TF_LIB5068-035-A1-XP1-G6
ttcgggatcccatttcatagacactcaccctcattaccttcgcttaaagcatatgcattaccttttttcgattgctctgattttcctaatggctccggcaaaggttgagaatacgccggcggtagaacaatcctgtggcggagaaggcaccggcggcccacgaagcgccaaggcgcgatacaaaagatctctgaatgaccgcagggatcgagaaaaacaatatccgcactatcaataccgtggacacctacgagatctacatcttcccggttctcccgaaagttcaccccgacattggtatttccatgaacgtcatgttcatcatgaacagcttcatcaacgacgtcttcaacaagctcgcccagcatgcgtcacgtctgcctctctacaactggaagcccaccatcacctccagggacattcagacctccgtgcgtctcgtgctccctgatgaattgtgcaaactcgccgcttctgaatgtaccaaggagtctaccaagattaccagctcttgaattaaggtttgttacgcgtatgtgttgcacgatctagggccttctgtggatttcttttcttacaaattaggttgtagatgtagtgctctgaacagatgttaatgcactgtttcgtttgaaaaactccaacgac

SEQ ID NO: 27493 - DNA, 372 bp, Glycine max
  Clone ID: TF_LIB3170-020-Q1-K1-H3
gaagtttattggcgactatattcattttggcatgggggatgaatctggtcggagagagaaaaaccataaccatttctggaataggaaaggggggcaggggtctaggaaagggaggagcgaaacgacacccgaagggtctgagggataacattcaacgcataacgaagaccgcaattcgccgtctcgcgagacgtgggaccgtgaagcgtatcaatggtctcatgtacgaagaaacccgaagcgttctgaagatcttacttcagaacgtaatacgcgacgctggaacctacactgagcacgctcgacgcaagaccgaaaatgccatggacgatggttactccctccagacgcaagacaagaccctctaccgtt

SEQ ID NO: 27494 - DNA, 409 bp, Glycine max
  unsure (1)..(409): unsure at all n locations
  Clone ID: TF_jC-gmX3040037G03sg8F24b1
ttcccttttcttcccacgcgtccgactgcttcagaacanacagaaggggatcccgtgggattttaaacaaaagggggggaacaaaaaaaccaacaaagcggccgcccaaagaagaagccggtttcaaggtccgtcaaagccggtctccaattccccgtcggaagaattggccgttttttgaagaaaggaaggttctctcagcgtgtcggtaccggtgctcccgtatacttgggtgcagttctcgaatccctatctgccaaggtcctttagctggctgggaatgcctcacttgacaacaagaagaacaggatttttccaagacccctgctttttgcccttaggaactaataaaagttggggaaattgttagctggagtgccaattgcccaatggtggcttgcttcaaaca

SEQ ID NO: 27495 - DNA, 403 bp, Glycine max
  Clone ID: TF_6667484
tcgtacgaagcaaaccgctcgtaagtgcacaggaggaaaggctcctaggaagcagcttgcaaccaaggctgcacgtaagtctgcgccaactactggtggtgtgaagaagccccaccgttatcggcctgagaccgaagctcttcgtgaaaggaggaggtaccagaggactaccgagcttttgatccggaagctccccttccagaggctggttcgggaaattgctcacgacttcaagactgatctacgatgccagagccgcgccgtgcttgcattgcaagaagctgctgaggcataccttgtggggctctgtgacgacactaacctgtgtgccgtgaacgccaagcgggtgaccattatgcccaaggatagcgagctggcaagagagattccgggtgagcgtgct

SEQ ID NO: 27496 - DNA, 612 bp, Glycine max
  Clone ID: TF_GmC128_3
gatatcaccctttttgtttctctctttgtcattgaaaccttttcacccccttcatatatccttaattcagcaatggcgagccacgacaaagcccaaggatctagcacaaccaaaaagggcatctcgcgaagcaacaaagctggtctccaattccctgttggtcgtgttgctcgataccttaagactggcaagtatgctgagcgtatcagttctgctgctcccgtgtatctcgcctctgttcttgaatatcttgctgctgaggttttagagttggccggaaatgctgtaatggacaacaagaagactcgaattatgcctcgccatatccaattggcagttaggaatgatgaagagttaaacaagcttctcggagatgtgaccatcgctaatggtggtgtgatgcctaacattcacagcatgttgcttcctaagaaggttgggacctcgacctcaacctttatgggtgctagtgtcaatgacaatgatgcttaaatgttttttttttttgccttaagtttgacccatgttccccttttgtaatatgggttctttatgattgaataattcataatgtcaagattggcataatatgataacaaattgggttgatgc

SEQ ID NO: 27497 - DNA, 324 bp, Glycine max
  Clone ID: TF_LIB3242-505-P1-J1-D11
ttggaattggctggaaacgctgccagagtctacaagaagactcgaattgtgccgcgggacattcaattggcggtggggaacgactaggagttgagcatgctactcggtgacgtcaccatcgctaacggtggcgtcatgcctaacattcacaatcttctccttcccaagaaggctggtggatcatccaaggctgctgctgcagacgatgactcttaaataggggttttttttccgagaaaagtgatcgaatttattctctttggattctctctgaatttgtagtttttcagggttcgataattgtgtactggacatgtagatagg

SEQ ID NO: 27498 - DNA, 1615 bp, Glycine max
  unsure (1)..(1615): unsure at all n locations
  Clone ID: TF_GmC411_7
gccacctgaatgctttgtaaaggatgtgacaaaatgtgccaaagcctccacactacagctagctgtgttctatggtgcactttacactctagcagggggaactggaggaaccaagcccaacatctccaccaattgaagaaggatagcttgtgtaacttctctttagggtgaaaatcatcaaattgatcagctcctatggtggcgttcctatcatcacttctcaaatctcgaaccctctcgttcgtgccgatcactaggtcacacttcgaaaatggcgggtagaggcaaaaccctcggtgccagcgacagcgcggtcgtatagcagcgccgtttacctcgccgctgtctcgaatatctcgcagccgaggttttggagttggctggaaacgctgcgagagacaataagaagactcgaattgtgccgcgccacattcaattggcggtgaggaacgccgaagaattgagcaagcttcttggtgacgtcgccatcgctaacggtggcgttatgcccaacattcacaatcttctccttcccaagaaggccggtggctcatccaagggcgctgctgctgacgatcactcttaaatagggattcgcttttctagattcgtctagttatccagtatagattatcttttggcctctctggttgggagtttcttttttagttttgataattatgctctgtagaggtagttaggttttcattactgatgtgagcagaggaatgcatcactttcagcaccaatagatgtgatgacactgggacgaggaacacgtttgtggtgnctgtctcncttgcagtcctccaggctggtggaagtacactacttccctcaaagccattcccatcgttactanagtcatcaattgcagaaaaaagtttatccgatgaaccatccttaagggattcaatttggattgggtgccctattattgacttcccatctaacttactagtgatagaaacaatggggacaggtgctttccgatagcttgcttgaaccttcaagtccacatctaccagcattgacctcatccttccatcaaaatgataactatcactatataatcgagcaaaccctttattttcccaatatcctttaaaagcagtctgatcctcccaagcccattcatcccaatcaacaccatgaccaattttattttgaccttttgctagtgctttggaagttggagaatattcatcttcaaacccaaacatttgatcggtgtcagcaaaaacatcactaataccattcccataataatgcatactaggcaccaacctcttgtgatttaaacggcttcttaatccttcaacatctgcttcatataaaacaacacctttcccatcagcagcaccaacagacctttttacaagattacgattattcctttttccttttaacttccatttggatacagcttcattgcatgatatatgcggacgaggatagaggtgaggcatgtctctagaaattgccaactcatcaagttcctcactgctagtgctttcttgttcttcagtatcgcaaccagtttctgaaagagtagtcatctcatcatccttgtcaagttccatttcaaaggaatcagaatcagcattagcagaac

SEQ ID NO: 27499 - DNA, 586 bp, Glycine max
  unsure (1)..(586): unsure at all n locations
  Clone ID: TF_LIB4164-023-Q1-K1-A7
gcgtccganggatctgcgtttcggagcagaccagatggctcgacgaagcaaccgctcgaagtcccaggaggaaaggctcctaggaagcagcttgcaccaaggctgcacgtaagtctgcaccaactactggtggtgtgaagaagccccaccgttatcgtcctggtaccgttgctcttcgtgagattaggaaataccagaagagtaccgagcttttgatccggaagctccccttccagaggctggttcgtgaaattgctcaggacttcaagactgatctgcgtttccagagccacgccgtgcttgcattgcaagaagctgctgaggcataccttgttgggctctttgaggacactaacctgtgtgccattcacgccaagcgtgtaaccattatgcccaaggatattcagctggcaagaaggattcgtggtgagcgtgcttgagttggtggttggaaagatgaagatgattggtggctgcggttggtgtttttgtttttcagattcctttttttattcaatagatggggttgttagggagggtaggttttttgcttgtatgtccatttattgggatataggcaaatact

SEQ ID NO: 27500 - DNA, 369 bp, Glycine max
  Clone ID: TF_LIB3040-029-Q1-E1-D5
gacatctttcactcgttctctgaaattttaattgacttttctcccctcataaaaaaaacctaccaatggctcccgcaaaggcagagaagaagcccgcggagaagaagccggcagagaaggccccagcggagaagaagccgaaggcggagaagaaaagatatcgagggagggaggaagcgagaagaagaagaagagaataaagaacagcgttgagacgtaggatatctacatcatcagggtgtagaagcatgtggaccacgacatggggatctcgagcaaggctatgggggatatgaggagtttcataaacgacatcttcgagaagctcgcccaggaatcatcgcgtcccgctaggtacaacaagaagcc

SEQ ID NO: 27501 - DNA, 407 bp, Glycine max
  Clone ID: TF_jC-gmfl02220091h12a1
ggctcgaggattcagcaagtgcgttttggaagcattagaccgaaatacttcgagatggcccgtacaaagcaaactgttcgtaagtcaactggaggaaaagctcccaagaagcatcttgcaaccaaggctgcacgtcagactgtaccaacaactggtggtgtgaagaagcctaattcctatcgccctggaactgttgctcttcgtgagattaggaaataccagaagagcactgcgcttctttttaagaagcttactttccatgaggttggaaacgtgaaattgcccaggattaaaggactgaactgcgtcaacagagccatgctgtgcttgcattgcaagaggctgttgaggcttacctcgtcgggctttttgaggacactaacttgggtgccattaacgacaagcgt

SEQ ID NO: 27502 - DNA, 325 bp, Glycine max
  Clone ID: TF_10842835
gtcagggaaaggcgcaaagggtttgataactgctaaggacaaatataagaaaaaaccaatttctcgctcctcaacatccagtcttcactttcctgttgaacacattcatcatcttctaaagtcaaaggtgacagcacataaaagagttaaagcaacaactacattttattctactaccatcctaaattatttaactacataagtgttaaagttaactaacaatgcaagcaaagatctaaaagtaaatcatattaccccaatacatctacagcttaccatccataaatataaataacttaataccctcatcaaaagaacaatatct

SEQ ID NO: 27503 - DNA, 281 bp, Glycine max
  Clone ID: TF_LIB4202-005-Q1-K1-B9
aggaattcccgggtcgaccacgcgtccgctaggtgacactttatcaatggcgggtggaggcataaccctaggatccaacgccgctaagaaggccacgtgaaggagcagaaaagccggactacaattccccgtctaacgtatcggcagggtgctgaagggcggaaagaacaccaagcgcgttgacaccgaagcccacaagtacctggacgacgtagtcggatatgtggctagtgaggtttaagaattgggtggaaacgctgggagagatgacatgaagactg

SEQ ID NO: 27504 - DNA, 927 bp, Glycine max
  Clone ID: TF_GmC1660_5
tatagaaaaccctcgtattacacgcccatataaaaaacaaatcaactgttccatcttttccacatcgcatatcaattattcttcggcatcttcgaaaatcaattttctgtcttctctgcgtcttcttcctctatcaatcgttttccatggctcgtaccaagcaaaccgctcgcaaatccaccggtggaaaggctcctaggaagcaactcgccaccaaggtactattttttttattatttagggtttcgttttttttttctagttagggtttctcgatttcaattaccttttattcctaatttcccgaaggtttattgacaattgattcttcaattacgtaattatgtgattttggatattaataattgaataaacgcgtgatttctgtgtaggctgcaaggaaatctgcaccgacaaccggtggagtcaagaagcctcatcgctatcgccctggaactgttgctcttcgtgagatccgaaaataccaaaagagcacagagcttctgatccgcaagctcccctttcagcgtcttgttcgtgaaatcgcgcaagacttcaagcaaatcactgacattttttgttgatatcgttgccaatgtgaccgatatgattccagactgatttgaggttccagagtcacgcggttcttgcgcttcaggaagctgcggaggcttacttggtgggtttgtttgaagacaccaacctttgtgcgatccacgccaagagagtgaccatcatgcccaaggacattcaactcgcacgccgcatccgtggagaacgtgcttaggcttataataatgataatagcatagttgtcgccttttcgttttgcaatacatttcttgtttcttagggttttagtgttattttccagtttgttatgttttgtatagaagatagatatatcaacagcaacagcttcttacc

SEQ ID NO: 27505 - DNA, 240 bp, Glycine max
  Clone ID: TF_LIB3108-050-Q1-K1-B1
ctttctcattccccatctcctcaccttattcagtcactgatcatttctagggttccgcaatggacgctggctgtaagatcacgaagggcgccgcaggaagaaagggcggcggccctaagaagaagccgctttcaaggtccgtcaaggccggtctccacattcccgtcggaagaattggccgatatttgaagaaaggaaggtactctcagcgtgtctgtaccggcgctcccgtttacttgg

SEQ ID NO: 27506 - DNA, 258 bp, Glycine max
  unsure (1)..(258): unsure at all n locations
  Clone ID: TF_700980281H1
ctcaggacttcaagactgatctgcgtttccagagccacgccgtgcttgcattgcaagaagctgctgaggcatacctngttgggctctttgaggacactaacctgtgtgccattcacgcaagccgtgtaaccattatgccaaggtattcagctggcaagaaggttcgtggtgacgtgttgagttngtgtggaagatgagatgattggtgntgggttggtgttttnntttcagattcttttttattccaataatgggtgt

SEQ ID NO: 27507 - DNA, 619 bp, Glycine max
  unsure (1)..(619): unsure at all n locations
  Clone ID: TF_GmC127_3
ccccccgcttcaggccgggaaccgtggcgctgagggaaatcagaaagtatcagaagagcnccgagcttctcatcaggaagcttccgtttcagagactcgtgagggaaatcgcgcaggacttcaagaccgatttgcgttttcagagtagcgccgtttctgcgcttcaggaagctgctgaggcctacctcgttgggttgttcgaggacactaacctttgcgcgattcatgcaaagagggttaccattatgcctaaggatattcagcttgctcgcaggatcagaggcgagagggcttaggttggttagggttctgattttgaaggaggcgagacggcttagaaaaagaatcatctatctatgtgcttatgtgggcatgtgaaacgtgaatctgtttgcttttgtaattatctcgtgtttcttagacaagttaattaaaatgctatgttggttctcggagaaaattgttgttgagtcttaaagaacttgatctcggagaaattaaatctatcctaaaactcaagagattgtgtgccttttatgtttaacaatacagtatttgagaagagagtatttatgcttcttttaaagcctactaaataaatgtgagataattttattgg

SEQ ID NO: 27508 - DNA, 696 bp, Glycine max
  Clone ID: TF_GmC1230_4
gcaaattccaattcccaattcccaattcgaaacccttattcctttcaaagaaccaaattgagtgatcgtgatggcaccaaagcagagaagaagccagcggagaagaagcccgcggaggagaagaagtcgacggtgggagacaaggctccggcggagaagaagccaaggccggaaagaagcttccgaaggagggaggcgccggcggagaagggaagaagaagaagagaaacaagaagagcgtggagacatacaagatctacatcttcaaggttctgaagcaggtccaccctgacattggtatctcaagcaaggccatgggaatcatgaacagcttcatcaacgacatcttcgagaagcttgcccaggaatcttctagacttgcccgttacaacaagaagcccaccatcacttcaagggaaattcagaccgcggtcaggcttgtgctgcccggtgaattggccaagcacgccgtctctgagggtaccaaggctgtcaccaagttcactagctcttgaactgactattatgccccttcgcttcgatctaggtgtctctgttaggaatatgttttatgttgaagcgttggtttattttttctttttggtgaaaaaaaaatgtaagtgaagaatatgggatttgttgatccttctttgtatggaattagttgctaatacagagacgtatattattcctatc

SEQ ID NO: 27509 - DNA, 792 bp, Glycine max
  Clone ID: TF_GmC110_2
tacggctgcgagaagacgacagaaggggacaccgcaaactctctctgtaaagtgcaaagcctctattttttcttgtgaatttgaaggacgatgagttccacagaggtcgcagccacaacgaagaagggtggaagagggaaacccaagaccacaaagtccgtttcccgttcctccaaagccggccttcagttccccgtcggccgcgtcgctcgctacctcaaggccggtcgctatgcccagcgcgttggttccggttcccctgtttacctatctgcggttctcgaataccttgccgctgaggttttggagcttgccggcaacgctgcgagggacaacaagaagacgaggatcgttcctaggcacattcaacttgcggtgaggaacgatgaggagttgagcaagctgatggggtctgtgaccattgccaatggtggtgttctgcctaacattcaccagaatttgttgcccaagaaggccgctggcaagggaaagcccgagattggatctgccagtcaggagttttagattcttagggtttcatcttgttagtatttagagtgcaaaattgaaagaaaatggaactagttttggtatgtagttggccgcgtagtacagtgagactaggattgacattgaatgatgtatagtcattttatatgtgagaataactagttgttttggtttatgatttggtttcctgcatagttttcgttctatttgaattttgcttgtatttagcgcctttttctattattattttggtcaaattagtcttgattttagtgttaaaaa

SEQ ID NO: 27510 - DNA, 1026 bp, Glycine max
  Clone ID: TF_GmC732_1
ccacgcgtccggcgcgcgtccggctgcgagaagacgacagaagggatcgcatttcatagcactcaccctcattaccaacacgaaagcatagccaaaaccttttttcgaagtctctgattttcctaatggctccggcaaaggcagagaagaagccggcggagaagaagccagcggcggagaaggcaccggcggagaagaagccgaaggcggagaagaagatctcgaaggaaggagggagcgagaagaagaagaagcgcacgaagaagagcgtggagacctacaagatctacatcttcaaggtcctcaagcaggttcaccccgacattggtatttccagcaaggccatgggcatcatgaacagcttcatcaacgacatcttcgagaagctcgcccaggaagcgtcgcgtttggctcgctacaacaagaagcccaccatcacctcgagggagatccagaccgccgtgcgtctcgtgctccctggtgaattggccaaacacgccgtttctgaagggaccaaggcggttaccaagtttaccagctcttgaattagggtttgttaggcggttgtgttgcagatctagggttttctgtggatttcttttcttaaaaattagtttgtagatgtaatgatctgaacagttgttaatggaaggtttcgtttgaataattataattgcatgactgtggattactttttcgtcctttttgtttatggtttgggcggtgattagggttagggttgttggattgactcttaagatgtataatagataagaggagtgtggggttgtgtcaatttgatcatatcgttccctaatttccgctctgtttgccgcaatttgaagaacaacagttcacactattctttgttttttggctattgttttctgattttcgaaatgaacgccgttttgaaggatgtggttttcgttgtttcggaagatcggtgagggcttgaatgtattttggctgcttaatggacgtgctgcaataattatcgcagcctatttttagaaattgattctc

SEQ ID NO: 27511 - DNA, 725 bp, Glycine max
  Clone ID: TF_GmC45_2
ccgtacgcccgcgagaagacgacagaagggggatcgctctcacgcttctgattattcctcttcccattctagggttccgaaatggacgctggcggaaagatcaagaagggcgccggaggaagaaagggcggcggccctaagaagaagccggtttcaaggtccgtcaaggccggtctccaattccccgtcggaagaattggccgttatttgaagaaaggaaggtacgcccagcgtgtcggtaccggtgctcccgtttacttggccgcagttctcgagtacctagctgctgaggtgcttgagttggctgggaatgctgcacgtgacaacaagaagaacaggattattccgagacatgtgcttttggctgtgaggaacgatgaggagttggggaaattgcttgctggtgtcaccattgctcatggtggtgttcttccaaacattaaccctgttttgctacctaagaagactgagagggctcaaggaacctaaatctccatccaaggctaccaaatctcctaagaaagcttagatgtttttattttattttaatgaatatgtatatcagtgtttagatgctttttatgtaaaagaaaatattatctgttgcaaacactgtaattcttatcgtcttgcatgtaggagtttgctaaattaatgaaaatttcttattattttgggtcaaaaaaaaaaaaaaaaaaaaaaaacaaagcggccgctctagagaa

SEQ ID NO: 27512 - DNA, 390 bp, Glycine max
  Clone ID: TF_LIB3053-009-Q1-N1-B6
cttacagctcatgtgtttcttgtaaagaactgctttcaccgtagatgggttcaacatcatgaccttgactctatctattcgtacagcttctatctgttcttggcgattaacgatttcacttaatggatcgataggattgatcacacgcaaaacctccgccgccatcaaagacagggactagaagaaacccatttcatgtacacatagtgccgtccttcaattcacagcaggatgaattcaccgccttatgaagtcaatgacagccgctcatgatagattttgggccacatctgctgtctactatgctgctatcttggagtatctcactgctgaagtattgcatctggcccggaatgctagcaaggatctcatcgtaaaacgtattactac

SEQ ID NO: 27513 - DNA, 370 bp, Glycine max
  Clone ID: TF_LIB3039-015-Q1-E1-B9
agggaacgttcaagagttagtcgtgagcaatcaggcagtgtatcgtgaggagaatatcaagttgttcgtacgcatcattcctcgcgtagttccaggtagcagagacgctcctatgaacagctgcaacagtgctccactgagtcagcaccagctacggtgagcgtgaagcagccgcatcgttagcatcctgcaagcgttacgcttcgtgagattaggccctaccatacaagtaccgaacttatgatccggaagctccccttccagacgctggttcctgatattactcaggatttcaagactgatctgcatttccagatccacaccgtgcttgcattgcacgaacctgctgacgcataacttgtttggctcc

SEQ ID NO: 27514 - DNA, 386 bp, Glycine max
  Clone ID: TF_LIB3051-079-Q1-K1-C3
cggacgcgtgggcggacgcgtgggcggacgcgtgggcggacgcgtgggcaccttcgaaaatcaattttctgtcttctctgcgtcttcttcctctatcaatcgttttccatggctcgtaccaagcaaaccgctcgcaaatccaccggtggaaaggctcctaggaagcaactcgccaccaaggctgcaaggaaatctgcaccgacaaccggtggagtcaagaagcctcatcgctatcgccctggaactgttgctcttcgtgagatccgaaaataccaaaagagcacagagcttctgatccgcaagctccccttccagcgtcttgttcgtgaaattgcgcaagacttcaagaccgatttgaagttccagagtcacgctgttcttgcgct

SEQ ID NO: 27515 - DNA, 276 bp, Glycine max
  Clone ID: TF_uC-gmroLIB3259128g02a1
gatccacgcgttcgattcatttatgatacaccttgtgcgtcgcgcaagcaggtacctatatacttatagaagggccacacaaagctgactgatattttgtcaacagggaggtatacctcccaggaagcagcttagaacctaggctccacgtaagtatgtaccagccactggtggaacaaccaaacctaaacgttatcttcctggaactgtagctctgagagtgattaggacataccagaataccactgatcttctaatcaagaagcttactttaca

SEQ ID NO: 27516 - DNA, 750 bp, Glycine max
  Clone ID: TF_GmC137292_1
cctagattcagccacagtttcggaggagaagaaaatagtcgttcgaggttagtttttcttctgagatttgggattttagggtttatatctttgtctttttggtttctgttgatttccaaatcgcgtatcttagataagacagttgaatttttattcttctctagtcacaacgttctgattcttacgcctccgagtcaatattttcggttagtaatttctagggtttcagatgttttgttttggagaattagtcgataatttcatccggccaacgtatgtgtctttaatttcttaattaaacaaagattatggataaatataagttttgaagattaggttatgcgatagaagggggtaagaaaggttctattgttgtttgtttgaaattgatgtttctgaaattactttttgggcgtcgacacagatggcccgtacgaagcaaactgctcgtaagtccacaggaggaaaggctcctaggaagcagcttgcaaccaaggtctcttctataatcacaacaacaattaattaatcattgttcatattgatttgctttgattttatctgagagcttaattcctttgttttacttttaggctgcacgtaagtctgcaccaactactggtggtgtgaagaagccacatcgttaccgtcctggtaccgttgctcttcgtgagattaggaaataccagaagagtaccgagcttttgatcaggaagctccccttccagaggctggttcgtgaaattgctc

SEQ ID NO: 27517 - DNA, 592 bp, Glycine max
  Clone ID: TF_GmC1607_2
tacggctgcgagaagacgacagaaggggaggaacaagaagcgaaaatataacaaataatttgtactttcatcaaaacaaaatcccgttgtatttttctcagatggctcgaacgaagcagctggcgactaaggcggctcgcaagtcggctccggcgaccggcggcgtgaagaagccgcacagattcaggccgggaaccgtggcgctgcgcgggatccggaagtatcagaagagcacggagctactcatccggaagcttccgttccagcgcttggtccgcgagatcgcgcaggacttcaagaccgacctccggttccagagctccgccgtctccgcgctccaggaggccgccgaggcttacttggtcggtctcttcgaagacacgaacctctgcgccattcatgccaagcgtgttactatcatgcccaaggacattcagctcgccaggcgcattaggggcgaacgcgcttaaacctaatccctgtccttttgtatagataatttcaagcgttcttagttagattgaattgcggttttctttgagaattctgtaatgttaacgctttaccaatgaaattatcgcttttgttctcc

SEQ ID NO: 27518 - DNA, 448 bp, Glycine max
  Clone ID: TF_LIB4366-015-R1-K1-C10
cgaataccttgccgctgacgttttggagcttgtgcccaacactgttaggaacaacacgaagacgaggattgttgctatgcacattatacttgtggcgaggaaccatgtggagttgagcgccctgatggggtctgcgaccattgccattggtggcgctcttgctaacatttaccacaatttgatgcccaagaaggttgctgtccaggggaagccccatactggatctgccagtcaggaaatctaaattcttagggattcatctttgttgggattataggggaccaatggaagaaaatggctctaaggtctgcggagcagataggccgcacctttaagcttgctaatgccctgtactacattgaggagttgcttctcctctcaacaaaataaacatgctgcctatgctatctatattgtaataaagatgccgttcaaattaggggcacct

SEQ ID NO: 27519 - DNA, 358 bp, Glycine max
  unsure (1)..(358): unsure at all n locations
  Clone ID: TF_LIB4367-014-R1-K1-H4
cggggagaagggaagaagaagaagagaaacaagaagagcgtggagacatacaagatctacatgttcaagggtctgaagcaggtccaccctgacattggtatctcaagcgaggccatgggaatcatgaacagcttcatcaacgacatcttcgagaagcttgcccaggaatcttctagacttgcccgttacaacaagaagcccaccatcacttcaagggaaagggggaccgcggncaggcttgngctgcccgggcgngggggcggggggggcggcggggggggggggggggggggggggcggnnggccggggggggtggggggggggggggggggggggggggggggggggggggggggg

SEQ ID NO: 27520 - DNA, 370 bp, Glycine max
  unsure (1)..(370): unsure at all n locations
  Clone ID: TF_7589938
tccggcggagaagaagccgaaggccaaaaagaagcttccgaaggaaggaagagccggcggagaaagggggaagaagaaaaagaagaacaagaagagcgtggagacgtacaaaatatacatatgcaaagtactaaagcaagtccaccctaacattaatatctcaagcaaagccatgggaatcataaacagcttcatcaacaacatcttcgaaaancttactcaagaatcttgcagacttgcccactacaacaagaancccaccatcacttcaaaggaaatccaaaccacgatcaagcttatgcttcccggtaaattaaccaagcacnccatgtctaaggataccgaaaccatcaccaagtggaccagctca

SEQ ID NO: 27521 - DNA, 388 bp, Glycine max
  unsure (1)..(388): unsure at all n locations
  Clone ID: TF_LIB3108-045-Q1-K1-E12
cggaggagaagaaaatagtcgttcgagattctccgtacgaagcaaactgctcgtaagggcagattatgaaaggctcctatgaagcagcttgcatccaatgctgcacgtaagtctgcaccaactactggtggtgtgaagaagccacatcgttaccgtcctggtaccgttgctcttcgtgagattaggaaataccataagagtaccgagcttttgatcaggaagctcccctttcagaggctggttcgtgaaattgctcatgacttcaagactgatctgcgtttccagagccactccgtgcttgcattgcaagaagctgctgaggcatacctngttgggctctttgaggacactaacctgtgtgccattcacgctaagcgggtaaccatta

SEQ ID NO: 27522 - DNA, 483 bp, Glycine max
  Clone ID: TF_GmC958271_1
ctggtaaccctctccgcctaactcgccgtggcacgttcgaagcagactgcccgggaatctaccggaggaaaggctccccgaaagcagctcgccaccaaagctgcacctaagagcgcaccttccgctggaggagtgaacaagcctcatcgtgacaggcccggtgccgtcgctcttcgggaaatcaggcgttaccagaagtccactgagttgctgatccgcaagttgcctttccagcgacttgtccgtgaaattgcacaggacttcaaaactgatctccgtttccagagcgctgcgattggtgcccttcaggaagctagtgaggcctacttggttggtctgtttgaagataccaacttgtgcgctattcacgctaagcgtgtgacaatcatgccgaacgacatccagttggcgcggcgaattcgtggagaacgtgcttaaattactggcagctgttttttaagttttgtttttaacactatatgg

SEQ ID NO: 27523 - DNA, 787 bp, Glycine max
  Clone ID: TF_GmC1230_16
actcatacccactctttattctcccaattcaaaactctcactccgttagaagcaccaaatcctgatggcaccaaaggcagagaagaagccagcggagaagaagcccgcagaggagaagaagtccacggtgggagacaaggctccggcggagaagaagccaaaggccggaaagaagcttccgaaggagggaggcgccggcggcgaagggaagaagaagaagagaaacaagaagagcgtggagacatacaagatctacatcttcaaggttctgaagcaggttcaccctgacattggtatctcaagcaaggccatgggaatcatgaacagcttcatcaacgacatcttcgagaagcttgcccaggaatcttctagacttgcccgctacaacaagaagcccaccatcacttcaagggaaattcagaccgcggtcaggcttgtgctgcccggtgaattggccaagcacgccgtttcggagggtaccaaggccgtcaccaagttcactagctcttgaacaaaatatctttgcctggctcttgtttttcttcatgtgtttctgttagatctagcgacctatgcttagatttgaacagttaacttttttattattatttgtaattgaagtattgggattaggttcatcctctgtgtatggaaatggtagaatcgatcgtataggggtaatttgatacatggaatggctgttttgactattttatgtactcgtgattgtctctctaacttcgttcgaggtcgatattcctttttaaaaatgtttatttgtatgccc

SEQ ID NO: 27524 - DNA, 834 bp, Glycine max
  Clone ID: TF_GmC1230_18
ggctcgagcccattcttcattctagccattcgaattcccaatctaaaaccctaataccttcaaagaacgaagtagtggatcagtgatggcacctaaggcagagaagaagccagcggagaagaagcccgcggaggagaagaagtcgacggtgggagacaaggctccggcggagaagaagccgaaggccggaaagaagcttccgaaggagggaggagccggcggagaaggggggaagaagaaaaagaggaacaagaagagcgtggagacgtacaagatatacatattcaaggtactgaagcaggtccaccctgacattggtatctcaagcaaggccatgggaatcatgaacagcttcatcaacgacatcttcgagaagcttgctcaggaatcttccagacttgcccgctacaacaagaagcccaccatcacttcaagggaaatccagaccgcggtcaggcttgtgcttcccggtgaattggccaagcacgccgtttctgagggtaccaaggccgtcaccaagttcaccagctcatgaaccgactattatttggattttgtttctggttgcacacacaaatctgttctatgtatctggagacttatgtttggattttgatcagtaattgtgcatgaacgttgtagtggtgctgatatagttagtatattcttggtatggtacatggagtgggctgtttcagtattaatgcatttaagattctctaaaaaaaaaggaaaatctaccaaagtatgaaaaggagctagaacttaaagtagccaaagcacaactggaggaaccttaagaaggatgctctcggggcaatggaaactcaaaaa

SEQ ID NO: 27525 - DNA, 810 bp, Glycine max
  Clone ID: TF_GmC1230_19
tcatcggcacgctgcggcgcggcctgatgcgcatcctccgcgccaccgatccgcaagcttccggcgaagccagagaaagaaaaaaagaagtaaaaactaaataagacaacttcacccactcttcattctatcaattccaatcaccaattcaaaacccttcttcccttggaacaaattgagagatcgtgatggcaccaaaggcggagaagaagcccgcagaggagaagaagtccacggtgggagacaaggctccggcggagaagaagccaaaggccggaaagaagcttccgaaggagggaggcgccggcggagaagggaagaagaagaagaggaacaagaagagcgtggagacatacaagatctacatcttcaaggttctgaagcaggttcaccctgacattggtatctcaagcaaggccatgggaatcatgaacagcttcatcaacgacatcttcgagaagcttgcccaggaatcttctagacttgcccgctacaacaagaaacccaccatcacttcgagggaaattcagaccgcggtcaggcttgtgctgcccggtgaattggctaagcacgccgtctctgagggtaccaaggccgtcaccaagtttactagctcttaaactgttgtttatgggcttgttgcacgcccaagtctgttctatgtatctggacacctatgttcagattttaatcaattgtaggggtggtgatatagtatagtgtagcatattgttggtacggtacattgaattgctgttgagaattaatacatttgagattctctaacttattcgcttatgcaatttcgaa

SEQ ID NO: 27526 - DNA, 835 bp, Glycine max
  Clone ID: TF_GmC1230_20
aggcgtcagacagctgcaaaaagagtacagaatgggactcagaacttcaatccctcttttgcttttccaattccaatttccaattcaaaaccctaactccgttcgaagcaccaaatcgtgatggcaccaaaggcagagaagaagccagcagagaagaagcccgcggaggagaagaaatcgacggtgggagacaaggctccggcggagaagaagccaaaggccggaaagaagcttccgaaggagggaggcgccggcggagaagggaagaagaagaagagaaacaagaagagcgtggagacatacaagatctacatcttcaaggttctgaagcaggttcaccctgacattggtatctcaagcaaggccatgggaatcatgaacagcttcatcaacgacatcttcgagaagcttgcccaggaatcttctagacttgcccgctacaacaagaaacccaccatcacttcgagggaaattcagaccgcggtcaggcttgtgctgcccggtgaattggccaagcacgccgtttctgagggtacgaaggctgtcaccaagttcactagctcttgaattagctatcttatcgctttccaaagactcttttctgtcccaatttgagattttaatcagtagtagactttttttttttgtttgataggatttgtaattgaaagaatggtcctgggttgatccttttgtgtattgaagtggcaagatgtattgattatataggaacgcagtattgtttagtattatactttcaagaatctccaatcggccattcgttaataattgttttttcggatatttgtttgcttgaactttccagttagttatt

SEQ ID NO: 27527 - DNA, 896 bp, Glycine max
  Clone ID: TF_GmC1230_21
tacggctgcgagaagacgacagaaggggattcacaacttcaatccctcttttgctttaccaaattccattttccaattcaaaaccctaactccgttcgaagcaccaaatcgtgatggcaccaaaggcagagaagaagccagcagagaagaagcctgtggaggagaagaaatcgacggtgggagacaaggctccggcggagaagaagccaaaggccggaaagaagcttccgaaggagggaggcgccggcggagaaggtaagaagaagaagagaaacaagaagagcgtggagacatacaagatctacatcttcaaggttctgaagcaggttcaccctgacattggtatctcaagcaaggccatgggaatcatgaacagcttcatcaacgacatcttcgagaagcttgcccaggaatcttctagacttgcccgctacaacaagaaacccaccatcacttcaagggaaattcagaccgcggtcaggcttgtgctgcccggtgaattggccaagcacgccgtttctgagggtaccaaggctgtcaccaagttcactagctcttgaattagctatcttatcgcttttctaagactcttttctgtcccaatttgagattttaatcagtagtagactttttttttgtttgataggatttgtaattgaaagaatggtcttgggttgatccttttgtgtattgaagtggcaagatgtattgattatataggaacgcagtattgtttagtattatactttcaagaatctccaatcggccattcgttaataattgtttttttggatatttgtttgcttgaactttccagttagttattaatagtgtgcaaatcttttgaaaactgtaacatttatcgtataggaatcattttccctaaaaaaaaaaaa

SEQ ID NO: 27528 - DNA, 1148 bp, Glycine max
  Clone ID: TF_GmC1230_24
ggtgaatcagtgatggcacctaaggcagagaagaagccagcggagaagaagccggtggaggagaagaagtcgacggtgggagacaaggctccggcggagaagaagccgaaggccggaaagaagcttccgaaggagggaggagccggcggagaaggggggaagaagaaaaagaggaacaagaagagcgtggagacatacaagatatacatattcaaggttctgaagcaggtccaccctgacattggtatctcaagcaaggccatgggaatcatgaacagcttcatcaacgacatcttcgagaagcttgctcaggaatcttccagacttgcccgctacaacaagaagcccaaccatcgcttcaaacatttctcattcacaactttacccactcttcattctagcaattcgaattcccaatccaaaaccctaataccttcaaagaacctagtagtgaatcagtgatggcacctaaggcagagaagaagccagcggagaagaagccggtggaggagaagaagtcgacggtgggagacaaggctccggcggagaagaagccgaaggccggaaagaagcttccgaaggagggaggagccggcggagaaggggggaagaagaaaaagaggaacaagaagagcgtggagacatacaagatatacatattcaaggttctgaagcaggtccaccctgacattggtatctcaagcaaggccatgggaatcatgaacagcttcatcaacgacatcttcgagaagcttgctcaggaatcttccagacttgcccgctacaacaagaagcccaccatcacttcaagggagatccagaccgcggtcaggcttgtgctgcccggtgaactggccaagcacgccgtttctgagggtaccaaggccgtcaccaagttcaccagctcttgaacaaaatatcttaactttgtttacctcgctcttgttttgcttcatgtgtatctgttagatctagcgaccctatgtttaggtttgaactggtagctttttggtttttaatttgtaagtgaagaattaggattgggttgatcctctgtgtatggaattggtagaattgatcatataggagcaatttgataaaaggaatggttgtttatgaactcatgattctctatcttcgctctaaaa

SEQ ID NO: 27529 - DNA, 767 bp, Glycine max
  Clone ID: TF_GmC1230_27
ccacgcgtccggttgtctttagcctattccaattcgcaattcccaattcgaaacccttattcctttcaaagaaccaaattgagtgatcgtgatggcaccaaaggcagagaagaagccagcggagaagaagcccgcggaggagaagaagtccacggtgggagacaaggctccggcggagaagaagccaaaggccggaaagaagcttccgaaggagggaggcgccggcggagaagggaagaagaagaagagaaacaagaagagcgtggagacatacaagatctacatcttcaaggttctgaagcaggtccaccctgacattggtatctcaagcaaggccatgggaatcatgaacagcttcatcaacgacatcttcgagaagcttgcccaggaatcttctagacttgcccgttacaacaagaagcccaccatcacttcaagggaaattcagaccgcggtcaggcttgtgctgcccggtgaattggccaagcacgccgtctctgagggtaccaaggctgtcaccaagttcactagctcttgaactgactattatgccccttcgcttcgatctaggtgtctctgttaggaatatgttttatgttgaagtgttggtttattttttctttttggtgaaagcaatttgtaagtgaagaatatgggatttgttgatccttctttgtatggaattagttgctaatacagagacgtatattattccgaaaaaaaaaaaaaaaaaaaaaaaaaaaaaagcggccgctctagaggatcca

SEQ ID NO: 27530 - DNA, 706 bp, Glycine max
  Clone ID: TF_GmC1230_5
cccaatccaaaaccctaataccttcaaagaacctagtagtgaatcagtgatggcacctaaggcagagaagaagccagcggagaagaagccggtggaggagaagaagtcgacggtgggagacaaggctccggcggagaagaagccgaaggccggaaagaagcttccgaaggagggaggagccggcggagaaggggggaagaagaaaaagaggaacaagaagagcgtggagacatacaagatatacatattcaaggttctgaagcaggtccaccctgacattggtatctcaagcaaggccatgggaatcatgaacagcttcatcaacgacatcttcgagaagcttgctcaggaatcttccagacttgcccgctacaacaagaagcccaccatcacttcaagggagatccagaccgcagtcaggcttgtgctgcccggtgaattggccaagcacgccgtttctgagggtaccaaggccgtcaccaagttcaccagctcttgaacaaaatatcttaactttgtttacctcgctcttgttttgcttcaattgtatctgttagatctagcgaccctatgtttaggtttgaactggtagctttttggtttttaatttgtaagtgaagaattaggattgggttgatcctctgtgtatggaattggtagaattgatcatataggagcaatttgataaatggaatggttgtttatg

SEQ ID NO: 27531 - DNA, 346 bp, Glycine max
  Clone ID: TF_LIB3093-050-Q1-K1-G7
cccacgcgtacgacacagatggctcgaacgaagcataccgctcgtatgtccacatgatgtgaggctcctaggaagcatcttgcaaccaatgctgcacgtaagtctgcaccaactactggtggtgtgaataagccctacattaatccgactggtaccgttgctcttcatgagatcaggaaataccatattagttccgagctattgatccggaagctcctcttacagaggctgggtcgtgaaattgctcatgacttcaagactgatctgcagttacagagtcacgccgtgcttagcattgcacgaagctactgatgcattcattgtcgggctcaatgaggacactaac

SEQ ID NO: 27532 - DNA, 274 bp, Glycine max
  Clone ID: TF_700944518H1
cagagaccgaaatacttcgagatggcccgtacaaagcaaactgctcgtaagtcaactggaggaaaagctcccaggaatcagcttgcaaacaatgctgcacgtaagtctgaaccaacaactggtgctgtgaagaagcctcatcgttatcgacctggaactgtgcccctccgtgagattaggacataccagattagcgctgtgctcctaatcaggaaccttcatatccaaatgttggttcgcgaaattgcccaggatttcaagactgatctgcgtt

SEQ ID NO: 27533 - DNA, 367 bp, Glycine max
  Clone ID: TF_LIB3040-006-Q1-E1-A8
ggatcctttgtattctattcttcaaaattcatgtactgcgtttcggaagcatacatacatagctcgtaggaatcaaaccgctcgtaagtccacaagatgaaaggctcctatgaagcagcttgcaaccaatgctgcacgtaagtctgcaccaaccactggtgatgtgaataagccccaccgttatcgtcctgataccgttgctcttcgtgagattaggacataccagaatagtaccgagcttttgatccggaagctcctcttccagaagctggttcgtgaaattgctcaagacttcaagactgatctgcgtttccagagccacgccctgcttgcaatgcaagaaactgcttaagcataacttgttagg

SEQ ID NO: 27534 - DNA, 552 bp, Glycine max
  Clone ID: TF_LIB4204-003-R1-K1-B3
cccacgcgtccgacggctgcgagaagacgacagaagggtacggctgcgagaagacgacagaagggtacggctgcgagaagacgacagaagggtacggctgcgagaagacgacagaagggtacggctgcgagaagacgacagaaggggacccaactctctaaacaacacattaacctttctcatacaagatgacctaacgttattcaagacataaataatttctacggttccaaaatggacgctggcggaaagatcaagaacggcccctgaagaagaaacggcgttacgtcctaagaagaagccaggtttaaggtcctgtataggcggtctaaattacccgactggagaattggtcactatttgaagaaatgaaagaacgcccagcgtgcccaaaccagtgctcccgtttacttggccgcatttctcgagtacctaaatactgaggagcttgagttgactgggaattcctaacgtgacaacaagaagaacaggattattgccagacatgtgctattggctgttaagaacgatgaggagttggggaaattgctt

SEQ ID NO: 27535 - DNA, 376 bp, Glycine max
  unsure (1)..(376): unsure at all n locations
  Clone ID: TF_LIB3074-039-Q1-K1-H10
ttggggatcctttgcattctattcattcaacgttcatcgtgtactttttggaagcacanacccaaatacttcgagatggcccgtacaaagcaaactgctcgtaagtcaactggaggaaaagctcccatgaagcagcttgcaaccaaggctgcacgtaagtctgcaccaacaactggtggtgtgaagaagcctcatcgttatcgccctggaactgttgctcttcgtgagattaggaaataccataagaacactgaactcctaatcaggaaacttcctttccaaaggttggttcgtgaaattgcccaagatttcaagactgatcttccttttcaaaaccatgctgtgctttcatttcaagaggcttcttaagcatacc

SEQ ID NO: 27536 - DNA, 905 bp, Glycine max
  unsure (1)..(905): unsure at all n locations
  Clone ID: TF_GmC45_7
gacccacgcgtcagcccacgcgtccgaagacgacagaagggggatcgctctcacacctgtgattattcctcttttaacaatccacatccaaattctagggttccgaaatggaccccacgcgtccgcccacgcgtccgcccacgcgtccgcccacgcgtccggcttaatctctctcattccccatttcctcacctccttcaaccgctgctaaattctagggttccgaaatggacgctggcggaaagatcaagaagggcgccggaggtagaaagggcggcggcccaaagaagaagccggtttcaagggattctccnggttccaataataagcnccncccggnggggtttctccaattccccgtcggaagaattggccgttatttgaagaaaggaaggtacgctcagcgtgtcggtaccggtgctcccgtatacttggctgcagttctcgaatacctagctgccgaggtgcttgagttggctgggaatgccgcacgtgacaacaagaagaacaggattattccaagacacgtgcttttggcagtgaggaacgatgaagagttggggaaattgcttgctggagtgacaattgcacatggtggcgtgcttccaaacattaaccctgttttgttgcctaagaaaacggagagggctgccaaggagcctaagtctccatccaaggctaccaaatctcctaagaaggcttagatttttttttttttttttttaaatctagtgttgtatatcggtgcttagatgcttttggtgtaacaggaaatttgatgtgttttttaaacattgtaattcttgtcccattgtgttgcttgtaggagtgagtttgctttattaatgaaaagtggaaacctcttgttttcaaaaaaaaaaaaaaaaaaaaaaaaaggcttaccc

SEQ ID NO: 27537 - DNA, 312 bp, Glycine max
  unsure (1)..(312): unsure at all n locations
  Clone ID: TF_LIB3106-049-Q1-K1-H12
cgcttctgattattcctcttcccattctattgttcccaaatggacgctnncggaaagacgaagaatttctctctatgaagaaaggtccacatccctaagaagaaaccgttttcaaggtccgtcaaggccggtctccaattccccgtcggaagaattggccgttatttgaagaaaggaacgtacgcccagcgtgtcagtacccgtgctcccgtttacttggccgcagttctcgagtaacctaactgctgacgtgcttgagttggcttggaatgctgcacgtgacaacaacaagaacaggattattccgagaca

SEQ ID NO: 27538 - DNA, 409 bp, Glycine max
  Clone ID: TF_LIB3242-761-P1-J1-F5
gggtcgagctttaagattcaagtactgcgttactgaagcatacacatatggctcgtacgaagcataccgctcgtaagtccacaggaggaaaggcttctaggaagcatcttgcaaccaaggctgcacgtaagtctgcaccaactactggtggtgtgaagaagccccaccgttatcgtcctggtaccgttgctcttcgtgaaatttaggaaataccagaagagttcctagcttttgatccggaagctctcctttcataggctggttcgtgaaattgctcaggacttcaagactgatctgtgtattcagagccacgccgtgcttgcattgtaagaagctgctgaggcataccttgatgggctctttgaggacactaacctgtgttgccattcacgccaagcgtgtaaccatt

SEQ ID NO: 27539 - DNA, 409 bp, Glycine max
  Clone ID: TF_LIB3073-018-Q1-K1-G7
gatcgcatttgatagcactcaccctcattagcgacacgaaagcatatccgaaaccttctttggaagtctctgattatcctaatggctcctgcaaaggcactgaagaagccggcggagaataagccagcggcagagaacgcacctgcggagaagaagccggaggctgcgaatacgatctcgaaggaaggatggagctagaagaagaagaagcacacgaagaagaacctggagacctacaagatctacatcttcaacgtcctcaagcaggttcaccgcgacattggcatttacagcaaggccatgggcatcatgaacagcttcatcaacgacatcttcgataagctcgctcaggaagcgtcgcgattggctcgctactacaagatgcccaccattacctctagggagatcc

SEQ ID NO: 27540 - DNA, 277 bp, Glycine max
  Clone ID: TF_LIB3049-012-Q1-E1-F3
aggggaaactttgcaatccaatcaatcaagattcagcaagtgcgttttgggagcagagaccgaaatacttcgagatgggccgtacaaagcaaactgctcgtaagtcaactggaggaaaagctcccaggaagcagcttgcaaccaaggctgcacgtaagtctgcaccaacaactggtggtgtgaagaagcctcatcgttatcgccctggaactgttgctcctcgtgagattacgaaataccagaagagcactgagctcctaatcaagaagcttccttt

SEQ ID NO: 27541 - DNA, 538 bp, Glycine max
  Clone ID: TF_GmC335946_1
cagcattacgtccaaggatcatattcaaaactctgcattcgcaaacaagttcgattacaagccatggccggagactcgttgctcaatgaacaatgttagtcagccacaatgaaaaaggcataacaaaatccagaagtacaaggaaaaacacctccaactccaccgctaaaatcagacgatagcacagtcgtcaagaacgaccgccaaaaccttgcccaataaccgtgccagtttgacacgattccctcctcttccacgttttcatagagctccccgtagtcgtctagcgagctgaatgtctttttgcatgatggtaacgcgtttcgcatgcagggcgcagaggtttgtgtcttcgaaaagatgcacgaggaaagcctcggcggcctcttggagcgcttggatggcttgagactgccatcgatggccttctaacgatgcaggcgctacgttatatgcgacttcgcggaccaaacgcgagaaaggcaatttgagtagtaggagatccgtcgacttctggtatctcctaatttcgcgcaat

SEQ ID NO: 27542 - DNA, 193 bp, Glycine max
  Clone ID: TF_9205495
tcgtgaaattgcccacgatttcaagactgagctgcgttgccagagccatgctgtgcttgccttgcaagatgctgctgaggcataccttgttgggctctttgaggacactaacttgtgtgccatacactccaagcgtgtgactattatgcccaaggatattcatctggcaagaacgattcgtggtgagcgtgct

SEQ ID NO: 27543 - DNA, 403 bp, Glycine max
  unsure (1)..(403): unsure at all n locations
  Clone ID: TF_18734538
gcggacaaagcaaacagcccgnaagccgaccggcggcaaggcnccccggaagcagcaggcgacnaaggccgcacgaaagncagcnccggcgaccggaggagagaagaaggcacacaggggcaggccaggaaccgcgggccagagggagaccaggaagcaccagaagaggattttttttctgaaccaaaagcaaccgattaagcggatggatcgtgataaagcccaagagtccaaaacggatctgaggttccagagcaaagccgaaccggcagcccaggaagccgctgaaggttacccggaaggaatcctaagaagacaaaacattggtggtattcacgccagaagggtaccaattatgcccaaggataatcaaatcgccagaagaaccaagggcgagagggct

SEQ ID NO: 27544 - DNA, 250 bp, Glycine max
  Clone ID: TF_10845090
ctataaggtgttaattcaagtgcacctcgacatcgggatcttccgcaatgctatggggtacatgaacagtttcatgacgacatgtctcagaaggtcggccattggtcttagtatttgtcataggtacaacaagaaactcaccatttcttccagggagatcctctcggcggtgcgattggtcctctctgtggatttgtgctagcttgccgcttctgaaggcgccaaagctggctcctaattcaccaggtct

SEQ ID NO: 27545 - DNA, 273 bp, Glycine max
  unsure (1)..(273): unsure at all n locations
  Clone ID: TF_700971521H1
cctagattcagccacagttggaaaaaaaaaaaaagttgttcgagatggcacgtacgaagcaaactgcnccgtaagtccacaggnggaaaggcncctaggaagcagntcgcaaccaaggctgcacgtaagtctgcaccaactactggtgtgtgaagaagccanatcgttatcgtcctggacaccgttgctcttcgngagattaggaantaccagaagagtaccgagcttttgatcaggaagctcccttccagaggctggttcgngaattncnca

SEQ ID NO: 27546 - DNA, 389 bp, Glycine max
  Clone ID: TF_LIB3242-401-P1-J1-B5
ccggctcgagaaaaaaccgaccctacctttccctcatcaccaaccaatggctcccccaatggccgagaagaagcccgcggagaaaaagcgccgcagagaaggctggggcggagaagaagcccaaggccgctgaagaagatatcgaaggaaggaggaagcgagaagattaagaagagaacaaagaagagcgtggagacctacaaaatgtacatcttcaaagtgctgaagcaggttcaccccgacataggaatctcaagcaaggccatggggatcatgaacaggtccatatacgacatctccgagaagctcgcccaggagtcgttgcgaatggctaggtataacaagaatcctaccattaacttcagggagatccaaacggcagagcgttt

SEQ ID NO: 27547 - DNA, 454 bp, Glycine max
  Clone ID: TF_GmC136_3
aattcggctcgagtacggctgcgaaagacgacagaagggggagactttccttcagtccttcaccttctttctctctaggcgcaaaacctcgtactgtttgtggcggctaaggatgtcagggaaaggggcgaaggggttgatcacaggcaaaacctccgccgccaacaacaaagacaaggacaagaagaaacccatctcgcgttcttcacgtgccggccttcagttcccagttggccgtatccaccggcttttgaagtcaaggacaaccgccaacggtagagttggggccacagctgctgtctactctgctgctatcttggagtatctcactgctgaagtattggagctggcggggaatgctagcaaggatctcaaggtcaagcgtattactccccggcatctacagctagcaatccgtggggacgaagagctggataccctgataaaaggaaca

SEQ ID NO: 27548 - DNA, 567 bp, Glycine max
  Clone ID: TF_jC-gmfl02220051a07a1
ggctcgagcttcaagattcaggtactgcgtttcggaagcagacacagatggctcgtacgaagcaaaccgctcgtaagtccacaggaggaaaggctcctaggaagcagcttgcaaccaaggctgcacgtaagtctgcaccaactactggtggtgtgaagaagcctcaccgttatcgtcctggtaccgttgctcttcgtgagattaggaaataccagaagagtaccgagcttttgatccggaagctccccttccagaggctggttcgtgaaattgctcaggacttcaagactgatctgcgtttccagagccacgccgtgcttgcattgcaagaagctgctgaggcataccttgttgggctctttgaggacactaacctgtgtgccattcacgccaagcgtgtaaccattatgcccaaggatattcagctggcaagaaggattcgtggtgagccgtgcttgaattggtggtttggaagatgatgatgattggtggcttgctgtggtgttttgttattagattccttttatatctaaagatggtgttgtagggatggaggtttctgctggt

SEQ ID NO: 27549 - DNA, 959 bp, Glycine max
  Clone ID: TF_GmC1625_1
ttccgcccacgcgtccgacggctgcagaagacgacaggacacggctacaaaaacattgaaagaaatagaaaaagcaaaactggtttctcgcatttcctccgaaacaaaccgtttcgctcgtttctcggatctgcaatggaagccccacccaaaggcgctgctggaagaagaggtgacaggaagaagtccgtttccaaatccatcaaagctggcctccaattccccgtcagccgcgtcgccaggtacttgaagaaaggccgttactctcgccgccttggcaccggcgctcccatttatctcgccgccgttctcgaatatctcgccgcagaagtgttggagctggccgggaacgctgcacgtgacaacaagaagaataggattaaccctaggcacgtgttgctggcggtgaggaatgatgatgagctggggaaactgcttcaaggtgtgactattgctagcggtggagtgttgccgaacattaacccggttttgttgcctaagaagagtaccactgcgccttctgagaagtcctctactcctaagtcccccaaatctcctaagaagaaatagaagtttcattttgtaaaggcttatcgtttttttatttttattttttgggggtaggggttggtaacattaccatatatatatatatagttcttaggttaggtgaaatatgatggtgtaatttagcgccaggtgttcgcttttttgctttttttggtcaccccatcgatggctgaatatgatgttaaatgtagtgggttgccaattcgtgtatggaagaagcctttttcatttacttgccggttttatttattaatttattatctaacttgctgcgtttgtatcctgctaaatttattgtttaagcctttaagtggtggcttacttgcaatgtaagggatatgaccaattgtcaattgtatggatttctatcattaaaaattattctgggt

SEQ ID NO: 27550 - DNA, 381 bp, Glycine max
  Clone ID: TF_LIB3167-003-P1-K1-C9
cccacgcgtccgcccacgcgtccggttactcagcatcacctccttttacactctcgaattcgcattctcttcactcattttccaatccatggccaagggagagaaaaaacctgcagagaagaagcccgcggcggagaaggctccggcggagaaaacaaaagccgagaagaagatcccgaaggacgcagcctccggcgagaagaagaagaagaggacgaagaagagcgtggagacgtacaagatctacatcttcaaggtgctgaagcaggttcaccctgacatcgggatctccagcaaggccatggggatcatgaacagcttcatcaacgacatcttcgagaagctcgctcaagaatcttccagactcgcgcgctacaacaa

SEQ ID NO: 27551 - DNA, 348 bp, Glycine max
  unsure (1)..(348): unsure at all n locations
  Clone ID: TF_LIB3028-015-Q1-B1-D2
ctcgttctctgaaattttaattgacctttcccccctcattgcgaatctctatcaattgctcacgcatccgctcattattcaccctctgataagaaaccggcatcaaacggcccaacttgagaagaagccggcttgtcgangtgaaggtatcgatggaacgaggatcccagaagatgaagcagataataaaggacaacgtgtgagacctacaagattcacatcgtcaaagtgttgaagcaagttcatcccgacatctggatcttcatcaaggctatagggatcatgaacaatttcataaacgacatcttcgagaaactctctcaagagtcatcacgtctcgctaggtac

SEQ ID NO: 27552 - DNA, 345 bp, Glycine max
  Clone ID: TF_LIB3051-117-Q1-K1-G3
cgtgatggcaccaaaggcagagaagaagcctgcctagaggaagccttgggaggagaaaaagtcgccggtggaagacaaggttccggcggagaaaaagccaaaggccggaaagaagcttccgaaggagggaggcgccggcggagaaggtaagacgaagaagagaaacaagaagagcgtggagacatacaagatctacatcttcaaggttctgaagcaggttcaccctgacattggtatctcaagcaaggccatgggaatcatgaacagcttcatcaacgacatcttcgagaagcttgcccaggaatcttctagactttgccgctacaacaagaaacccaccatcac

SEQ ID NO: 27553 - DNA, 1023 bp, Glycine max
  unsure (1)..(1023): unsure at all n locations
  Clone ID: TF_GmC45_6
ccacgcgtccgcggacgcgtgggcggacgcgtgggcgatgaggagttggggaaattgcttgctggtgtcaccattgcacatggtggtgtgcttccaaacattaaccctgttttgttgcctaagaagacggagagggctgccaaggagcctaagtctccatccaaggctactaaatctcctaagaaggcctagattatcctttttttttttttttttttaaatctagtgttgtatatcggtgcttagatgcttttggtgtaacaggaaatttgatgtgtttcttaaacattgtaattcttgtcccattgtgttgcttgtaggagtgagtttgctttattaatgaaaagaaaccgtggaaaccaagagaaaatacaaaaatggtgatgatgaaactcaagacaggaatacatcaagaaaacaagatgctgtgcaaacatcataacatgcacatttatgagaggaaagagagacgggtaaaggtgaagtctcataatgaagaattaacagcaaagaggagatgttcaagaagtcgagagcgtgaggatagaaggtccccttctttttcaccaagggagcaaaaacgtacttatcaagatggagagcgcaaagagttgtcaatgcattccttgaaagatagttctagaactaagaaccctgatattgatagaaatagagtatcaactaatggttcaagtggtcaccatcatcgacatggtgtctccacaagtggacttggtgggtattctccaaggaagaggaaaagtgaagccgctgccaagactccttctccatctaagcattctcttgagaagaaacgtgctggatgggatcttccccctgcagggacaaataatccttctgctgttgtttcttcaagttttccagtatcaaattgtgctgtgttgtctaatatgcatgatgtggtttcaactagttctcttgatctagcccttgtgaagcctctgcctgtgtcttttccaagtgatgtatcaacagggaagaataccannacattgattctgt

SEQ ID NO: 27554 - DNA, 402 bp, Glycine max
  Clone ID: TF_LIB3242-241-Q1-J1-F9
ggtactgcgtttcggaagcacacacagatggctcgcacgaagctaaccgatcgtaagttcacatgatgaaaggctcctaagaagcatcttgcaaccagaagctacacgttaaatctgcaccaactactggtggtgtgaaaaagccccaccgttatcgatctgttaccgtggctcttcgtgagattaggaaataccagaagagtcccgagcttttgatccgcaagctccccttacagaggctggttcgcgaaattactcaggacttcaatactgatctgcgtttacagatccaccccgggcttgcattgctagaagctgctgatgcatacctcgttgggctctttgaggacactcacctgtgtgccattcacgccaagcgtgtaaccattatgcccaatgata

SEQ ID NO: 27555 - DNA, 382 bp, Glycine max
  Clone ID: TF_12489081
ggacgctggcggaaagatcaagaagggcgccggaggtagaaagggcggcggcccaaagaagaagccggtttcaaggtccgtcaaagccggtctccaattccccgtcggaagaattggccgttatttgaagaaaggaaggtacgctcaacgtgtgtgtaccggagctcccggatacttgggtgcagatattgaatacctatctgcccgagtgctttgatttgcgtggaatgccgcacgcgacaacaataagaacaagattattccaaaacacgtgcttttggcagtgaggtaccatgatgaattgcggaaatagcttgctggagtgacaatcgcaccttgtggcgtgctgcgcaacatcaaccctgttgtgtgcctaaaaaga

SEQ ID NO: 27556 - DNA, 313 bp, Glycine max
  Clone ID: TF_jC-gmX3049027C02sg12M8b1
tgctcggctgcgggcagccgacaggaggggagaatatttgattcttttcccctagattcatccacagttccggaggagatgaaaatagccgttcgagatggcccgttcgaagcaaactgctcgcaagtccacaggaggaaaggctcctaggaagcagctcgcaaccaaggctggacgtaagtctgcaccaactaccggtggtgtgaagaatccacatcgttaccgttccggcaccgttgctcttcctgtgattaggaattaccagaagagtaccgtgcctttgatcaggaagctgcccttccagaggctggtt

SEQ ID NO: 27557 - DNA, 409 bp, Glycine max
  Clone ID: TF_19937397
gaagcccatcgacgacaataattccacggtgggagacaacgctcccgcggagaaaaacccaaagggcggaaagaagcttcccaaggacggaggcgcccgcagacaacgcaacaacaaaaacagaaaccccacgatcgtgaaaacatacaaaatctacatctacaacgtactgaatcacgctcaccctgacattggaatctctagcaaggacatgggaatcatgaacagcttcatcaacgacatcttcgagaagcttgcccaggaatcatctagacttgtccgctacaacaagaagcccaccatcacttcaagggaaattcaaaccgcagtcaagcttgtgctgaacggtgaattgtccaatcacgtcgattctgacgctaccaacgcccgataccagctcactagctcc

SEQ ID NO: 27558 - DNA, 401 bp, Glycine max
  unsure (1)..(401): unsure at all n locations
  Clone ID: TF_LIB3170-028-Q1-K1-H7
ggatcctttgtattctattcttcaagattcaggtactgcgtttcggaagcagacacagatggctcgtacgaagcaaaccgctcgtaagtccacaggaggaaaggctcctaggaagcagcttgcaaccaaggctgcacgtaagtctgcaccaactactggtggtgtgaagaagccccaccgttatcgtcctggtaccgttgctcttcgtgagattaggaaataccagaagagtaccgagcttttgatccggaaagctcccctacagagggctgttcgtgaaatngctcangacttaagactgatctgcgtttcagagcacgccgtgcttgcattgcagagctgtgagcataccttgtggctcttgagacatacctgtgtgcatcaccnagcgtgtaccatat

SEQ ID NO: 27559 - DNA, 441 bp, Glycine max
  Clone ID: TF_LIB3242-723-P1-J1-D10
tggatcctctagagcggccgctttttttttttttttttttttttttttttggggcaactgaatgttgtccaatacaattccaaagtgactacatcccgtaggtaaaaactaaaaacagaaacattatgacacacatgtccaaaaatcaattacaagccaattttctaaaaggaagaaaacacagtcacggacacttggcagtatttgcctgtatcacaattaatgggtaataataccgtaaaacacctacactccctaacaaccctatccattgaaaaaaaaaaaggaatctgaacaacaaaaacaccacccgcagcaacccatcttcatcttcatcttcacaaccaccaccttaagcacgctcaccgcgaatccttcttgccagctggatatccttgggcataatggttacccgcttagcgtgaatggcacacaggttag

SEQ ID NO: 27560 - DNA, 872 bp, Glycine max
  Clone ID: TF_GmC1624_3
cggacgcgtgggtttctcagttctctcacacactcattcggtgctccgaatctcagattctagggttagggttcccaatttctccaccgatcagaaaatgagttcaactggtggttctaccaagggcggaaggggcaagcccaaagcctccaaatccgtttcaagatcgcagaaagctggtctccaattccccgttggaagaatcgctcgattccttaaggctgggaaatacgccgagcgtgttggtgctggtgctcctgtgtacctctctgcagtgctcgaatatctcgctgctgaggtttgttttgggtttccgattaggtttagatttgattagtcatcgtgttttttgtcaatctgttttttcttgttttaatttttgttttaagggtctgatttttttttatgttctgattgacctaatttatttttttttcaattgttgatgattgatgtgtttttttttattttttaaggttttggaattggctgggaatgctgctagggataacaagaagaatcgtattgttcctaggcacattcagcttgctgtgaggaacgatgaggaactgagcaagcttttggggtctgttaccattgccaacggaggtgtcttgccgaacattcaccagactctgcttcccaagaaggctggaaaggggaagggcgaaattggatctgcctctcaagagttttagggtttttgttttacccatttggactatagtcctcttttattgcgtttgtaacatacatgtttcggttattttctacatgtcttctctgagaaattaggtgcttctcagtctgatgaactggatggtgtattatcacttttgaatcagatgtgaatgtgaagtgctatttggatt

SEQ ID NO: 27561 - DNA, 744 bp, Glycine max
  Clone ID: TF_GmC1660_4
ccagcgtccggcaccttgcagaatcaattttctctctcaatcgtctttcatggctcgtaccaagcaaaccgctcgcaaatccaccggtgggaaggctcctaggaagcaactcgccaccaaggctgcaagaaaatctgcacctaccaccggtggagtcaagaagcctcatcgctatcgtcctggaactgttgctcttcgtgagatccgaaaataccaaaagagcacagagcttctgatccgcaagctcccctttcagcgtcttgttcgtgaaatcgcgcaagacttcaaggtatgttctaaattcaaaaccaaggttttaaatattggttgcggtcctgttgtggtttcattgagaccgttgatattgcagcaaatcactgacattttttgttgatatcgttgccaatgtgaccgatatgattccagactgatttgaggttccagagtcacgcggttcttgcgcttcaggaagctgcggaggcttacttggtgggtttgtttgaagacaccaacctttgtgcgatccacgccaagagagtgaccatcatgcccaaggacattcaactcgcacgccgcatccgtggagaacgtgcttaggcttataataatgataatagcatagttgtcgccttttcgttttgcaatacatttcttgtttcttagggttttagtgttattttccagtttgttatgttttgtatagaagatagatatatcaacagcaacagcttcttaccaatataa

SEQ ID NO: 27562 - DNA, 1747 bp, Glycine max
  Clone ID: TF_GmC1341_1
ttttacggctgcgagaagacgacagaagggtacggctgcgagaagacgacagaaggggaaccaagtttgcttgcgtgtatattcattttagcatcaaggttgaatctcagagaaaaagaaacatcgacaagcatgtctggaagaggaaagggaggcaagggtctcggaaagggaggagccaaacgacaccgtaaggttctgagggataacattcagggaatcaccaagcccgcgattcgccgtctggccagacgtggtggcgtcaagcgtatcagtggtcttatctatgaagaaactcgcggtgttctcaagatctttctagagaacgtcattcgcgacgctgtcacctacactgaacacgctcgccgcaagaccgtcactgccatggacgttgtttacgccctcaagaggcaggggaggaccctctacggatttggcggttagacaattggggatttcagcactgcgtcctcgattagggtttcttatagtgtcaatttcgatgtttatatcctgcaatagttctttagctgtagcttgaggtttagcaactgctcttgtttcgctttgggttgtagctatgagaacttttaatatggtaatcaagattaacttcaactttttatgatagcggctgccactggtgaaatgattgtatattcattttatcactaccgcagcagccttcttcgccagtttcagcatcaagaggccaccagcaggtaagatatggtaaagcataaaaaagttatccccgaataggaacggcaggaaacctctctccgcagcagccacacttcttcgccgtttcagctgaagagccatccgcaggtaagcaatggttaagcataataatgttatccccaatgggcacttccggaaacactggcaaaactatgtgaagacttggtttaatcaaccagcccgaaagaccagaagacggttggctcggcagaagaaggctgtcaagattttccccaggcctactgctggatctctcaggcctattgttcatggccagactctgaaatacaacatgaaagtcagagccgggagaggattttcactggaagaattgaaggctgcaggaattcccaagaaacttgctccaactattgggatttctgttgatcaccgcagaaagaatcgttctttggagagtctgcaggccaatgtgcagaggctcaaaacctacaaggctaagttggttgtgttcccaagaagggcacacaaggtcaaggctggtgattctagccttgaagagctggcaaatgccactcaagtccagggtccattcttgcccattgtgagggagaagccaactgttgaccttgttaaggtaacagatgaaatgaaggccttcaaagcatactataagcttcgtcttgaacgcaccaacaaacgccaccatggtgcccgcctaaagaaggctgctgaagcagagaaggaggacaagaaataaggtccttgagaagacagtttgtaatccatattatagttgtgagaaatttttgtttgatggtctgcgcccttagctttatggagatcatgagttttaaagcaccacccttacaatttttgtttgaactcaagtctgttaatttaattagcactctggtctgttttgattatttctttgattttgtccttggttgttcaagttgtcttttttaattgttagcatgcacgctttccaggcctcgcggcccggctggctcttggctcttgttgaatgaaagcatttaag

SEQ ID NO: 27563 - DNA, 418 bp, Glycine max
  unsure (1)..(418): unsure at all n locations
  Clone ID: TF_7692361
gcagacacagatggctcgtacgaagcaaaccgctcgtaagtccacaggaggaaaggctcctaggaagcagcttgcaaccaaggctgcacgtaagtctgcaccaactactggtggtgtgaagaagccccaccgttatcgtcctggtaccgttgctcttcgtgaaattaggaaataccagaagagtaccgagcttttgatccagaagctccccttccagaagctgattcgtgaaattactcaagacttcaagactaatctacatttccagagccacgccatacttacattgacaaaanctactaaagcataccttattaaactctttaaaaacactaacctatttaccattcacgccaaacatataaccattatgcccaaaaatattcaactaacaagaagaattcgtagtaagcatact

SEQ ID NO: 27564 - DNA, 846 bp, Glycine max
  unsure (1)..(846): unsure at all n locations
  Clone ID: TF_GmC732_6
gacatctttcactcgttctctgaaattttaattgacttttctcccctcataaaaaaaacctaccaatggctcccgcaaaggcagagaagaagcccgcggagaagaagccggcagagaagaagatatcgaaggaaggaggaagcgagaagaagaagaagagaacaaagaagagcgttgagacctacaagatctacatcttcaaggtgttgaagcaagtgcaccccgacatcgggatctccagcaaggctatggggatcatgaacagtttcataaacgacatcttcgagaagctcgcccaggagtcatcgcgtctcgctaggtacaacaagaagcccaccattacttccagggagatccaaacggcggtgcgtttggtcctccctggggagttggccaagcatgccgtttctgaaggcaccaaggccgtcaccaaattcaccagctcttgattggtttcgtgtgtttatgtcagggttttctgttagcccgatttaattaggggtttcttttcctttttatttctttgagtatgtagatgtaaaattaaagccttttatttttaaataatataattgccgttttgccgcaagcgcaaactctcgctgcttcctcttctgcgccgcagaatcctccattatcgttccttcctccaacctcaacatcatcaacaacacttgtcttgctctgtaactcttttatatatatatatatatataaggtgtgtgtgtgtagaatgatgatatgaaactaggtgtctgaagtatgcataaatcccgatttaagnaatggcgcaaaaataaggtaaaagggatgtgggaataaagagccgcctcgagccgaattccg

SEQ ID NO: 27565 - DNA, 378 bp, Glycine max
  Clone ID: TF_LIB3040-021-Q1-E1-C2-F1A
tttttctctttttacttatatcttttggagaaaaagagcgttctctattcacatcagtgactgaaaacctaacgacatctacagaacaccattatcacaaactgaacaactactaaaacagtgagcatccatagtctctcaattcgatacacttttcacggtaacaaaacccctatttaagagtcatcgtctgcagcagcagccttggatgatccaccagccttcttgggaaggagaagattgtgattgttaggtctgacgccaccgttagcgatggtgacgtcaccgagtagcttgcttactccttcgtcgttcctcagcgccaattgaatgtggctcggcataattcgagtcttcttgttgtctctcgcagcgttt

SEQ ID NO: 27566 - DNA, 403 bp, Glycine max
  Clone ID: TF_9900962
acgtacgaagcaaactgatcgtgagtccacaggaggaaaggcacggaggaagctgctcgcaacgaagggtgcacttaagtctgcaccgtctactggtggtgtgaataagccgcatcgttgtcggcctggttccggtgctctacgttagattgagatataccagagaagtaccgggcggtggatcaggaagctccccttgcagaggctggtgtgggaaattgctcaggactgcaagactgatctgaatgtacatagccatgctgtgcttaggttgcatgaagcgtgtgatgcataccttggaggactcttagaggatactaatgtgtgggccatgcgagcgtagcgtgtgtctgttatgccgatagatatgcacgtggcgagatggattctgggtgagcgtgct

SEQ ID NO: 27567 - DNA, 748 bp, Glycine max
  Clone ID: TF_GmC120_1
tcgacccacctcgagctgcggctgcgagaagacgacagaaggggacaacgcaactattgacaatctctctttattctattcactccctccatttcttcaaactaaatttcctgagaatggcgaaggctgcggagaaaaagcctgcggccgagaaggctccggcggagaaaaagccaaaggcggagaagaaggttccaaaggaaggcagcggcggagagaagaagaagaagaggtcgaagaagagcgtggaaacgtacaagatctacatattcaaggtgctgaagcaggtacatcctgacatcggcatttcgagcaaggccatggggatcatgaacagcttcatcaacgatatattcgagaagcttgcgcaggaagcagcgcgtctcgcgaggtataacaagaagccgaccattacatccagggagatccagaccgctgtcaggttggtgctgcccggggaacttgccaagcacgctgtttcggaaggaaccaaggctgttacaaagttcactagctcttagggttaggggttttttcgtttaggtattttttttgtaaagcttagtcgtagttagtggcttcatttggtattctatatgctaatgaaaatttttatttaaaagtattcgtgcctcctgacttagttgatttgacaagtgaataatgctcgcataacacgaatagcattaggtggcgttcttacgcattaccacgttaacgaatgaattaaaccatcacattctagccc

SEQ ID NO: 27568 - DNA, 665 bp, Glycine max
  unsure (1)..(665): unsure at all n locations
  Clone ID: TF_jC-gmXLIB3563P040dh07a2
tcctctagagcggccgctttttttttttttttttttttttttttttgggttaaataaaaattttcattagcatatagaataccaaatgaagccactaactacgactaagctttacaaaaaaaatacctaaacgaaaaaacccctaaccctaagagctagtgaactttgtaacagccttggttccttccgaaacagcgtgcttggcaagttccccgggcagcaccaacctgacagcggtctggatctccctggatgtaatggtcggcttcttgttatacctcgcgagacgcgctgcttcctgcgcaagcttctcgaatatatcgttgatgaagctgttcatgatccccatggccttgctcgaaatgccgatgtcaggatgtacctgcttcagcaccttgaatatgtagatcttgtacgtttccacgctcttcttcgacctcttcttcttcttctctccgccgctgccttcctttggaaccttcttctccgcctttggctttttctccgccggagccttctcggccgcaggctttttctccgcagccttcgccattctcaggaaatttagtttgaagaaatggagggagtgaatagaataaagagagattgtcaatagtntgcgttgtccccttctgtcgtcttctcgcagccgtacggacgcgtgg

SEQ ID NO: 27569 - DNA, 853 bp, Glycine max
  Clone ID: TF_GmC45_4
cccccttccttaacctcgaatttcggttcaagtctcgctgcttgcaattagtcctcttccaacaatccgcacctaaactctagggttctgacatggacactggtggaaagatcaagaagggcgccggagaagaaagggcggcggcccaaagaagaagccggtttcaaggtccgtcaaggccggtctccaattccccgtcggaagaattggccgttatttgaagaaaggaaggtacgcccagcgtgtcggtaccggtgctcccgtttacttggccgcagttctcgagtacctagctgctgaggtaacatatcactaatttgcatcacttaatcttgattgactatgattaattatgtgttgtgaaattgaattgtcttgattggattgtgaaggtgcttgagttggctgggaatgctgcacgtgacaacaagaagaacaggattattccgagacatgtgctattggctgtgaggaacgatgaggagttggggaaattgcttgctggtgtcaccattgctcatggtggtgttcttccgaacattaaccctgttttgttgcctaagaagactgagagggcttccaaggagcctaagtctccatccaaggctactaaatctcctaaaaagtcttaactgacttagtttattgtttctctatttagtgtgcacaaaatgtaaatctgtgtttaggttccttcttgtatcaccattatttgtagttctcaagtcgctgtttctttttcacattttcattcaatctgttgagacagcaagctctcagtaatggattgatttaattttcttatattcgtataattgtatcccgccttctctctatcgaaagattgcgcaat

SEQ ID NO: 27570 - DNA, 348 bp, Glycine max
  Clone ID: TF_LIB3108-040-QI-K1-C8
ctgacgcgtgggctcttttgctttaccaaattccaatttccaattcgggaccctagggccgttcgaatcaccaaatcgtgatggcaccaaaggcatagaagaagccagcagagaagaagcccgcggaggagaagaaatcgacggtggtagacaaggctccgtcggagaagaagccaatggccggaaagaagcttgcgaaagaggtaggctccggctgataagggaagaagaagaagagaaacaagaagagcgtggagacatacaagatctacatcttcaagggtctgaagcatgttcaccctgacattggtatctcaagcaaggccatgggaatcatgaacagcttca

SEQ ID NO: 27571 - DNA, 278 bp, Glycine max
  Clone ID: TF_701064730H1
ttcaggtactgctttcggatgcagatacagatcgctcgtacgattcaaaccgctcgtaagtcgacaggaggtaaggcttctaggaacgaagttgcaaccaaggctgcacgtaagtctgacccaactactggtggtgtgaagaagccccaccgttagcgttctggtaccgttgatcttcgtgagattatgaaattccagaagagtaccgagcttttgatccggaagctccccttccagaggctggttcgtgaaattgctcaggacttcaagactgatct

SEQ ID NO: 27572 - DNA, 412 bp, Glycine max
  Clone ID: TF_15201339
gagtccggccatcgcagagacaaagccggtgtgagaagaatccttcggcgtgaaaagaaccttatcgagaagacatcgaaggctcgacaagaagatctcgaaggaatgagggatcgagatgattaagaagcgcacgaataagagcgtggagacctacttgatctacatcttcaaggtcctcgaggaggatcaccccgacattggtatttccatggacgccatgggcatcatgaacagcttcctcaacgacatcttccataagctcgtccataaagcgtctcgtttggctcgctactacaagatatccaccatcgcctcgatggatatcctgaccgccgtgcctctcctgctccctggtgatgtgtctcaacacgctctttctgaagggaccaaggcggataccgatattacc

SEQ ID NO: 27573 - DNA, 379 bp, Glycine max
  Clone ID: TF_9902832
ggctccggcgaaggcagagaaaaagccggcggagaaaaagccatcggcggagaaggcaccggcggagaaaaaacccaatgcggagaagaagatctctaacgaaggagggagcgagaagaataaaaagcgcacgaagaagagcgtggagacctacaagatctacatcttcaaggtcctcaagcaggttcaccccgacattggtatttccagcaaggccatgggcattatgaacagcttcattaacgacatcttctagaagctcgcccagcaagcgtcgcgtttggcttcgtactactaaaagactagcatcactctttaggagatactgaccaccgtgcttgtattgctatgtggtgaattagtcaaacgcgcagtgtct

SEQ ID NO: 27574 - DNA, 419 bp, Glycine max
  Clone ID: TF_LIB3051-027-Q1-K1-D2
cctagattcagccacagtttcggaggatatagaatatagtcgttcgagatggcccgtacgaagcagactgctcgtaagtccacaggaggaaaggctcctaggaagcagcttgcaaccaaggctgcacgtaagtctgcaccaactactggtggtgtgaagaagccacatcgttaccgtcctggtaccgttgctcttcgtgagattaggaaataccagaagagtaccgagcttttgatcaggaagctccccttccagaggctggttcgtgaaattgctcaggacttcaagactgatctgcgtttccagagccacgccgtgcttgcattgcaagaagctgctgaggcataccttgttgggctctttgaagacactaacctgtgtgccattcacgctaaacgggtaaccattatgcccaagga

SEQ ID NO: 27575 - DNA, 442 bp, Glycine max
  unsure (1)..(442): unsure at all n locations
  Clone ID: TF_22541444
ggcaccaaaggcagagaagaacccagcggataagaagcccgcggaggagaagaagtccacggtgggagacaatgctccggcgganaaaaagccaaaggcctgaaagaaacttccgaatgatggatgcgccggcggataatggaagaagaagaagaaaaacaagaaaagcgtggagacatacaaaatctacatcttcaaggttctaaancangtcaaccctgacattgatatctcaagcaaggccatgggaatcataaacagcttcatcaacgacatcttcgagaagcttagcccaaaatcttctatacttgcccattacaacaataaacccaccatcacttcgaagaaaattcagaccactatcatgcttatgctacccaataaattaaccaancacaccatctctaaaggtaccaaagctatcaccaaattcactanctct

SEQ ID NO: 27576 - DNA, 1042 bp, Glycine max
  Clone ID: TF_GmC110_3
tctattctttgaaaccaaagttcaaactctgtcttccctgggttctatttcgaaatcaacgacgatgagttccacagaggcagcagccacagagaagaaaggtggaagagggaaaccgaagacttcaaagtccgtttcccgttcctccaaagctggccttcagtttcccgtcggccgtgtcgctcgctacctcaaggccggtcgctacgcccagcgcgttggctccggttcccctgtttatctctccgcggttctcgaatacctcgctgccgaggttcgtcattttcttcctttaattttcgatttgtcttttttgtgtattgtgaccttaatgtgttttggggctttaggttttggagcttgcggggaacgctgcgagggacaacaagaagacgaggatcgttccgaggcacattcaactggcggttaggaacgacgaggagttgagcaagctgatgggatctgtgaccattgccaacggtggtgttctgcctaacattcaccagaatttgttgcccaagaaggtcgctggcaaggggaagaccgagattggatctgctagtcaggagttttagatttaaggctcttgttttcgtatgtagttggttgccttatatagtaagattaggattgacattggatgatgtatagtcctttaacatttgaaaataattagttgttttctaacatggttcctgcatagttttcatttatttgagtttctcgtgaatcgagatatctattctctttttatttgtgtgtttgggcataattttagtgtggtgtttatgttgaaaaaaaaaaaaaaaaaaaaaaaaaaaaaaaaaaaaaaaaaaagaaaagaaaaaaaataaaagaaaaaaaaaacccgaaaaaaaaaaacaaaccaaaaccggggggggcccccacttaggggattctgaaccccggaaataaattccggcccggaccttgaaggcttcccacttttccttatggggagccgtttaaaatctggcccaacatagggccatgatggtttcctggggaaaattgttttccc

SEQ ID NO: 27577 - DNA, 294 bp, Glycine max
  Clone ID: TF_LIB3242-090-Q1-J1-H4
aagaatcaagaatcagcaagtgcgttttggaagcagagaccgaaatacttcgggggggcccttacaaaggagagggggggcaagacaactggaggaaaagctcccaggaagcagcttgcaaccaaggctgcacgcaagtctgcaccaacaactggtggggagaagaaacctcaaacgaatcgccctggaacagatgcactaagggagacaaggaaacaccagaagagcactgaactcctaaataggaggctaacttgccagagggaggcccgtgaaaccgcccaaaaatacaag

SEQ ID NO: 27578 - DNA, 314 bp, Glycine max
  Clone ID: TF_LIB3108-025-Q1-K1-A5
agataattacagagtactatcctcatggtagtaggggtccggttgtggctctccgtctggctcccagacacgctgtgctgttgcctgaccttattactcacgttgacgaatatgcaccaccggtgataaatccgaaggctgctaataagatctctaatgaaggagggagcgagaataataaaaagcgcacgaagaagagcgtggagacctacaatatctacattttttaggtcctcaagcatgttcaccccgacatttgtgttttcagtctggccgtggtctttattaacagcttcatcaacgacattttttag

SEQ ID NO: 27579 - DNA, 811 bp, Glycine max
  Clone ID: TF_GmC1660_1
aagtcccggcgcgaaccactcgtccgtacggctgcgagaagacgacagaaggggagatcgcacaacattattctttcgcaccttgcagaatcaattttctctctcaatcgtctttcatggctcgtaccaagcaaaccgctcgcaaatccaccggtgggaaggctcctaggaagcaactcgccaccaaggctgcaagaaaatctgcacctaccaccggtggagtcaagaagcctcatcgctatcgtcctggaactgttgctcttcgtgagatccgaaaataccaaaagagcacagagcttctgatccgcaagctcccctttcagcgtcttgttcgtgaaatcgcgcaagacttcaagactgatttgaggttccagagtcacgcggttcttgcgcttcaggaagctgcggaggcttacttggtgggtttgtttgaagacaccaacctttgtgcgatccacgccaagagagtgaccatcatgcccaaggacattcaactcgcacgccgcatccgtggagaacgtgcttaggcttataataatgataatagcatagttgtcgccttttcgttttgcaatacatttcttgtttcttagggttttagtgttattttccagtttgttatgttttgtatagaagatagatatatcaacagcaacagcttcttaccatttgtagtgtgcctaaacggaaatatttgaataattagattcactttggccaaatcaaaaaaataaaaaaataaaattaactttgccgattttgacgaaaaaaaaaaaaaaaaaaaaaaaaaaaaaaaaaaaaaaaagcccct

SEQ ID NO: 27580 - DNA, 762 bp, Glycine max
  Clone ID: TF_GmC1660_2
tcgtctcgcgtccgtacggctgcgagaagacgacagaaggggacatcgcacatcaattattctttcgcaccttcgaaaatcaattttctgtcttctctgcgtcttcttcctctatcaatcgttttccatggctcgtaccaagcaaaccgctcgcaaatccaccggtggaaaggctcctaggaagcaactcgccaccaaggctgcaaggaaatctgcaccgacaaccggtggagtcaagaagcctcatcgctatcgccctggaactgttgctcttcgtgagatccgaaaataccaaaagagcacagagcttctgatccgcaagctccccttccagcgtcttgttcgtgaaattgcgcaagacttcaagaccgatttgaggttccagagtcacgctgttcttgcgcttcaggaagctgcggaggcttacttggtgggtttgtttgaggacaccaacttgtgtgcgattcacgccaagagggtgaccatcatgccaaaggacattcaactcgcacgccgcatccgtggagaacgtgcttaggctaataataagagtaataacgtagttgctgctgctttttttcgttttgcaatacatttcttgttttagggttatttttagtgttatgttccggtttgtctgttatgggatgtatagaagatagatatatcaatcaacaacttagcatttgtaatgatcctaaactgaaatatttgaataattagattcactttgggtaaaaaaaaaaaaaaaaagggccccta

SEQ ID NO: 27581 - DNA, 1120 bp, Glycine max
  unsure (1)..(1120): unsure at all n locations
  Clone ID: TF_GmC40_13
gttgcgcccgaagcattaggccgagggcacgcctgcctgggtgtcacacgaacctttgcattctattcattcaagattcagcaagtgcgttttggaagcagagaccgaaatacttcgagatggcccgtacaaagcaaactgctcgtaagtcaactggaggaaaagctcccaggaagcagcttgcaaccaaggctgcacgtaagtctgcaccaacaaccggtggtgtgaagaagcctcatcgttatcgccctggaactgttgctcttcgtgagattaggaaataccagaagagcactgagctcctaatcaggaagcttcctttccagaggttggttcgtgaaattgcccaggatttcaagactgatctgcgtttccagagccatgctgtgcttgcattgcaagaggctgctgaggcataccttgttgggctctttgaggacactaacttgtgtgccattcacgccaagcgtgtgactattatgcccaaggatattcagctggcaagaaggattcgtggtgagcgtgcttgagttggtgcgttctgtgtttgtgaagatggattgttggtggctgcggatggtgttttgttactaagttttctttttgttgaagcctataggttattagggaaaaataggtgtttacttggtagtcatattaattgtcattggcaaatactgcctaagacactgtgaaggtctggttgttagaaatttggcatgtatttgatttttttggatcctttatttctcgttttatttctggttgtgcagccactttgggaattgtattggacaactttctgttgccatctaatctagttgaagctagcttatcgtgtcaaaaaaaaaaaaaaaaaaaaaaaaaaaaaaaaaaaaaaaaaaaaaaaaaaaaaaaaaaaaaaaaaaaaaaaaaaaaaaaaaaaaaaaaaaaaaaaaaaaaaaaaaaaaaanaggggggggcccttttaagggaccaaagtttacttcccggggcttggaaggtaaaagttttttttaggggcccccaaaataaaataccggggccgcggtttaaaaagggggggagggggaaaacccgggggtacccaaattaaatggctttgaaaaaaatccccttt

SEQ ID NO: 27582 - DNA, 993 bp, Glycine max
  Clone ID: TF_GmC40_20
tgtgcggcgctcaggcggcggtcgggaaatttttgattcttttcccctagattcagccacagtttcggaggagaagaaaatagtcgttcgagatggcccgtacgaagcaaactgctcgtaagtccacaggaggaaaggctcctaggaagcagcttgcaaccaaggctgcacgtaagtctgcaccaactactggtggtgtgaagaagccacatcgttaccgtcctggtaccgttgctcttcgtgagattaggaaataccagaagagtaccgagcttttgatcaggaagctccccttccagaggctggttcgtgaaattgctcaggacttcaagactgatctgcgtttccagagccacgccgtgcttgcattgcaagaagctgctgaggcataccttgttgggctctttgaggacactaacctgtgtgccattcacgctaagcgggtaaccattatgcccaaggatatccagctggcaagaaggattcgcggtgaacgtgcttgaggtggtggttgtgaagatgaagatgaagatgggttgctgcgggtggtgtttttgttgttcagattcctttttttttttcaatggatagggttgttagggagtgtaggtgttttacggtattattacccattaattgtgatacaggcaaatactgccaagtgtccgtgactgtgttttcttccttttagaaaattggcttgtaattgatttttggacatgtgtgtcataatgtttctgtttttagtttttacctacgggatgtagtcactttggaattgtattggacaacattcagttgccatctaatctcgtttaagctaagtttgttgtgctaattaaactgacctcccttcttggttttgaaatgagaggatttgaaaatatagtattgacagaactggcagaaaatctactcaatttgctcataaatacttaattacccatgttggttttggcttcaaattttgttgaatttcatctcacttgtgtt

SEQ ID NO: 27583 - DNA, 982 bp, Glycine max
  Clone ID: TF_GmC40_23
caccctacggctgcgagaagactacagaagggggatcctttgttttctattcttcaagattcagggactgcgtttcggaagcagacacagatggctcgtacgaagcaaaccgctcgtaagtccacaggaggaaaggctcctaggaagcagcttgcaaccaaggctgcacgtaagtctgcaccaactactggtggtgtgaagaagccccaccgttatcgtcctggtaccgttgctcttcgtgagattaggaaataccagaagagtaccgagcttttgatccggaagctccccttccagaggctggttcgtgaaattgctcaggacttcaagactgatctgcgtttccagagccacgccgtgcttgcattgcaagaagctgctgaggcataccttgttgggctctttgaggacactaacctgtgtgccattcacgccaagcgtgtaaccattatgcccaaggatattcagctggcaagaaggattcgtggtgagcgtgcttgagttggtggttggaaagatgaagatgattggtggctgcggttggtgtttttgtttttcagattcctttttttattcaatagatggggttgttagggagggtaggttttctgctggtagtagcattaattgggatataggcaaatactgctaagtgtccgtgactgtgttttcttcctttaagaaaattggcttgtaattgatttttggacatatgtatgtgttagaatgcttctgttttagtttttacctgcgggatgttgcagccactttagaaactgtattggacaacattcagttgccatctaatctcgtttaagttagtttgttggcttgcctcgttcttactcgggatttccatcccagtttggttactgggtttcttatttattgttcactgtacattatttatggattacctccataaaagaaaagagcgttaatcaaagctgtcagatttaaaagttaatataatttttagttt

SEQ ID NO: 27584 - DNA, 1075 bp, Glycine max
  Clone ID: TF_GmC40_26
ctgtgcggcgctcaggcggcgggtccactttgattctattcttcagatttgcaagtgcgttttggaagcagagaccgaaatacttcgagatggcccgtacaaagcaaactgctcgtaagtcaactggaggaaaagctcccaggaagcagcttgcaaccaaggctgcacgtaagtctgcaccaacaactggtggtgtgaagaagcctcatcgttatcgccctggaactgttgctcttcgtgagattaggaaataccagaagagcactgagctcctaatcaggaagcttcctttccagaggttggttcgtgaaattgcccaggatttcaagactgatctgcgtttccagagccatgctgtgcttgcattgcaagaggctgctgaggcataccttgttgggctctttgaggacactaacttgtgtgccattcacgccaagcgtgtgactattatgcccaaggatattcagctggcaagaaggattcgtggtgagcgtgcttgagttggtgcgttctgtgtttgtgaagatggattgttggtggctgcggatggtgttttgttactaagttttctttttgttgaagcctataggttattagggaaaaataggtgtttacttggtagtcatattaattgtcattggcaaatactgcctaagacactgtgaaggtctggttgttagaaatttggcatgtatttgatttttttggatcctttatttctcgttttatttctggttgtgcagccactttgggaattgtattggacaactttctgttgccatctaatctagttgaagctagcttatcgtgtctgtttgttctgattttgaatttccatccttaatgttatttctcgcatatttggccgaattgcgcaacccgtccagcgtaatttggtttataacacaagacgaatttaacgtttcgttagatgaaacaatcataagtaatacttgtaatcccctttttactattatgtcttgccaactaacttgtaatgtttgaatttgaaagtgttgtaaattggaaatgatgttggggtttctttcttataaatttagttgatcttttaagt

SEQ ID NO: 27585 - DNA, 557 bp, Glycine max
  Clone ID: TF_uC-gmrominsoy113e12b1
cccacgcgtccgtgcgtttcggaagcagagaccgaaatacttcgagatggcccgtacaaagcaaactgctcgtaagtcaactggaggaaaagctcccaggaagcagcttgcaaccaaggctgcacgtaagtctgctccaacaactggtggtgtgaagaagcctcatcgttatcgccctggaactgttgctcttcgtgagattaggaaataccagaagagcactgagctcctaatcaggaagcttcctttccagaggttggttcgtgaaattgcccaggatttcaagactgatctgcgtttccagagccatgctgtgcttgcattgcaagaggctgctgaggcataccttgttgggctctttgaggacactaacttgtgtgccattcacgccaagcgtgtgactattatgcccaaggatattcagctggcaagacggattcgtggtgagcgtgcttgagttggtgcgctctgtgttgtgaagatggattgctggtggctgcggatggggtttgctactaagtttttttttggtgaagccataggtattaaggaaaata

SEQ ID NO: 27586 - DNA, 367 bp, Glycine max
  Clone ID: TF_LIB4391-050-R1-K1-H12
aagatatttagaagaccaattggctcgtaccaagcatatcgctctaccgaccgcaggaggaagggctgctatgaagcagcttgcaaccaaggctgcacgtaagcttgcaccatctactggcggcgagacgaagccccaccgatatcattctggtaccgatgctcctcgtgagattaggaattaccagaggagcacctagcttctgatgcggaagctgcccttccagaggctggatcgtgaaacacgctcaggacttgaagactgatctgcgtgtccagagccacgccgcgcttgcattgcaggagggtgctggtgcataggttgctgggcaatttgaggactctatcctgagtgctattcacgccaa

SEQ ID NO: 27587 - DNA, 322 bp, Glycine max
  Clone ID: TF_7146544
ggactctggcggaaagatcaagaagggcgccggaggaagaaagggcggcggccctaagaagaagcctgtttcaaagtccgtccatgccgggctccaattccccgtctgaagaattggtcgttatctgaagaaaagaaggtactcccagcgtgtcggtaccggggctcccgtttactgggccgcaattctcgagtacctagctgctgaagtgcttgagtaggctgggaatgctgcacgtgacaacgaagaaaacaggattatttcgagacatgtgctattggctgtgaggaactatgaggagttgggaaattgcttgctgggt

SEQ ID NO: 27588 - DNA, 612 bp, Glycine max
  Clone ID: TF_GmC128_1
tacggctgcgagaagacgacagaaggggatatcaccctttttgtttctctctttgtcattgaaactttttcacccccttgataccgcttcaattcaccaatggcaagtcgaggaaaaacccagggatctggcacaaccaaaaagggcatctcccgaagcaacaaagctggtctccaattcccagttggtcgtattgctcgatacctcaagattggcaagtatgctgaccgtatcggttctggcgctcccgtgtatctcgcctctgttcttgaatatcttgctgctgaggttttggagttagcggggaatgccgcaatggacaacaagaagactcgtattatgcctcgccatatccaattggctgttaggaatgatgaagagttgagcaggcttctcggagatgtgactatcgccagtggtggtgtgacacctaacattcacaacatgttgctgcctaagaaggttgggacctcgacctcaacctttatgggtcctagtgccgatgatgacgacgcttaaatgttttcccccaaaagtttgacccatgtttcccttctgtaaaatgggtcctttattgaataatactaaatgtcaagattgacataatataat

SEQ ID NO: 27589 - DNA, 347 bp, Glycine max
  Clone ID: TF_GmC156942_1
cccaattctttctttttaaagaccaaccaaaaacacatcaaacaatggcgcccaagaccgcagacacgaagcagaccgcctccaaggcccccgccaaggccccggcctcgaaggccccggccaaggcccccgcgaagaagccggccagcggcgacaagaagaagtccaagaagcgtgtcgagtcttacacctcgtacatcttcaaggtcctgaagcaggtgcacccggacactggtgtctcgaacaaggccatgtcgatcatgaactcgttcgtgaacgacatctttgagcgtgtcgccgacgaggcgtcgcgcctggccgcgtacaacaagagatccacgatctcc

SEQ ID NO: 27590 - DNA, 512 bp, Glycine max
  Clone ID: TF_GmC732_13
ttttacctttaatgaatttccaataaaaacctgatttccgattcaatttcatagcactcaccctcattaccaacacgaaagcatagccaaaaccttttttcgaagtctctgattttcctaatggctccggcaaaggcagagaagaagccggcggagaagaagccagcggcggagaaggcaccggcggagaagaagccgaaggcggagaagaagatctcgaaggaaggagggagcgagaagaagaagaagcgcacgaagaagagcgtggagacctacaagatctacatcttcaaggtcctcaagcaggttcaccccgacattggtatttccagcaaggccatgggcatcatgaacagggtcatcttggtcctctttggggagctcgcccagcacgccgtgcgcttggcccgctacccctagaagcattcgatcatcttgattggtctcgtgtgtgtctgtcaaggtattctgtcaaccctatttgattggggtttctccaccttcagattacg

SEQ ID NO: 27591 - DNA, 936 bp, Glycine max
  Clone ID: TF_GmC1624_1
cagtttctcagttctcacactcattccgtgctctaaatctcaaattctagggttagggttcccaatttctccgccaatcagaagatgagttccaccggtggttctaccaagggcggaaggggcaagcccaaagcctccaaatccgtggtctgcgcctgatttctcagttctctcacacactcattcggtgctccgaatctcagattctagggttagggttcccaatttctccaccgatcagaaaatgagttcaactggtggttctaccaagggcggaaggggcaagcccaaagcctccaaatccgtttcaagatcgcagaaagctggtctccaattccccgttggaagaatcgctcgattccttaaggctgggaaatacgccgagcgtgttggtgctggtgctcctgtgtacctctctgcagtgctcgaatatctcgctgctgaggttttggaattggctgggaatgctgctagggataacaagaagaatcgtattgttcctaggcacattcagcttgctgtgaggaacgatgaggaactgagcaagcttttggggtctgttaccattgccaacggaggtgtcttgccgaacattcaccagactctgcttcccaagaaggctggaaaggggaagggcgaaattggatctgcctctcaagagttttagggtttttgttttacccatttggactatagttttgattttattgcgtttgtaacatacatgtttcggttattttctacatgtcttctctgagaaattaggtgcttctcagtctgatgaactggatggtgtattatcacttttgaatcagatgtgaatgtgaagtgctatttggattatctgtcgaattaatttattttataacgatagtgtttcataagctggcgcacattgctttttcaactttgaacagtcaattgttttaaaaaaaa

SEQ ID NO: 27592 - DNA, 782 bp, Glycine max
  Clone ID: TF_GmC1624_2
ccggaattcccggccgggcatctgcgcctgatttctcagttctcacactcattccgtgctctaaatctcaaattctagggttagggttcccaatttctccgccaatcagaagatgagttccaccggtggttctaccaagggcggaaggggcaagcccaaagcctccaaatccgtttcaagatcgcagaaagctggtctccaattccccgttggaagaatcgctcgattccttaaggctgggaaatacgctgagcgtgttggtgctggtgctcctgtgtacctctctgcagtgctcgagtatctcgctgctgaggttttggaattggctgggaatgctgctagggataacaagaagaatcgtattgttcctaggcacattcagcttgctgtgaggaacgatgaggagctgagcaagcttttgggatctgttaccattgccaatggaggtgtcttgccgaatattcatcagactctgcttcccaagaaggttggcaaggggaagggcgaaattggatcagcttctcaagagttttagggtttttgttaggcctatttggactatagtttttattttattgcggttgtaatatacatgttttggttaatttttagatatctgctctgaggaattaagtgtttctcagtcttttgaactggatggtgtaatctcacttttgaatcggatgcgaatatgaagtggtatttggattatttttaatgggttgtgaatgaaaataacgttacctgttgagatcgtaaaaaaaacaaaaaagggcgaccgc

SEQ ID NO: 27593 - DNA, 458 bp, Glycine max
  unsure (1)..(458): unsure at all n locations
  Clone ID: TF_LIB5068-020-A1-XP1-B7
ccggcgacccagcaaagcgcaaagcaccccccaccacgacccgcccccccagaagcccccagaaaaccccagacggcgcgcacaaagcaaacagcccgcaagccgaccggcggcaaggccccccggaagcagccggcgacaaaggccgcccgcaagccagccccggcgaccggcggagcgaagaagccacacaggcccaggccaggaaccgcggccccgagggagaccaggaaccaccagaagagcacggagcgcccgacccgaaagcccccgacccagcgnaaggaccgcgaaaccgcccaggaccccaaaacggaccagaggccccagagcagcgccgaaacggcgccccaggaagccgcagaggcccaccccggaggacaccccgaagacaccaacccaagcgccacacacgccaacacgggcaccaaaaggcccaaggaccaacaacccgccac

SEQ ID NO: 27594 - DNA, 506 bp, Glycine max
  unsure (1)..(506): unsure at all n locations
  Clone ID: TF_LIB4202-010-Q1-K2-B3
agcagacacatatgggggcggggggggggggccaataataantcccagggggaaagggtcctangaagcagcttgcaaccaagggtgcacgtaagtctgcaccaactactgggggggtgaagaagccccaccgttatcgtcctggtaccgttgctcttcgtgggagggggggaggccanaanagtacccagcttttnatccggaagctccccttccagagggggggtcgtgaaattgctcaggacttcaagactgagctgcgtttccagagccacgccgtgcttgcattgcaagaagctgctgaggcataccttgttgggctctttgagggactaacctgtgtgccattcacgccaagcgtgtaaccattatgcccaaggatattcagctgggaagaaggagtcctggggagcgtgcttnagttggtgggtggaaagatgaanatgattggggcctgcgggtggtgtttttggttttcagattcctttttttattcaatagatggg

SEQ ID NO: 27595 - DNA, 983 bp, Glycine max
  Clone ID: TF_GmC1660_3
gatcgcacaacattattctttcgcaccttgcagaatcaattttctctctcaatcgtctttcatggctcgtaccaagcaaaccgctcgcaaatccaccggtgggaaggctcctaggaagcaactcgccaccaaggctgcaagaaaatctgcacctaccaccggtggagtcaagaagcctcatcgctatcgtcctggaactgttgctcttcggtaatttgctcctttcagtaattgttttgttttttcttctccttcgcgttttgaattttcgcgaattattgttttttttttcgtggtttcagtgagatccgaaaataccaaaagagcacagagcttctgatccgcaagctcccctttcagcgtcttgttcgtgaaatcgcgcaagacttcaaggtatgttctaaattcaaaaccaaggttttaaatattggttgcggtcctgttgtggtttcattgagaccgttgatattgcagcaaatcactgacattttttgttgatatcgttgccaatgtgaccgatatgattccaggtcgtgaacagttaaaaccatgttcaaaaccctagtttttgacccatacctttttttaattattataattaagtttttgtcttttgtgcagactgatttgaggttccagagtcacgcggttcttgcgcttcaggaagctgcggaggcttacttggtgggtttgtttgaagacaccaacctttgtgcgatccacgccaagagagtgaccatcatgcccaaggacattcaactcgcacgccgcatccgtggagaacgtgcttaggcttataataatgataatagcatagttgtcgccttttcgttttgcaatacatttcttgtttcttagggttttagtgttattttccagtttgttatgttttgtatagaagatagatatatcaacagcaacagcttcttaccatttgtagtgtgcctaaacggaaatatttgaataattagattcactttgac

SEQ ID NO: 27596 - DNA, 385 bp, Glycine max
  Clone ID: TF_uC-gmflLIB3260P099c12b1
cccacgcgttcgtttacgcgtccggccgcagaggcttatctcgttggactcttcgaggacaccaacctctgcgctattcacgccaagagagtcaccattatgcccaaggatattcaactcgctcgcagaatcagaggcgagagagcttaaaattaggtttcattgtgtgatctagaattaaaattaggttactgcttattgtaattcgtatttttcagtcgcctttttgttgtaatattcatcttatttcgaagtatatgctcatatggatctgtacacttgagggtcagtgatattcgatttaatctgtctagtccataatcatgtaagtctcctgatttgtatatgcaaaaattacccacgtgcacaagctcaaaaaataaaa

SEQ ID NO: 27597 - DNA, 458 bp, Glycine max
  Clone ID: TF_GmC745551_1
ggcaagattcagcaagtgcgtttcggaagcagagaccgaaatacttcgagatggcccgtacaaagcaaactgctcgtaagtcaactggaggaaaagctcccaggaagcagcttgcaaccaaggctgcacgtaagtctgctccaacaactggtggtgtgaagaagcctcatcgttatcgccctggaactgttgctcttcgtgagattaggaaataccagaagagcactgagctcctaatcaggaagcttcctttccagaggttggttcgtgaaattgccccggatttcaagactgatctgcgtttccagagccatgctgtgcttgcattgcaggaggctgctgaggcataccttgttgggctctttgagggcactatctggtgtgccattcacgccgagcgtgtgactgttatgcccaaggatatgcaactggcaagaaggattcgttgtgagcaggct

SEQ ID NO: 27598 - DNA, 445 bp, Glycine max
  unsure (1)..(445): unsure at all n locations
  Clone ID: TF_LIB4165-005-Q1-K1-G1
gggacccacgcgtccgtcactctcgctcttgcagttattcctcttctcgcagtccgcgctaaaattctaggggtcccaaatgggcgctgacggggagagcaagaagggggcccgcggaagagaggggggggggccaaanaagaagccgggttcaaggggcgtgaaagccgggctccaattccccgtgnggagagattggcgtgatttgaggagaagggggggcgctcagcgtgtgngggccggtgctcccgtatacttggctgcgggtctcgagtacctagctgccgaggtgcttnagtgtggtgggaatgcggcacgtgacaacaagaagaacaggagtattccaagagacgtgcttttnggantgaggagctatgaggagttnnggaaattggttncgtgggtgacaattgcgcatggtggggtgcttccaaacattaaccct

SEQ ID NO: 27599 - DNA, 250 bp, Glycine max
  Clone ID: TF_700754394H1
cacagttggaaaaaaaaaaaaaagttgttcaagttggcccttacaaagcaaactggtcgtaattccacaggaggaaaggcacctaggaagcttttcgcaaccagggttgcccttaagtctgcaccactactggtggtgtgaaaaagccaaatcgttatcgtcctggtaccgttgctcttcgtgagtttaggaaatcccagaaggttaccgagcttttaatcaggaagctccccttccagaggctggttcg

SEQ ID NO: 27600 - DNA, 541 bp, Glycine max
  Clone ID: TF_LIB4204-012-R1-N1-H3
gaaccaagagacgataagtactaaacaatactggcgttcctatataaacaatgcatcttgccacttcaatacacaaaaggaccaacccaacaccattcgttcaatcacaaaccctatcaaacaaaacaaagcctactactgaaaaaaaattcaatgggtgacaaaaaagagacttagaaacgcaataaaatagctaatacacgagctaatgaccttggcgacagccttggaaccctgagaaacggtgggctcggtcaaaaaaccgggcattacaaacctgaccggggactgaattcccctccaagggatgaagggtcctttgatggagcgggcaattctagaagattcctgcacaagcttaacaaacatggccaagctgaagctagacatgattcccaaagccttgcttgagataccaatgccagggtgaaactgcttcagaaccttgaacatgcataacaagcttgaatacacacacttcgtgtgtctctactttttcttaccttctccgccggcgcctaccttcttcggaagcttcttt

SEQ ID NO: 27601 - DNA, 998 bp, Glycine max
  Clone ID: TF_GmC394_1
tacggctgcgagaagacgacagaaggggggaggcaaaccgcttcattttgaaaatcccgggtcgacccacgcgtccgcccacgcgtccgtacacgcgtccgtacggctgcgagaagggcacaaagcgggaccgaaaaccaaatccgaagagtgaaggttcgttgaatcccatggcgagagtgaagcacacgccagcttctcgcaaatccgctaaaaagcaagcgccacgcgcatccacttccacgcagccgccaccacaatcccaatcgcctgcaactagagagaggaggagagctcaacaagtggagccgcagcaggagcctgaggctcagggaaggaagaagaggcgcaataggtcgggaactgtggcgcttcgtgagattcggcattttcagaggagttgtgagcttctcatcccggctgctccctttatcagatgtgtcaaacagattacaaatcaattctctacggaggtgtctcgttggacacctgaagctgtggtagcacttcaggaggcagctgaggaatatctggttcacttatttgaagatggaatgctctgtgcaattcatgcaaggcgtattactcttatgaaaaaggacattgagttggcccggaggcttggaggaataggaaggccttggtgagtggacgatactagtagaagaccattggttcttttgtttgtaaaagttcacacagtagggggatttcaatgaagggaggcattggtgcttctgtactccgcactctaattgcagtgattatttgatattaaatgttaggaactagacactaactaatgtatgccaatggttatatctctgtaggtgaaacaaccattatagaatggttgctactataactttaaattgatgagtgaggtaatagtgtaacattgtagcaatgaagtattctaagattattgtcattcatgttgattttctgtgcccaaaaaaaaaaaaaaaaaaaaaaaaagaggaggccgctctagagga

SEQ ID NO: 27602 - DNA, 547 bp, Glycine max
  Clone ID: TF_uC-gmroLIB3259P159d11a1
agctagcttcaactagattagatggcaacagaaagttgtccaatacaattcccaaagtggctgcacaaccagaaataaaacgagaaataaaggatccaaaaaaatcaaatacatgccaaatttctaacaaccagaccttcacagtgtcttaggcagtatttgccaatgacaattaatatgactaccaagtaaacacctatttttccctaataacctataggctctaacaaaaagaaacaccatccgcagccacaacacagacggcaccaactcaagcacgctcaccacgaatccttcttgccagctgaatatccttgggcataatagtcacacgcttggcgtgaatggcacacaagttagtgtcctcaaagagcccaacaaggtatgcctcagcagcctcttgcaatgcaagcacagcatggctctggaaacgcagatcagtcttgaaatcctgggcaatttcacgaaccaacctctggaaaggaagcttcctgattaggagctcagtgctcttttggtatttcctaaatctcacgaagagcaacag

SEQ ID NO: 27603 - DNA, 537 bp, Glycine max
  Clone ID: TF_LIB4392-018-R1-K1-D6
attcaagattcagcaagtgcgttttggaagcagagaccgaaatacttcgagatggcccgtacaaagcaaactgctcgtaagtcaactggaggaaaagctcccaggaagcagcttgcaaccaaggctgcacgtaagtctgcaccaacaactggtggtgtgaagaagcctcatcgttatcgccctggaactgttgctcttcgtgagattaggaaataccagaagagcactgagctcctaatcaggaagcttcctttccagaggttggttcgtgaaattgcccaggatttcaagactgatctgcgtttccagagccatgctgtgcttgcattgcaagaggctgctgaggcataccttgttgggctctttgaggacactaacttgtgggccattcacgcccagcgtgtgactattatgcccaaggatatttaactggccaggaggattcctggggagcgtgcttgagtttgcggcgtgtggttgcgaaaaatgaatgttggggggctgccggatggcggttttgttactaaagtttttttt

SEQ ID NO: 27604 - DNA, 279 bp, Glycine max
  unsure (1)..(279): unsure at all n locations
  Clone ID: TF_700567927H1
cctagattcagccncagtttcggagnnagaagaaaatagtcgttngagancgcccgtacgaagcaaactgctcntaagttccacaggaggaaaggctnctaggaagcagcttgnaacnaaggctgcacgtaagtactgcaccnactactggtggtgtgaagnnncccacatcgttaccgtcctggtaccgttgctcttcgtgagattaggaaataccagaagagtaccgagcttttgatcaggaagcaccccttccagaggctggttcgtgaattgctc

SEQ ID NO: 27605 - DNA, 408 bp, Glycine max
  unsure (1)..(408): unsure at all n locations
  Clone ID: TF_LIB3040-041-Q1-E1-E10.R5
ttttgccgtgcttgcattcagnagctgctngagcataccttgttgggctctttgaggacactaacctgtgtgccattcacgccaagcgtgtaaccattatgcccaaggatattcagctggcaagaaggattcgtggtgagcgtgcttgagttggtggttggaaagatgaagatgattggtggctgcggttggtgtttttgtttttcagattcctttttttattcaatagatggggttgttagggagggtaggttttctgctggtngtngccttnnttgggnttttggcccctcctgctnngtgtccgtgcctgtgttttcttcctttnngannnttggcttgtnnttgntttttggccctntgtntgtgttngnntgcttctgttttngttttttcctgcgggntgtt

SEQ ID NO: 27606 - DNA, 447 bp, Glycine max
  Clone ID: TF_jC-gmro02910067f08d1
aaacaaaaacccaggggggcaaatccatttgggaatatccccggggaaaaaagaggaatcttccaataaaggggcttttgaagaaaacccgaattccaataggccgtaccctaattttaatggcaaaggacccgaaaccctaaacttaagctttttcccctttgattttgcgagcgagttgaatgcccttgggcataagggaaactcgcttaacgggaatagcgcaaaggttagggtcctcaaagagcccaacgagaaaagcctccggggtttcctgaaaagccaaaacggggtttttttgaaagcggaaatcggttttgaaatcctgagcgatttctttgacaagcctttggaaggggagttttcggatcaaaagttcggggcttttttgggcctttaaaatctccctcaaaaccccccttcctggcctgaaagggtggggttttt

SEQ ID NO: 27607 - DNA, 349 bp, Glycine max
  Clone ID: TF_LIB3049-044-Q1-E1-D7
gactgatctgcgtttccacagccactccgtgcttgcattgcaagaagctgctgatgcataccttgttgggctctttgaggacactaacctgtgtgccattcacgccacgcgtgtaaccattatgcccaaggatattcagctggcaagaaggattcgtggtgagcgtgcttgacttggtggttggaaacatgaagatgattggtggctgcagttggtgtatttgtttttcagattccattttttattcaatatatggcgttgttagggatggtaagttttcagctggtagtatcactaactggtatacatgcacatactgctaagtgtccgtgactgtgttttcttcctt

SEQ ID NO: 27608 - DNA, 372 bp, Glycine max
  Clone ID: TF_LIB4204-008-R1-N1-H5
aaaaaaaacatcttcgcccttcaatacccaaaagggtcaacccaaaaccattttttcaattacaaatcctatcaaacaaaaaaagcgtactactgattaaaatctcaaattgggacaaaaaaaagtcttaaaaaaccgataaaatagctaattcaaaagctaaggaacttggggacacccttgggaccctcaaaaacggggggcttggccaattcaccgggcagcacaagcctaaccgggggctgaatttcccttaaaaggagggggggtttcttgttgtaccgggcaagtctaaaaaattcctggccaagcttctcaaaaatgcggttgataaagctggtcatgcccttctggcgtcttttcccagccgta

SEQ ID NO: 27609 - DNA, 471 bp, Glycine max
  unsure (1)..(471): unsure at all n locations
  Clone ID: TF_jC-gmst024120e12a1
ggttcgattagcttcttttgataccaaaatagccgtacgagatggcccgagggaagcatacagttcgtttgggcacatgaagaaaggctcctaggaagcagcttgcaaccaaggctgcacgttagtctgcaccaactactggtggcgtgaagaagccacatcgttaccgacctggtaccgttgctcttcgtgagattaggaaataccagaagagtaccgagcttttgatcaggaagctccccttccagaggctggttcgtgaaattgctcaggacttcaagactgatctgtgtttccagagccacgccgtgcttgcattgcaagaagctgctgaggcataccttgtcgggctctttgaggacactaacctgtgtgccattcacgctaagcgggtaaccattatgcccaangatatccagctggcatgaaggattcgcggtgaacgtgctcgaggtggtggttgagaagatg

SEQ ID NO: 27610 - DNA, 668 bp, Glycine max
  Clone ID: TF_GmC92043_2
ccacaactacttctccatctccatctaccaacaacatggcccgcactaagcagaccgcccgcaagtccactggtggcaaagccccccgcaagcagctcgcatccaaggcagctcgtaagagtgcgccgtctaccggtggtgtcaagaagcctcaccgctacaagcccggaactgtcgctctccgtgagatccgtcgctaccagaagtcgactgagctcctcatccgcaagctgcccttccagcgtcttgttcgtgagattgcccaggacttcaagtccgatctccgcttccagtcctccgccatcggtgctcttcaggagtccgtcgaggcctacctcgtctccctcttcgaggacaccaacctctgcgccatccacgccaagcgtgtcaccatccagagcaaggacatccagctcgcccgccgcctccgtggtgagcgtggttaagcttctcaacaacacatcgacacgacatgacaacttcttcgggtcagtgattggattgtgtctttagtggttaggatatcaaggcgtttatagggtttcatggttcacggtcttcaactcggtttatgagtgcacacgagcggtgctgagcatgtagtatatccaggttaatcagtgatggtcactggcgatattatctcgaaatcaacagatttctacttc

SEQ ID NO: 27611 - DNA, 269 bp, Glycine max
  unsure (1)..(269): unsure at all n locations
  Clone ID: TF_700787362H2
ctcgggcaacgttcagcgctagctatcatacagtcncgatggaccgcacgaagcagacggcgaggaagtccagtggcggcaacgcgccaaggaagcagctggccaccaaggcggcgcgcaagtctgccccggcgaccggcggagtgaagaagccccaccgtttccgccccggaacgtcgcgctccgggagatccgcaagtaccagaagagcacggagctgctgatccgcaagctgccgttccagcgcctggtgcgtgagatcgcccagg

SEQ ID NO: 27612 - DNA, 397 bp, Glycine max
  Clone ID: TF_jC-gmfl02220084b08a1
ggctcgtgcatatagagtgatcgtgatggcaccaaaggcagagtagtagccagcggagttgttgcccgcggtggtgaagtagtcgacggagggtgacaaggctccggcggagttgtagccaaaggccggattgtagcttccgaaggatggaagcgccggcggagtatggtagtagttgttgagatacacgaagatcgtggtgacatacaagatctacatcttcaaggttctgaagcaggtccaccctgacattggtatctcatgcaaggccatgggaatcatgaacagcttcatcaacgacatcttcgatatgcttgcccaggtatcttctagacttgcccggtacaacaagaagcccaccatcacttcaagggaaattcagaccgcggtcaggctt

SEQ ID NO: 27613 - DNA, 358 bp, Glycine max
  Clone ID: TF_9900407
cgccggacgaagaaatgtcggccgtcctaagaaaaagccagtttcaacgtccgtcaaggccagtctccacttccccatcagaccaatcggccgttctttcaagaaaggacggtacgcccaccgtgtcggtaccggcgctcccgtatacttaaccaaacttctacagtacttatctgctaaggtgcttaagttttctgaaaatgctgcacgtgacaacaagaagaacatgattattcctatacatgtactgttggctgtaaagaacgataatgatttataaaaattacttactgatgtcaccattactcataataatattcttgcagacattaaccctattgtactacctaagaaaact

SEQ ID NO: 27614 - DNA, 671 bp, Glycine max
  Clone ID: TF_GmC92043_1
aaataacacacacccacacccgcatccacatccacatctctcacccccgccacaaccacaacaacatcatctccatcactttccagcaccagcttcattagcaatggctcgcacaaagcagaccgcccgcaagtccactggtggcaaggccccccgcaagcagctcgcttccaaggctgcccgcaagagcgccccctctaccggtggtgtcaagaagcctcaccgctacaagcccggtaccgtcgctctccgtgagattcgtcgctaccagaagtcgactgagctcctgatccgcaagctacccttccagcgcctggttcgtgagattgcccaggacttcaagagcgaccttcgcttccagtcctccgccatcggtactctccaggagtccgtcgagtcctacctcgtctccctcttcgaggacaccaacctgtgcgccatccacgccaagcgtgtcaccatccagtccaaggacatccagcttgcccgccgcctccgtggcgagcgcaactaagctatccgcgtgatacccggttgcggataatgactcgttttgttctttgacacgatggaaatggttctggggataatcatggcgttacgatgagaaactggctttgctctacagttgggatgtacattaaacaatacgcagcctttgcatgctgctg

SEQ ID NO: 27615 - DNA, 440 bp, Glycine max
  Clone ID: TF_LIB3051-063-Q1-K1-F7
ggacgtagtcaacgcgagctgatgactcgcgcttactaggaattcctcgttgaagaccaacaattgcaatgatctatccccatcacgatgaaatttcaaagattacccggacctgtcggccaaggctatagactcgagttggaaaaaaaaaaaaagttgttcgagatggcacgtacgaagcaaactgctcgtaagtccacaggaggaaaggcacctaggaagcagctcgcaaccaaggctgcacgtaagtctgcaccaactactggtggtgtgaagaagccacatcgttatcgtcctggtaccgttgctcttcgtgagattaggaaataccagaagagtaccgagcttttgatcaggaagctccccttccagaggctggttcgtgaaattgctcaggacttcaagactgatctgcgtttccagagccatgctgtgcttgc

SEQ ID NO: 27616 - DNA, 507 bp, Glycine max
  unsure (1)..(507): unsure at all n locations
  Clone ID: TF_16278806
gcacgagctttagcaaattccaattcccaattcccaattcccaattcgaaacccttattcctttcaaagaaccaaattgagtgatcgtgatggcaccaaaggcagagaagaagccagcggagaagaagcccgcggaggagaagaagtccacggtgggagacaaggctccggcggagaagaagccaaaggccgaaagaagcttccgaaggaggaggcgccggcggagaagggaagaagangaaagagaacaagaagagcgtggagacatacaagatctacatcttcaagggtctgaagcaggtncaccctgacattggtatctcaagccaagccatgggaatcatgaacagcttcatcaacgacatcttcnagaaacttgccccagaatcttctaaacttgcccgttacaacaagaagcccaccatcacttcaaggggaattcaaaccgcggtcaggcttgtgctgcccggggaattggccaaccacgcccgttttgagggtcccaag

SEQ ID NO: 27617 - DNA, 403 bp, Glycine max
  Clone ID: TF_7925666
tcgtacaaagcaaaccgctcataagtccacaagaggaaaggctcctaagaagcagcttgcaaccaaagctgcacataagtctacaccaactactggtgatataaagaaaccccaccattatcgtcctagtaccattactcttcataaaattataaaataccagaaaactaccgagcttttaatccaaaaactccccttccacaaagctattcataaaattactcaagacttcaatactaatctacatttccacagccacaccatacttacgttacaaaaacctactaaatcataccttattaaactctttagaaacactaacctatatgccattcacaccaagcatataaccattatacccaaatatattcagctatcaataaaaattcataataagcgttct

SEQ ID NO: 27618 - DNA, 403 bp, Glycine max
  Clone ID: TF_8669694
ccgtacgaagcaaactgctcgtaagtccacaggaggaaaggctcctaggaagcagcttgcaaccaaggctgcacgtaagtctgcaccaactactggtggtgtgaagaagccacatcgttaccgtcctggtaccggtgctcttcgtgagattaggaaataccagaagagtacctagcttttgatcaggaagctccctttccacaggctggttcgtgaaattgctcaagacttcaagactgatctgcgtttgcagagccacgccgtgcttgcattgcaagacgctgctggcgcataccttgtcgggctctttgaggacactaacctgtgtgccattcacgctaagctggtaaccattatgcccattgatatccagctggcaagaaggattcgcggtgaacgtgct

SEQ ID NO: 27619 - DNA, 271 bp, Glycine max
  Clone ID: TF_6070218
cggagtgaataagccacacaggttcaggcctggaaccatggccctgaaggagatcaagaagtaccagaagagcacggagcttctgatccgaaagcttccgtttcagtatttggctcgtgaaatcgcttaagacttcaaaacggatctgatgttacagagcagctccgttgctgcgctccaggaagccgctgatgctgacttggttggtctctgtgaagacactaacctatgtgatatcatcccttagagggttacagttatgcccacggat

SEQ ID NO: 27620 - DNA, 346 bp, Glycine max
  Clone ID: TF_LIB3108-022-Q1-K1-E11
tgttcctcgacatgtgtgtctggcggtgaggaatgatgaggagcttgggaggttgttgggtggggttactattgctcatggtggagttttacccagcatcaaccctgtcctgctgccgaagaagactggcaaggagggggtggagcccaagagtccgaagaaggcggctaagtccccaaagaaggcttaaatctgtgctctgggactgttagccgtagaagtcttaaagttgtgctcttaggctgttagctgtagatatatggcgtggatcagctggtctatgcattgtggtttctggtatttgactgtattccatgtttctatggtttagtgttaacatatgttt

SEQ ID NO: 27621 - DNA, 600 bp, Glycine max
  Clone ID: TF_LIB5118-014-A2-PF1-F6
gattccttgcattctattcattcaagattcagcaagtgcgttttggaagcagagaccgaaatacttcgagatggcccgtacaaagcaaactgctcgtaagtcaactggaggaaaagcagccaggaagcagcttgcaaccaaggctgcacgtaagtctgcaccaacaactggtggtgtgaagaagcctcatcgttatcgccctggaactgttgctcttcgtgagattaggaaataccagaagagcactgagctcctaatcaggaagcttcctttccagaggttggttcgtgaaattgcccaggatttcaagactgatctgcgtttccagagccatgctgtgcttgcattgcaagaggctgctgaggcataccttgttgggctctttgaggacactaacttgtgtgccattcacgccaagcgtgtgactattatgcccaaggatattcagctggcaagaaggattcgtggtgagcgtgcttgagttggtgcgttctgtgattgtgaagatggattgttggcggctgcggatggtgtcttgctactaagctttcttctcgtcgaagcctataggttatcagccaaaaatacccgtctacccgc

SEQ ID NO: 27622 - DNA, 573 bp, Glycine max
  Clone ID: TF_LIB4392-013-R1-K1-G4
ttcaagattttgtactgcgtttcggaagcagacacagatggctcgtacgaagcaaaccgctcgtaagtccacaggaggaaaggctcctaggaagcagcttgcaaccaaggtctcttctataatcacaacaacaattaattaatctttggtcattttgatatgttttgaaattttatccgagagtttaattcctttgttttaattttatgctgcacgtaagtctgcaccaactactggtggtgtgaagaagccccaccgttatcgtcctggtaccgttgctcttcgtgagattaggaaataccagaagagtaccgagcttttgatccggaagctccccttccagaggctggttcgtgaaattgctcaggacttcaaggtattgtaatgtgtattattgtttaatgtttgtgtgttttgttgttgaacttgttaacaagggaattttgttgtgcttttgttgcagactgatctgcgtttccagagccacgccgtgcttgcattgcaagaagctgctgaggcatacctttgttgggctctttgaggacactaacctgtgtgccattcacgccaagc

SEQ ID NO: 27623 - DNA, 241 bp, Glycine max
  Clone ID: TF_8827097
agagaaaaaacctgcagagaagaagcccgaagcggataatgctcctgcggagaaaacaacagcctagaagaatatcccgaaggacgcaacctccggcgaaaagaagaagaagatgacaaagaatagcatggagacgtacaagatctacatcttcaaggtcgctcaacagttcaccctacgtctgtatctccacaaggccagggtgatcatgcaaagtttaatgaacgagattttcgagaaa

SEQ ID NO: 27624 - DNA, 472 bp, Glycine max
  Clone ID: TF_jC-gmfl02220084h12a1
tattcggctcgagaggtactgcgttaagggagcagactcagatggctcgtacgaagcaaaccgctcgcaagtccacaggaggctaggctcctacgaagcaacttgcaaccaaggctgctcgtaagactggaccaactactggtggtgtgacgaagcccgaccgttatcgtgctggtaccgtagctcttcgagagagtaggatataccagaagagtaccgagcttatgatccggacactgcccttacagaagctggttcgagaaagggctcaagactcgacgactgagctgcgagtgcagagccacaccgtgcttgcattgcaagaagcggctgaggcgtaccttgaagaactctgtgaagacactagcccgcgggccattgacgccaagcatgtgaccattatgccgaatgatattcagctgacaggaaagattcgaggcgagcgtgctagagatggaagctggaaagatga

SEQ ID NO: 27625 - DNA, 502 bp, Glycine max
  unsure (1)..(502): unsure at all n locations
  Clone ID: TF_LIB4164-029-Q1-N1-C3
cttggggtgttgtggtttttttttttttttttttttttttttttttttttttttttttttttttttttaaattaaaggttggtgggatgcctttggaaatcaaaggctggatcaagactcaaggggggccttaaaataatttaaattttgaacaacctttgggggggggggagagccttctttaaacccatttggctggaaacctaactgctgctgcaaggggcccaattttcattcctcccattnaaaggggaaaaaaaaggggggccaccctagaatctaaattcaagaactttgggaacagggaatccctttttaagggggatcggcgggagcagcccccttgggtgggcccccagcctttttgggaagaagaaggttgggaatgttaggcataacaccgccgttggcagtgggaacatctcctagaagctgggtcaacttttcggggttcctcaccgccaattgggtgtgggggggaacaattcgaggttttttgttt

SEQ ID NO: 27626 - DNA, 460 bp, Glycine max
  Clone ID: TF_15001070
tctattcattcaagattcagcaagtgcgtttcggaagcagagaccgaaatacttcgagatggcccgtacaaagcaaactgctcgtaagtcaactggaggaaaagctcccaggaagcagcttgcaaccaaggctgcacgtaagtctgctccaacaactggtggtgtgaagaagcctcatcgttatcgccctggaactgttgctcttcgtgagattaggaaataccagaagagcactgagctcctaatcaggaagcttcctttccagaggttggttcgtgaaattgcccaggatttcaagactgatctgcgtttccagagccatgctgtgcttgcattgcaagaggctgctgaggcataccttgttgggctctttgaggacactaacttgtgtgccatccacgcccagcgtgtgactattatgccccaagatatttcgctggcaagaaagattcctggcgag

SEQ ID NO: 27627 - DNA, 434 bp, Glycine max
  Clone ID: TF_jC-gmXLIB3563P041dc06d1
cgacccagcgtccgaccacttttcgaaccgactgcaaggggggactgcaggggatcgcactaacacctgtgatagtgtctactatttaacaatccacacccaaaatctgggcgctcgaaataggacatctggcaggacgatcaagaagggcgccggaggtagaaagggcggaggcccaaataagaggccggttaaaacgttcgggggggcgggctccaataacccgtcggaagaattggacaggattggaagaaaggaaggtacgctcaggggctccggaccgctgctcccgtatacttggctgcctatctggaatacctctctgccgaggtgctagagtcggctgtgactgccgcacgagcacggctagaagaacaagactatctcaagacacgtgcttacgacaaagaggaacgataatgagttgcggaaat

SEQ ID NO: 27628 - DNA, 766 bp, Glycine max
  Clone ID: TF_GmC128_2
ccacgcgtccggaaactttttcacccccttgataccgcttcaattcaccaatggcaagtcgaggaaaaacccagggatctggcacaaccaaaaagggcatctcccgaagcaacaaagctggtctccaattcccagttggtcgtattgctcgatacctcaagattggcaagtatgctgaccgtatcggttctggcgctcccgtgtatctcgcctctgttcttgaatatcttgctgctgaggcaatttttcttaatcgcctttgatttttgttttcgtgtgttgtcattggatttagggtttataaattagggcttattttcctaaagtttagtggatggttttggtttaatgatcaaccttgaataattgaaatgataaatttactttaatcaatattaattacttttttgaaaggtttatatcacacttggtgtgttcaggttttggagttagcggggaatgccgcaatggacaacaagaagactcgtattatgcctcgccatatccaattggctgttaggaatgatgaagagttgagcaggcttctcggagatgtgactatcgccagtggtggtgtgacacctaacattcacaacatgttgctgcctaagaaggttgggacctcgacctcaacctttatgggtcctagtgccgatgatgacgacgcttaaatgttttcccccaaaagtttgacccatgtttcccttctgtaaaatgggtcctttattgaataatactaaatgtcaagattgacataatataataa

SEQ ID NO: 27629 - DNA, 213 bp, Glycine max
  Clone ID: TF_LIB3170-016-Q1-K1-C5
agggaggatcgttcccaggcacattcaacttgcggtttggagcgaccaagagtttagccagctgattggatcttttaccatttcccacgggggtgttctggctaacattcaccaaaatttgttgcccaaaaaagtcgcttgccagggggaaacccaaatttgatctgctagtcaggagttttaaatataaaagccttggtttcccatgtagtt

SEQ ID NO: 27630 - DNA, 386 bp, Glycine max
  unsure (1)..(386): unsure at all n locations
  Clone ID: TF_LIB3139-043-P1-N1-D5
aagagcangacggccacggccgccgccgaagctcgaattcgctcgagctcaagatcatgtactgcgtttcggaagcagacacagatggctcgtacgaagcaaaccgctcgtaagtccacaggaggaaaggctcctaggaagcagcttgcaaccaaggctgcacgtaagtctgcaccaactactggtggtgtgaagaagccccaccgttatcggcctggtaccgcagctcttcgtgagattaggaaataccagaagagtaccgagcttttgatcctgaagctcccctttcagaggctggttcgtgaaattgctcaagacttcaagactgatcttgcgttccagagccacgccgtgcttgcattgcaagaagctgctgaggcataccc

SEQ ID NO: 27631 - DNA, 332 bp, Glycine max
  Clone ID: TF_LIB3073-002-Q1-K1-G3
gatcgcatgacatagcactcaccctcattaccaaggcgagggcatagccaaaacctactttcgaaggctctgattttcctaatggctccggcagaggcagataagaagccaccagagaagaagccagctgcggaaaaagcaccgacggataagaatccgaaagcacgacaagaagatctcggatgaaggaaggcgcgagaagaaaaagacgcgcacgaagaagagcgtggagacctacaagatctacatcgtcaaggtcctgacgcaggttcaccccgacattggtatcaccagcaaggacatgggcatcatgaacagcttcatcatcgaca

SEQ ID NO: 27632 - DNA, 388 bp, Glycine max
  unsure (1)..(388): unsure at all n locations
  Clone ID: TF_LIB3049-047-Q1-E1-D10
ggattctttgtattccaatcctcaagattcaagtactgcgtttccgaagcagacacagatggctcgtacgaagcaaaccgctcgtaagtccacaagaagaaaggctcctaagaagcagcttgcaaccaaggctgcacgtaagtctgcaccaactactggtggtgtgaagaagccccaacgttatcgtcctggtaccgttgctcttcgtgggattaggaaataccagaagagtaccgagcttttgattcggaagctccccttccagaagctggttcgtgaaattgctcaagacttcaagactgatctgcgtttcccagagcacgccgtgcttgcattgcaagaagctgccgaggcataccttgttgggctctttgangacactaacctg

SEQ ID NO: 27633 - DNA, 442 bp, Glycine max
  unsure (1)..(442): unsure at all n locations
  Clone ID: TF_LIB3138-084-P1-N1-C6
cccttccttaacctcggattccgcctcaagtttccatccaaaattctctttttccgttttggaaccaaaaccggaagtgcttctatttggcccgtccaaaccaacctgctcgtaagcaaactggaggaaaagctcccaggaagcagcttgcaaccaaggctgcacgtaagtctgcaccaacaactggtggtgtgaagaagcctcatcgttttcgccctggaactgttgctcttcgtgagattaggaaataccagaagagcactgagctcctaatcaggaagcttcctttccagaggttggttcgtgatattgcccatgatttcaagactgatctgcgtttccagagccatgctgtgcttgcattgcaagaggctgctgaggcataccttgttgggctctttgaggacactaactngtgtgccattcacgccaagcgtgtgac

SEQ ID NO: 27634 - DNA, 552 bp, Glycine max
  Clone ID: TF_LIB4164-023-Q1-N1-A7
ctttccttttttttttttttttttttttttttttttttttaacttaaacgagattagatggcaactgaatgttgtccaatacagtttctaaagtggctgcaacatcccgcaggtaaaaactaaaacagaagcattctaacacatacatttgtccaaaaatgaattacaagccattttttttaaaggaagaaaacacagtcacggacacttagcagtatttgcctatatcccaattaatgctactaccagcagaaaacctaccctccctaacaaccccatttattgaataaaaaaaggaatctgaaaaacaaaaacaccaaccgcagccaccaatcatcttcatttttccaaccaccaactcaagcacgctcaccacgaatccttcttgccagctgaatatccttgggcataatggttacacccttggcgtgaatggcacacaggttagtgtcctcaaagagcccaacaaggattgcctcagcagcttcttgcaatgcaagcaccgcgtggcttttggaaacccaaaatagtcttgaagtcctgagcaatttc

SEQ ID NO: 27635 - DNA, 399 bp, Glycine max
  unsure (1)..(399): unsure at all n locations
  Clone ID: TF_4405547
gaagcaaaccgntcgnaagnccacaggaggaaaggctnctaggaagcagctagcaaccaaggctgcacgnaagnctgcaccaactactggaggngngaagaagccccaccgnnatcgncctggnaccgnagctcttcgngaaattaggaaataccagaagagtaccgagcttttgatccggaagctncccttccagaggctgggtcggagaaaatgctcaagaacttcaagactgattctgcggtttccagagcccacgcccgngccttgccatttgcaagaaagcttgctgaggccatacccttggttgggcctcttttgagggacacctaaccctgttgtgcccatttcaacgccaagcggtggtaacccattattgccccaagggatatttcaagc

SEQ ID NO: 27636 - DNA, 619 bp, Glycine max
  Clone ID: TF_LIB5068-030-A1-XP1-F6
ccgggagtggtgagaacaaccctcatcggtatcgccctggaactgttgctcttcgtgagattacgaaataccagaagagcactgagctcctattcaggaagcttcctttccagaggttggttcgtgaaattggccagcatttcaagactgatctgcgtttccaaagtcatgatgtgcttgcattgcaagaggctgctgaggcataccttgtgtgggctctgttgaggacactatcttgtgtgccattcacgccaagcgtgtgactattatgcccaacgatattcatctgggaagaaggattcgtggagagcgtgcttgatttgctgcgttctgtgtttgtgaaaatggattgttggtgactgcgaatggtgtgttgttactaagtcctctgtcttgttgaagcctatacgttatctatcggaccaataggtgtttacttggtagtcctattaatcgtcattggtcaatactgcctaagacactgtgaagtgctgaatgctataaatttggcatgtattcgatttttctggatcctttattctctcgatttatttctggctagtgcagccactttgagaattgtattgcagcacttttctgttgccatctcatctatgtg

SEQ ID NO: 27637 - DNA, 411 bp, Glycine max
  Clone ID: TF_LIB4390-022-R1-N1-A8
ggaccttaaaaaaattaaaattttgaacaaccttttttgaggcgaaaaagctttttttaaacacctttgactgaaaacctaactactactacaaggggcccaattttcatacctcccaataaaagggaaaaaaaaaaagagagcaaccttagaatttaaattcaaaaactttgggaacagggaatccctttttaaaagtcatgggcagcagcagcacccttggaggagcccccaccctttttggaaaaaaaaaggttgggaatgttaggcataacaccgccgttagcaaggggaacatctcctaaaagctggctaaacttttgggggttcctcaccgccaattgggggggggggggaacaattcgagtctttttgttatttttcggagggtttccagccaattccaaaacc

SEQ ID NO: 27638 - DNA, 249 bp, Glycine max
  Clone ID: TF_LIB3242-404-P1-J1-C11
cgcttcttccatttaacataaaaggacacataaacccttacaataggaacataccaaacatactatcgcgcaagtggcaacctatgcaaggcgagcctcggaagcatctcaccacaaaagccgccaaaaagtcagctccaacgaccgacctaatgaagaagccgcatgacttccatcctagcacaatggcgctcatgaagatccggaagtaccaaaagaacacggagcttctgatccagaagctcccat

SEQ ID NO: 27639 - DNA, 381 bp, Glycine max
  Clone ID: TF_LIB3167-079-P1-K1-H5
gcagggccgggcacagccgtacgccaaggcttttgccaaggcttccgtataattggtcctttaataaaaccaaaatcccgtggatgtttggtaaaagggttggaacgaaccaaacggcccgaaggtaaaccggcggaaaggccccgcggaagcagttggcaactaaggcggttggaaggtcggttccggcgaccgggggggtgaaaaagccgcccagattcaggccgggaaccggggcgctgtccaggatccggaagtcccaaaagagcccggggctcctaatccggaagcttccgttccagcgctggttccaggggatcgcgcaggacttaaggaccgacctccggttcaagagctcctccgttttccgcttcaaggagg

SEQ ID NO: 27640 - DNA, 355 bp, Glycine max
  Clone ID: TF_10234512
ggcggatatgaagcctgtcgcggacaatactatttcgatggatggaagaagctacatgataagtatgagaacagagaagagcgttccgacctacaagatctacattttcaatgtgtagaaccaggtgctcccttacatgagcatcttcggccaggctatggtgatcatgatcagcttcgtaagcaacatcttcaagaagctcgcccaggagtcatcgcgtcttgctaggtaccacatgaagctctccattacttccatggagatccatgctgcggcgcgtttggtgctccctgggtagttggccatgcatgccgcttctggcggtgccttagtcgttgctatattctccatctct

SEQ ID NO: 27641 - DNA, 411 bp, Glycine max
  Clone ID: TF_jC-gmX3039042H07sg7A3b1
agaagaccacagaagggggaacctttgcattatattcattcaagattcagcaagtgcgttttgggagcagagaccgaaatacttcgagatggcccgtacaaagcaagctgctggtcagataactggaggaaaagctgccaggaagcagtttgcaaccaaggctgcacgtaagtatgcaccaacaactgttggtgtgaagaagtctcatcgttatcgccctggaactgttgctcttcgtgagattaggaaataccataagagcactgagctcctaatcaggaagcttacttttcagaggttggttagagaaattgaccagtattgcaagactgatctgcgttaccagagacatgctgtgcttgcattgcaagaagcttgtgatgcataccttgatgggctatttgaggacac

SEQ ID NO: 27642 - DNA, 435 bp, Glycine max
  Clone ID: TF_LIB3242-723-P1-J1-H12
atcctctagagcggccgcttttttttttttttttttttttttttttttagcagatccatatgggaatatacctgatgaaataagatgaatcttacaataaagaggcatttgaagaaaacacgaattacaataagcagtaacctaattttaatgtcaaatgacacgaaaccctaaacttaagctctctcgcctctgattctgcgagcgagttgaatgtccttgggcataatggtaactcgcttagcgtgaatagcgcagaggttagtgtcctcaaagagtccaacgagataagcctccgcggctttctgaagagccgaaacggcgctgctctgaaagcggagatcggttttgaaatcctgagcgatttctctgacgagcctctggaatgggagttttcggatcagaagttcggtgctcttctggtactttcgaatc

SEQ ID NO: 27643 - DNA, 708 bp, Glycine max
  unsure (1)..(708): unsure at all n locations
  Clone ID: TF_LIB4204-007-R1-K1-D5
cccacgcgtccgtacggctgcgagaagacgacagaagggtacggctgcgagaagacgacagaagggtacggctgcgagaagacgacagaagggtacggctgcgagaagacgacagaagggtacggctgcgagaagacgacagaagggtacggctgcgagaagacgacagaagggtacggctgcgagaagacgacagaagggtacggctgcgagaagacgacagaaggggataacactgtcactcttacaatcccagctcatagcattcttcttcttccaacgagaatcagtctttgtgttccaaatggctcgtacgaagcaaacagcaagaaagtccaccggaggaaaagctccaaggaagcagctcgccaccaaggcagcacgtaagtccgctccggcgacgggcggcgtgaagaagccccaccgtttcaggccggggacagtggctctgagggagattcggaagtaccagaagagcacggagcttctcataaggaagcttcctttccagaggctcgtaagggaaatcgctcaggacttcaagaccgatctacgcttccagagcagtgctgtctccgctcttcaggaagccgctgaggcctacctcgttgggctctttgaggataccaacctctgcgctattcatgctaagagggttaccattatgcccaaggacattcagctagctcgtangattaggggcgagag

SEQ ID NO: 27644 - DNA, 534 bp, Glycine max
  Clone ID: TF_LIB4164-052-R1-N1-C9
gaggaaaaaaaaaccgtttttgttttaacaactaattcccaacaaagaaggggcaaaaaaccccatttttttcacttaaaaaggggtttccccaaaaaaaaaaaaaaaacccaccctttaacaaaaaaaattttcctaaaaaaaacccctaaatcgaagggaaggggcaaaaaagtcagttaaaaaactagggaacttggggacagccttggccccccaaaaaacggggggcttggccaaatcaccgggcaaaaaaagcctgaccgggggctaaaattcccttgaagggagggggggctttttggtggaacgggcaaatttaaaaaaatccggggcaaccttttaaaaaaagtcgttgaaaaaactgttcaaaaatcccaaggccttgcttgaaaaaccaaagggaggggggacccgcttaaaaaccttgaaaaaggaaatcttggttggccccccccccttcggggttctttttttttttttcccttttccggcggggcctcccttctttggaagcttttttccggcctttgg

SEQ ID NO: 27645 - DNA, 289 bp, Glycine max
  Clone ID: TF_18731884
ggatcgaacgaaacaaaccgcctgcatgcacatcggcggcaaggcgccacggaagcagctggcgacaaaggcggctcgccagttggtttttttttttggcggcgtgaagaagccgcacagatacaggccggtatccctggccctgcgcgagatctgtatgtgtcacaacagcagggagcgacttctccacaagcttccgtgcctacgcttggtgcgcgagatcgcgcgggactgtatgaccgacctccggtgcaaaacctccgccgtgtccgcactcctggaggccgcg

SEQ ID NO: 27646 - DNA, 400 bp, Glycine max
  unsure (1)..(400): unsure at all n locations
  Clone ID: TF_6667439
tcgtacaaagcaaaccgctcgtaagtccacaagaggaaaggctcctaagaagcagcttgcaaccaaggctgcgcgtaagtctgcaccaactactggtggtgtgaagaagccccaccagtatcatgctggtaccattgctcttcgtaagattgaaaaataccagaaaagtaccnagcttgtgatgcagaaactccccttgcaaaagctgggttcgnagatgactgaagacttcaagactgatctgcatgtccaaagccgcncgatgcttgcattacgaaaagctgctgaagcatacgttggtaagctctgtagagacactaacctaggtacgatgcacgccaagcgtatagccattaggcgcaaggatattcggctagcaagaaagattggtggtaagcgt

SEQ ID NO: 27647 - DNA, 579 bp, Glycine max
  unsure (1)..(579): unsure at all n locations
  Clone ID: TF_LIB5118-005-B1-PF1-B11
atttcctaagatgcttttcccctagatcagtcccgtttcggaggagaagaaaatagtcgttcgagatggcccgtacgaagcaaactgctcgtaagtccacaggaggaaaggctcctaggaagcagcttgcaaccaaggctgcacgtaagtctgcaccaactactggtggtgtgaagaagccacatcgttaccgtcctggtaccgttgctcttcgtgagattaggaaataccagaagagtaccgagcttttgatcaggaagctccccttccagaggctggttcgtgaaattgctcaggacttcaagactgatctgcgcttccagagccacgccgggtttgtttgccgacgntcctgaggataccttgttgggctctttgaggacactaacctgtgtgccattcacgctaagcgggtaaccattatgcccaaggatatccagctggcaagaaggattcgcggtgaacgtgcttgaggtggtggttgtgaagatgaagatgaagatgggttgctgcgggtggtgtttttgttgttcagattcctttttttttttcaatggatagggttgttagggagtgtag

SEQ ID NO: 27648 - DNA, 380 bp, Glycine max
  Clone ID: TF_LIB5068-015-A1-XP1-H12
tttcgggatcctttgtattctattcttcaagatctcaggtactcgcgtttacggaagcagacacagatggctcgtacgaagcaaaccgctcgtaagtccacaggaggaaaggctcctaggaagcagcttgcaaccaaggctgcacgtaagtctgcaccaactactggtggtgtgaagaagccccaccgttatcgtcctggtaccgttgctcttcgtgagattatgaaataccacaagagtaccgagcttttgatccggaagctacccttccagaagctggttcgcgaaattgctcaggacttccagactgatctgcgcttccatagtcacgccctgcttgtatttccataaactgctgatgcctaccttgttgcgttctt

SEQ ID NO: 27649 - DNA, 331 bp, Glycine max
  Clone ID: TF_LIB3049-053-Q1-E1-A8
ggaacctttgcattccactcactcaagattcagcaagtgcgttttggaagcagagaccgaaacacttcgagatggcccgtacaaagcaaactgctcgtaagtcaactggaggacaagctcccaggaagcagcttgcaaccagcgctgcacgtaagtctgcaccaacaactggtggtgtgaagaatcctcatcgtcatcgccctggagctgttgctcttcgtgagattatgacataccagaagagcatctgagcacctaatcaggacgcatcctttccagacgttggttcgtgaaagtgctcaggatgtcacgactgatatgcgtttccaga

SEQ ID NO: 27650 - DNA, 364 bp, Glycine max
  Clone ID: TF_uC-gmroLIB3258056g05a1
cgccctttatttctttttttttaatttaacaccgcgcctggatatataaagccagggaatggtctcgtttttcaacataatctctttttttcagacacatatgggattataccgtggtgaaataagatgaatcttaccatgaagaggccttggaagaaaacacgaattactttaagccgtaacctaattctaatggaaagcgacacgagaccctaaacttaagctctcttgcctctgattctgcgagcgagttgaatgttcttgggcataatggtaactcgtttagcgtcgatagcgcataggttagtgttctcaaagagcccaacgagataagcctccgcggtttcctgaagagcctgaaacg

SEQ ID NO: 27651 - DNA, 892 bp, Glycine max
  Clone ID: TF_GmC80_1
acccgccgtaaccaagacgaggtcgggaaaaggggcaaagggattgataacaggtaaaacctcagcttcagccaaagacaaagacaaaagacaagaagaaacccgtttctcgttcttctagagctggtcttcagtttgctgttggacgaattcaccgtcttttgaaagcctagaatagaaaaagctgtgctgtggctgacacagggaaaggcgcggttgaaagattgaaagctcgacatgtcagggaaaggcgcaaagggtttgataactgctaaggacaaagataagaaaaaaccaatttctcgctcctcaagagccggtcttcagtttcctgttggacgcattcatcgtcttctgaagtcaagggtgacagcacatggaagagttggggcaacagctgcagtttattctgctgccatcctggagtatttaactgcagaggtgttggagttggctggcaatgcgagcaaggatctgaaggtgaagcgtattaccccaagacatctacagcttgccatccgtggagatgaagaacttgataccctcatcaaaggaacaatagctggtggaggtgttattcctcatatccacaagtcccttatcaacaaatcttcgaaggaatgaggaaggtttataacttataagttatttgaatcaaagatgaaaatcactgtaaatttaattatatcttttacctgtggataatttgccccttgcattattagtttggttgaactagaaccatccttcaaaagaaatctgaaaatttctgatttcttcatttgaattttgtgaactgatgtgctgacttttgtgctatggtactgcatgttagatgatactgcctgtctgtctagtctttattgtggaagatggttcttgtgtctcgttt

SEQ ID NO: 27652 - DNA, 843 bp, Glycine max
  unsure (1)..(843): unsure at all n locations
  Clone ID: TF_GmC732_2
cgggtcagcccactcgtccggtttttttctcccatcatagaaaaccgaccctctcctttccctcttcaccaaccaacgtacgggagaacccacgcgtccgtacggctgcgagaagacgacagaaggagatctttcactcgttctctgaaattttaattgacttttctcccctcataaaaaaaacctaccaatggctcccgcaaaggcagagaagaagcccgcggagaagaagccggcagagaaggccccagcggagaagaagccgaaggcggagaagaagatatcgaaggaaggaggaagcgagaagaagaagaagagaacaaagaagagcgttgagacctacaagatctacatcttcaaggtgttgaagcaagtgcaccccgacatcgggatctccagcaaggctatggggatcatgaacagtttcataaacgacatcttcgagaagctcgcccaggagtcatcgcgtctcgctaggtacaacaagaagcccaccattacttccagggagatccaaacggcggtgcgtttggtcctccctggggagttggccaagcatgccgtttctgaaggcaccaaggccgtcaccaaattcaccagctcttgattggtttcgtgtgtttatgtcagggttttctgttagcccgatttaattagggtttcttttcctttttatttctttgagtatgtagatgtaaaattaaagccttttatttttaaataatataattgccgttttgttaaaatgcgttttctacttcccccccccaaaatatattcatcccncttgaaaagaatcatgaaattattggggacgaaatgagtaatttgaccatgattttt

SEQ ID NO: 27653 - DNA, 820 bp, Glycine max
  unsure (1)..(820): unsure at all n locations
  Clone ID: TF_GmC732_3
tcgagggccggcnncgggccgggtacaaaaaaaannaaaaaaaaaaaaaaaacggctgcgagaaaaaaaaagaaactcgttctatctaattcagtttttttctcccatcataaaaaaccgaccctctcctttccctcttcaccaaccaatggctcccccaaaggccgagaagaagcccgcggagaaaaagcccgcagagaaggctccggcggagaagaagcccaaggccgagaagaagatatcgaaggaaggaggaagcgagaagaagaagaagagaacaaagaagagcgtggagacctacaagatttacatcttcaaggtgctgaagcaggttcaccccgacatcggaatctcaagcaaggccatggggatcatgaacagtttcataaacgacatcttcgagaagctcgcccaggagtcgtcgcgattggctaggtataacaagaagcctaccattacttccagggagatccaaacggcggtgcgtttggtcctccctggggagttggccaaacacgctgtctctgaaggtaccaaggccgtcaccaagttcaccagctcttgattcgttttgtttcctgtgtttcgattagggttttctgttgaccccgatttgattcgcatttttaaattagggttttattttcctttttgttgcttttgagggtgtagatgtaaaattaaagctttatttttaaataatataaatgccgttttttaatatgccttgttttgaattgtgatccgatcgaaacgtctttttgcgtcttctttggttttctggtttctgattgtggaaatcgaattggctgtttgaccc

SEQ ID NO: 27654 - DNA, 837 bp, Glycine max
  Clone ID: TF_GmC110_1
cctcgcgagacaacaattccacaacgcgatctctctctattctttgaaaccaaagttcaaactctgtcttccctgggttctatttcgaaatcaacgacgatgagttccacagaggcagcagccacagagaagaaaggtggaagagggaaaccgaagacttcaaagtccgtttcccgttcctccaaagctggccttcagtttcccgtcggccgtgtcgctcgctacctcaaggccggtcgctacgcccagcgcgttggctccggttcccctgtttatctctccgcggttctcgaatacctcgctgccgaggttttggagcttgcggggaacgctgcgagggacaacaagaagacgaggatcgttccgaggcacattcaactggcggttaggaacgacgaggagttgagcaagctgatgggatctgtgaccattgccaacggtggtgttctgcctaacattcaccagaatttgttgcccaagaaggtcgctggcaaggggaagaccgagattggatctgctagtcaggagttttagatttaaggctcttgttttcgtatgtagttggttgccttatatagtaagattaggattgacattggatgatgtatagtcctttaacatttgaaaataattagttgttttctaacatggttcctgcatagttttcatttatttgagtttctcgtgaatcgagatatctattctctttttatttgtgtgtttgggcataattttagtgtggtgtttatgttgaaggtgctgttgatggttgatgatatcatgtgttgatggttttcgtttttttactttttttatctttattcttctctttttttc

SEQ ID NO: 27655 - DNA, 691 bp, Glycine max
  Clone ID: TF_GmC16229_1
tacggctgcgagaagacgacagaagggggatcacaacacaagtattcaaaatatctctatatattccctccatttctgagaatggcgaaggctgcggagaagaagccagcggctgagaagtctccggcggagaagaagcctaaggcagagaaaaagattccgaaggaaggcggtggcgagaagaagaagaagaggtcgaagaagagcgtggagacctacaagatctatatcttcaaggtgctgaagcaggtacaccctgacatcggtatttctagcaaggccatggggatcatgaacagcttcatcaacgacatcttcgagaagctcgcgcaggaagcggcgcgtctcgccaggtacaacaagaagcctactattacctccagggagattcagaccgcggtcaggttggtgctgcccggggagcttgccaagcacgccgtttctgaaggaaccaaagccgttaccaagttcactagctcttagagttagggttttttttttttttttttttttctgtaaagctaagtcgtatagctagtggcttcttttcggattctatatgcctatgaatttgtgattctattagtcccgatgaaaatttatattcagagtaatcgataaaaccaaaaataatcgatttgacaagtgaataatactcgcgttgcaggaaaaaaaaaaaaaaaaacttgag

SEQ ID NO: 27656 - DNA, 653 bp, Glycine max
  Clone ID: TF_9259414
aattcgcggccgcagaaattttttttttttttttttttaaaaatgaaatatagcctttttttttattaacttccatttcatttctacacgtctgaaggattgtacaagcaagaatgtccacttgcatgtgctggtagcacatagtggaaacaaattgatcttttaaactttgaaaaattaaagtaaaagagcagatgaagtgtgatctcatgtcttgtatagctgctgagttaaaacatccaaaactgaagtcaaaggggccatgctggttggaagaaagaaactcctccatacccttctttcttatactttcctagctcttttgcctcggatgcccttgctctctgcattgtttccaaagcatctgtctcggaattgaagtcataaaaggtacttgctgcagtaagcttcaaagaaaggaactctacttgatgctgcaaggactgcacatagtttatgatttcatccaacattactgccatacccatggtcttgtaacatcctggaacaatgttctgtaagcaccttaatttctcattgattttccctcttctaaccctttctgctaaactgtgactatcagtagcttgacctcttctggctctgacatgaaccacttcccttgctttctcctcttctgttacattgctttt

SEQ ID NO: 27657 - DNA, 809 bp, Glycine max
  unsure (1)..(809): unsure at all n locations
  Clone ID: TF_GmC700886_1
tcgcgatctacctgattcatcccagaaagacaatgacttaggtgcatcacgaaaggttctaaattttcctcacttttcaacaccccgtaataatgtttcttcagcacctggtagtacacagtttagggaaaaaactactgctaacttgtcacaaagtgaggctagagagtactcagtgatcacagttggttcaagtcactgtggcagcagtcatatccctcaggagaaagatgtaagcagggtttcaagcagtgctgtttgggctactaataataataatagtttatctgctgagcctgaagctgtcagagattgtgtccagagaccaatttgtcctaggagtgacaaaggaaaatcagagatgattgaaccaactgtgacttcatcttctggtggctcaggcagtaccggtattggaagaacttgttccctatcaacaagagatcatggccaaaagagaaaagggacagaagaagaagcatctgaggaacaaagtgaggccacagaacttaaatcagctgatggaaacaaggcttctcagcggacggggtcttccaaaaggaaccgtgcagctgaagtgcataatcaatcagaaaggagaagaagagataggatcaacgagaagatgaggacattgcagcaactgatacctaacagtgacaagacagatgaagcatcaatgttagaagaggcnaatcgaatacttgaaatcgctccagtttcagcttcaggtaatggtgnatggggtctgcatgacaccagtgatgttcccaggaattcagcactatatgtcacaaatgggtatgggg

SEQ ID NO: 27658 - DNA, 1088 bp, Glycine max
  Clone ID: TF_GmC1214_2
ctccctctcggaactttgaaaacgtgcaagcaaaccccacacccccgacaacagtccccgtttgttccgctgcaaaacaaaaacaccgcgtcttccccgtgcggggaaaaagaaaagaaaagaaaagaaccctcaattttccgggaaaaccctccccacaatggtttcccgggaaaacaccaattggctcttcgattacggcttgatcgacgatattcccgttccggacgccaccttcggcgtcaattcctccgccttcacatggccccctaacgccttgaacgcttcctccaatgtcggcgttgaaattgatggctcgttgggggattctgacagtctcaaagagtctggctcaaagaaaagggttaggtctgagtcatgtgctgcttctggctccaaggcatgtcgggagaagttgagaagggataggcttaatgacaagtttgttgaattgggcgccattttggagcctggaaggcctgccaaaacagacaaggctgctatcctgattgatgctgtccgaatggtgacccagttacggggtgaagcccagaagttgaaagacactaatcagggtcttcaagaaaagattaaagagttaaaggctgagaagaacgaacttcgcgatgagaaacagaggctcaaggcagagaaggagaaactggagcagcagctgaaatctttgaatgcacagcctagtttcatgcctccccctgctgcaatccctgctgcatttgcggcacaaggccaagcccatggcaacaagttggtaccttttattagttatcccggagttgcaatgtggcaattcatgccacctgctgcagtggatacctcacaggatcatgttctccgtccaccagttgcctaagctggcactgtacaattctctgggccagcattttggctcaaggttgtatccattttaccaataccttcttggctttgttagttctcttctaagtattctaactggacccagtggtgacttctgactatatctggcatatgatactattatgattaatgctggtagttgcatgtaaatcagtcaatgttaaataaccctgtctggctgtcttcacccc

SEQ ID NO: 27659 - DNA, 818 bp, Glycine max
  Clone ID: TF_GmC1444_1
aatggagaacaaccctagttcatccagagttgacagaaaattcattgagaggaatagaagaaatcaaatgaaagctctctttcgcaaactaaactcacttgtgcctcatcaaagatcaaaggaggccattccactgccggatcagctagaagaagccacaaactacataaagaaactacagattaatctggagaaaatgaaggacaagaagaacatgctactaggaaatgaaaggccaaatgagagaatgaataatgatggaaggagggtgggattaaaatctccacggattgaaatccaacaaatgggttcagccttagaggttgttctaataactgggttggattctcagttcatgttcggtgaaaccattcgtgttcttcatgaagaaggagtagatgttgttaacgctagttataaagttattgaagatgcagttttccattcaatacactgtcaggacaaggaagaaactgccaacggagctgcgaggatatctgagaggttgaagaacttcatccatgattctagctacaatgctttttaaatgggagtcattattattattatatactcaatttttcttccatttcattttacataagttttctttctactttatttttcttatatcatttcttttatgtatcactttcttcttctttttctctgtttttcttttacttccatctgttccccccatatatggaatgtacacgtagccttaactttttccctagtgtaagacgcgtaaattgggaatgtttgctgtaaccattttggtggaaatctaattaaatacggataattctagaggg

SEQ ID NO: 27660 - DNA, 1293 bp, Glycine max
  Clone ID: TF_GmC1305_1
gttttaagagtaccatgcttcctttgtttcgaggcaatgagctggttatgcagttttctaataggccccagcgccagcaacacaaaatctccgaagatctaattctggatgattatgcttctctgaatgtcaatgattctaaccaaaaattcatcactagtagcagcagccaaccaacaaagaaacttttctatggggcaaataaaaagaatcatgactcacccgaacaagcgaagaagatgattcataaggagattgagaggcaaaggagacaagaaatggctaccttctatgcctctcttagatcccttctccctcttgagttcatcaagggaaagcgttcaatatctgaccacatgaacgaggcagtgaattacataaagcacatgcagaaacatatcaaagagcttggtgccaagagagatgaactgaagaaactctccaatcattccaataatatggaaaataaccatgagggcttgcatacatcttgcaacttcactgtccacgagaaaaatggtattattggaatagaaatcaccagtgtcttcagagaggaaaagcctaaaatttcaaagttactacagtttttgactgaagaaggacttgaagttgttagtttcttttcaacagaagtcaatggcagattgctccacagtgtgcagtgtgaggtgaaccattccaacagtgtagatccatctgagctgagaaagaaagtttccaaagcattttcaacctttagatgctctgattgattttgtcgttgaagctagctagcctcacaatctggctaataacaggaaatttacccatagcatgcattttaaacggagagctactctaactatggtactatagaaaaaatctaagagttttagtattgttatttttttggattaatagttgaatgagtttgagaagtgaaaaagagagagggagaaagagagattcattaaatggaagctcgtttaactattggtaaaaaaaatatcagtactaaaaccttaaatttcttaggctaccatagaatttctcttttagacttttctaacttgatagactttgtttggatgagtttgcttgcaaattttaaattggcaactgtccccttttttctctttgatttggactctgctgctttctttgtgaagaatgagggaagaagacagtaaaatcgtacaactcaaaaatgaactctatcccaattccttttgtagcttttctgcaataaaatggattcagtttctgtcttttttttttttcctttcaaaatttacagatgtgcgttaaaaa

SEQ ID NO: 27661 - DNA, 804 bp, Glycine max
  Clone ID: TF_GmC5053_2
ggtccccggtggtttctcggagcagcattgacgatggaatgctttccttcacttccctgccggctgcaaatataaaatcagttaacggtgcttgtgtcggtgccggtgattcggatcactcggatctggaagctgaaccaaagattctatgctctacgagctgtagttccaaatgtatccaagatggacaaggcatcgctgttgggggacgccatattgtacattaacgagttgaaatcgaagctcaacgtgctggattcagagaaaacggaattggagaagcaattggattcaaccaagaaggaactcgagctcgcaactaaaaaccctcctccaccgccaccgccgccaccaccaccaggaccgcctccatctaatagcgtagaaccaaagaagacaacaagcaagctcgctgatttggagttagaggtgaagatcattggttgggatgcaatggtaagaatccaatgcagcaagaagaaccaccctgcagccaggttgatggcagcattgaaagatcttgacttggaagtgcatcacgccagcgtgtctgtggtgaatgatttgatgatccaacaagccacggtgaacatgggaaacaagttttacacgcaggaacagcttctgtcggcactatcatccaaagttggcgatgaactacgatagttccttctgtactattattggtagcagtagctgtagctttctatgtaaattagtgttcttatttttggttagtcctttttggtagcttggactaaattaattttattgaggtaatttgatttgggaagctgaatgatc

SEQ ID NO: 27662 - DNA, 818 bp, Glycine max
  Clone ID: TF_GmC234074_1
cttgcatgcctgcagattgttgatcttctcagaagttctttcatgtaatcaatagtgtctccaagtatagatgttctatccatctgtgatatgcattcaacacaacaaattagatctacacattatgtaagtacagctctcattgaatgaatggctctcactcactgcatagtgcataccttactaatcttggggacaattgctcttagcatcgagagccggtcgtttaacctctttcttcttctcctctccgccattagattcttggagggttgcccctgaagcttctttgatcggttctttctttccagacccgttcccatgttgaaaaccggcatttcagaggattgggttggctccattttacatgtggtttgcagctccaaattcttaagctcttccccaagcaaaccctgctcctcttcttccatcatagacaatattggataatcctcttgaccaagaaatggaggggtattgagtggagtatcaagggtgctatagaatgaatccataatctgtggtgatgattcatcaagtaaggagccatagatttcactgaaggggtagtcgttattgtaagtttgaggaacttcttgaccacaagaagagtttggaaggtaaggtagagagttttgatcaaagcagtcaaaactcccaccatcaaagaactggttttcttctgttcttggattggtgtcccatgtttctcttcttagtgtcattaattcctccaagaaatcctggtcataaaactccatatctctctctttctttctctaaatgcctgtgtgtgtgtgttgtgacaaacgcgtcca

SEQ ID NO: 27663 - DNA, 842 bp, Glycine max
  unsure (1)..(842): unsure at all n locations
  Clone ID: TF_GmC1214_4
taccggttcgagaagacgacagaaggggccacgcgtccgttcccattttggcagccactctttctctctaccctccaacgtgctctccttccaatcacactcacaataacaaactaaccaattcaaagttcacacacacacacagcttgggaagaaaatcgagaattttccgagaaaatccgaagaaggcgggccatggtttccccggaaaacagcaattggctgttcgattacccgctgatcgacgacgttattcccgtcggcgacgcctccttttccgtctccgcctccgccttctcctggcccccacctcccgccaatgtcagtgttgaaattgatgcttcgcttggggattctgatggccccaaagatactgctttgaagaaaagggctagatgtgattcaagtactgcttctagctctaaagcgtgtcgggagaagttgcggagggataggcttaatgacaaatttgttgaattgggctccatcttggagcctggaaggcctcccaaaacagacaaggctgccattctgattgatgctgcccgaatggtaacacagctgcgggatgaagccctgaagttgaaagactcaaatacgagtcttcaagagaagattaaagagttaaaggctgagaagaatgaacttcgtgacgagaaacagaggcttaaggcagagaaagagaagttggagatgcaggtaaaatcaatgaatgctcaacctgctttcttgccaccccctcctgcaatccctgctgcatttgctccacaaggccaagcccccggcaacaagttgatgcctttcatcagggtacccggagttgccatgtggncatttatgcc

SEQ ID NO: 27664 - DNA, 494 bp, Glycine max
  Clone ID: TF_21888659
gcacgaggtttcagacactcaccattcttacttagttccaaacacacacacactccaaacccactataagaaagaacaaaacaaccccatttcccatttcacgtgctatttgtgaaatcacctacccttttgaacattaactttattattgttattgaggcatggaaatggaagattttttatggggtggtggcattgatgttgatgtcaccaagaggaaaagtgatggttttgaaggaagcaatggcgtgattggaagtgggtggtgtggttcatctttctctctggtattggatagggagagaggggagcttgtggaggaacctgtgagattggaaaagaaaggggtgtccactgagagaagcattgaagctttgaagagccatagtgaggcagagaggaaaaggagggcaaggattaatgcacatcttgatacacttcgcagtgtgattccgggtgctatgaagatggacaaagcatcattacttggtgag

SEQ ID NO: 27665 - DNA, 2127 bp, Glycine max
  unsure (1)..(2127): unsure at all n locations
  Clone ID: TF_GmC253_1
ctcgagccgttgtcattgggaattgattcctaaaatttgacgaaaaagagattacaggngaagtgggaaaacagtagatgatcccaatgggaattggcaaaattggagatcatcgacatcaagatgctcaaccgacccccagctcgctttccctttctttctctgataaagcgtcgtaacagaacaccactattcccctacggaagagggcacaaggtccattcttagaaaattggtcacacgcatacacaaaactttaagaaaatcatatatgtaaaagtaatatacaatggatttttgtagtaaggttattttaggttaatgttacgcgaacaacatgtgtttgatgggaaattgatgagctattgctctgttaggcatctgaagctgtatattttgatttactaaattttcttttcaacctcatctagctatttggttatgttactcataggatttacatataaatcttctgctgacttctgctgagtacaaaattgaaagcaaacaagttttggcttccaaaagtacaagactacgagttgataagaacatattcatctactgccaaaggcctgaagttgaaccatggattgttcagctgcaagaaaaacacaaaaggctgaccgtgaaaagttaaggagggatcgactcaatgaacaattcgtagaactgggtaacattttagaccctgataggcccaaaaatgacaaagcaaccattctatgtgatacaattcaattgctaaaggacctaacttctcaagttagtaaactcaaagatgaatatgctatgctaaatgaagaatctcgtgagttgactctagagaaaactgatctcagggaagagaaggcttctcttaaatctgatattgacaacttgaataatcagtatcagcagcagctcaggaccatgtttccatggactgcaatggatcattcagttatgatggctccatcatcgtatccatatccagtgccaatggcagtacctcctggtccaattcccatgcagccataccccttctttgctaatcaacatcctgcagtcatctccaacccctgttcaacttatgttccttatttagcccccaataccattgttgaacaacaatccaccctgtacgtatcccctccactacatccttgtgctcggtccaatgtgtcaggaaaacaagagtccaagagcaagtcatccagggagagcatggctgaaaagaatgaggattctaatgatgtcactacagaccttgagttgaagactcctgggtcttctgctgatcaggatttatcatccggacaaagaaaatctagcaagttgtcaaggagggaaagcagttgcacagaaggaagttcattaggtaggtgttcttcttctcgcagtgttcaggacagctcatcgagcagtgtggcggcaagcagaaaggataatgaatgaaaaagtagacaagttagtcaagttctcatgccttgaagccgctgaaatttttcattgtgcatctgctgctactctggaggtgtaagtcattctgttctaatcccaaaataaaagtcacttctgctatctcttcctgaccaagaatttggtccaagtaggtttaaatcttacataatttaagcataaacttccccttttgggggaaaaacttgaaatttcagctggaaaatcaccaaattgaccagtgtggctatcgtgtaggtttgtaaactctttcatagttgttagaatgcatgattcgatacaattcagcaagctaacaatttgtatcatgcaatgaattgtcgatgactttgatctgtacaatacttgcattaattgatgatatcaatgcaatttcatatagtcagttcaaactctggagaatcgagattcggcacaagttgtcgctcatacaatatatgcaccatttggctacatgcacctcacaatattatgtggctcctaaaggcaaagaaaaaacagaagaatgtgacttgagaacactgtattgtccaatgtctacaatgtgagtgaacttaggatgttaaaaatgtgagaaccttgtccttcaccgcaaaatctctcaaaagatccatatatgaaaaaatgttaacaatgcatttttttatccaatattctctaactaat

SEQ ID NO: 27666 - DNA, 1211 bp, Glycine max
  Clone ID: TF_GmC253_3
ggaccttcatttgtcattgggaattgattcctaaaatttgacgaaaagagattacagggaaagtgggaaacagtagatgatcccaatgggaattggcaaaattggagatcatcgaccatagatatcaaggtctgaagttgaaccaatggattgtacagctgcaaggaaaacacaaaaggctgaccgagaaaagctaaggagggatcgattcaatgtacagtttgtagaactgggtaacattttagaccctgataggcccaaaaatgacaaagcaaccattctaggtgatacaattcaattgctaaaggaccttacttctgaagtcagtaaacttaaagatgaatatgctactctaaatgaagaatcttgtgagttggctcaggagaaaaatgaactcagagaagagaaggcttctcttaaatcggatattttgaagttgaataatcagtatcagcaacagctcaggactgtgtctccatggactgcaacggatcgttcaataatgctagctccaccatcatatccatatccagtgccaatgccaatacctcctgctcctattgccatgcagccataccccttctatgctaatcaacattctgcaatcatccctaacccttgttcaacatttgttccttatttagtccccaatacccttactgaacagcgatccacccagtacatgtcgccacctgttcatccaggttttcggtcccatgtgtcaggaaaacaagagtccagaaacaaatcatccaaggagagcaaggctgaaaaacatgaggattctaatgatgtcactctgactcctgggtcttctgctgatcaggatttatcatctggacaaagaaaatctagcaagttgtcaaggaaggaaagcagttgcactgaagtgagttctttagataggtgctctttgtcttgtagcgttcaggatagttcatcaagtagtgtagttcacaagcacaaaggctaatgaatgagaaatggtacaattttggtcaagtgcttatgatgaagtttttccattgttttaactgctgcaactgtctggaggcataagttatttgtggtcttattaaaaaagaagtaacttctgtaagtctctccctggctaggaatttattcttaagtaggtttaaatactaaaaaacaaaaaaaaatcctatacccaaactttttcttgctggggaaaatattggaaggtttggatc

SEQ ID NO: 27667 - DNA, 782 bp, Glycine max
  unsure (1)..(782): unsure at all n locations
  Clone ID: TF_LIB4165-033-Q1-K1-D8
ccacgcgtccgctcctgagcactggatcgatcgagtttcaatttcctctattatctttgttgctttccatgtaaccccacctcttatccatatatatccattcttcttcctcacacttgtttaatttgcacaaatatattatactccaaataaaccgtctcataatggaggagtcaggggaaaattggccttccgataattcttatctggatgaggtcaacgatgaatttggtagtgaagatgaagagggaggttcattttctggaatgggcgagaccgacagaaagaagagaaagcgagaactcgcagagaggttccttgcactttcagccaccatacctggcttcaccaagacggacaagacttcaatcctggccaatgctagtagctatgtgaaacaacttcagcaacgtgtgagggagctagagcaagaagttcaatccaacgtttctagcaatgaaggtgccaccagctcttgcgaagtgaactcatccaatgattattactctggttggtggaccaaatgaaattcttcccgaggtcaaagtaaagagtgttacagaaagggacgttctcatcataatcccactgtgagaaacagaagggcatcatgctcaaaatactttcccagcttngaaaatgttaatctcttctgtagtcaaagttagcgtcttgcgaattgggaaaatcactctcgacatcacccattatgcttaaggtttataatttttttatcgaccaatgttaattattttttttgttaaatggaaagaattcccacc

SEQ ID NO: 27668 - DNA, 612 bp, Glycine max
  unsure (1)..(612): unsure at all n locations
  Clone ID: TF_LIB4165-033-Q1-N1-D8
gttggaatctttccattaacaaaaaantaattaacatttgtcgataaaaaaatataaaccttagcaataatgggtgagtgtcgagagtgattttcccaaatcgcaagacgctactgttgactacagagagattaacattttcaagctgggaaagtattttgagcatgatgcccttctgtttctcacagtggattatgatgagaacgtccttctgtaacactcttactttgacctcgggaagaatttcatttggtccaccaccagagtaataatcattggatgagttcacttcgcaagagctggtggcaccttcattgctagaaacgttggattgaacttcttgctctagctccctcacacgtntgctgaagttgtttcacatagctactagcattggccaggattgaagtcttgtccgtcttggtgaagccaggtatggtggctgaaagtgcaaggaacctctctgcgagttctcgctttctcttctttcttggcggtctcgcccattccagaaaatgaacctccctcttcatcttcactaccaaattcantcgttgacctcatccagataagaattatcggaaggccaattttcccctgactcctccatta

SEQ ID NO: 27669 - DNA, 426 bp, Glycine max
  Clone ID: TF_jC-gmXLIB3563P088Aa07a1
ggggcccaacccacccttttccagaagagagccgcgctcaggaagaacatgaacatgagtgacaataagaagaggaaggagaaggatgaggtggtggttgaggatgtgagtttcgacgggtctggcttgaactacgattctgacgacttaactgagagtaattataatgaccctaaggagaagaatggtggtgggggggttagttccaatgccaacagcaccgtcaccggtttggatcagaaagggaagaagaagggaatgcctgctaagaatttgatggcccaaccacgccccccgaagaagctcaatgacagactctacatgctgaggtccgttgttcccaagattagcaaaatggacagggcttcaattcttggggatgcaattgagtatctgaaggagcttctgcaaaggatcaatgatctg

SEQ ID NO: 27670 - DNA, 883 bp, Glycine max
  Clone ID: TF_GmC253_4
cggtcatcctatgcccttattgagaatttgagaaattggatggagaaagggtcaaggctcaaaatatggaagcagtctgatataactcgaaacattcattaacttagctctctgttggttttccagttttcatcatgtcatcatttatgtgtgatctgtccattcctagaaaatcggtcacacacacacacaacacttttagaaaatcatatattttaaagtaatatacagtgggtttttgtagcaaggttattttatgttaaatttaggcagaccaaatgtgcatgatgagaaattgattagctatgctctgtcagccatctgaagccgtatattttgatttacaaaattttctgttcaacctgaggtagctatttggttaagtaactcaaaggatacattttgatcttctgctgacatctgctgggtacaaaattgaaagcaaacaagttttggcttccaaaagtacaaggctactagtagataaggtagttattaattgatctctgttaacttctgttgcagttataattggttaagtagctcaagggatacattttgatcttctgctgacatctgctgggtacaaaattgaaagcagacaagttttggcttgcaaaagtacaaggctactagtagataaggcctgaagttgaaccaatggattgttcagctgctagaaaaacacaaaaggctgaccgagaaaagttaaggagggatcgaatcaatgaacagttcgtagaattgggtaacattttagaccctgataggcccaaaaatgacaaagcaaccattctgtgtgatacaattcaattgctgaaggacctaatttctcaagttagtaaactcagagatgaatatgctatgctaaatgaagaatctc

SEQ ID NO: 27671 - DNA, 806 bp, Glycine max
  unsure (1)..(806): unsure at all n locations
  Clone ID: TF_GmC253_6
ccggattccgcctcgaccacgcgtccgggaaatgttattagtggagaaatacgacaacacgaatccgtcgtttgttcaaaccgaaacgacaaggcagttcgctttccctttctttctctgagaaggcgtcgtaacagaacacgacgattccccaaggaagtgggcaaaaattgaagatagggatcagtgacagagagagataacaaacgagttataattggttatgtagctcaaaggatacattttgatcttctgctgacatctgctgggtacaaaattgaaagcagacaagttttggcttccaaaagtacaaggctactagtagataaggcctgaagttgaaccaatggattgttcagctgctagaaaaacacaaaaggctgaccgagaaaagttaaggagggatcgaatcaatgaacagttcgtagaattgggtaacattttagaccctgataggcccaaaaatgacaaagcaaccattctgtgtgatacaattcaattgctgaaggacctaatttctcaagttagtaaactcaaagatgaatatgctatgctaaatgaagaatctcgtgagttgactctagagaaaactgatctcagggaagagaaggcttctcttaaatcagatattgacaacttgaataatcagtatcagcagcagctcaggaccatgtttccatggactgcaatggagcattcagttatgatggctccatcatcgtatccatatccagtgccattggcagtacctcctggtccaattnccatgcagccataccccttctttgctatnaacatcctgcagt

SEQ ID NO: 27672 - DNA, 685 bp, Glycine max
  Clone ID: TF_GmC2714_3
gttagaagggaaaaaattagtgagagaatgaagtatttgcaagatttagtgcccggttgcaacaaagtcacgggaaaagctggaatgcttgatgaaatcatcaactatgttcaatctcttcaacgacaagttgagtttctctcaatgaaattagctgctgtgaacccaaggcttgacttgagtattgatgatctatttgacaaagatgttttttctacttgtgctacaaattttccaaacataggaatttcatcaacatcagacatttctaaccctgcctatcttcagtttaattccccacaacaaattttttcatatgatggattagacccatccgatatggggctcagaaggaccataagtgctcctgtatcaatgcctgaaacatatcttcaatcgtcctgtttcacacaaatgctaccctcctcaacatgggaaggtgatttccaaaacctttgcaattttgattttgatcaagcacgggctacatctttcccttctcagctgttatcaggtctggttgaagctggcaatctaaagatggagatgtagactagagcttctatttccttctgcaacttatcaagattctttttgttttgttttcaagtacatagcatatataaattgtttgtaactgctccataatataaataaaatttattaataccagttaacttcagtc

SEQ ID NO: 27673 - DNA, 552 bp, Glycine max
  unsure (1)..(552): unsure at all n locations
  Clone ID: TF_GmC206749_1
gccagttgggcaaggtcttcttggtgctggggaagacagaatggagcaatcatattcatgggagaattgggctcttgacaaggaaatgggggaggatgaggaggagttccttcgcgacatccttagtaaaccggctttttcttccgagagtgaaagtcaagcaccagttgtctcatgctctgccaaaagcaaaagggctccgatgacatacattttgtcttttgataactccaccataacaccagcaccttcttccccccccaccctagaggcccaacctggaaagagggctaaaagagcttcccacattatggctgaaagaaaaaggagacagcaactcacccagagcttcattgcactttcagccaccatccctggcttgaacaagattctgctctcatctctcgcctcggtactggaaatgaaatagcggaatcctatgtagagattttagtatattcttttttttttttaattcttttctttgtagattaacttttttagagacgttattagaatattagttccgtacttaanaaaaaaaaaanaana

SEQ ID NO: 27674 - DNA, 644 bp, Glycine max
  unsure (1)..(644): unsure at all n locations
  Clone ID: TF_LIB4164-021-Q1-K1-C4
gacccacngcgtccgctagtgagttttttttcccttcatcgtctttctcttgaaggtatatanttgaagttgttttgttatgtgtttgcccgagggagagagagacagagagagagccatggcactagaagcagtggtatttccacaatcacaagacccttttggtagtggttacggatcagtgaatactaaggacttctacaactacaccttgttggctgctacttatgaacaacaacacatcaacaaagaagaagaacaaggtggtgcttctatctctacttttcaaccagagactagtaattacccttatggagattggaccaccagttcctcctcatccatgttaccccacttgaataatgaacttcaagaaaccactactactactagtaacaccttagatagcttaaacactcgtcccaagaggcgcagagccaaaagcagaaagaacaaggaagagattgagaaccaaagaatgactcatattgttgtcgagcgcaatagaagaaagcagatgaatgagtatctttctgttcttcgctctctcatgccagactcttatatccaaaggggtgatcaagcttctataattggagggtgctgttaacttttgtgaaggagcttgagcagaaggtgcattt

SEQ ID NO: 27675 - DNA, 1013 bp, Glycine max
  Clone ID: TF_GmC234612_1
cggctgcgagaagacgacagaaggggactcacacactttctatagctaccctcaatctatagctagctagcaatattctctcaatatgatgcatcgtcagattgagatggagaattctgagctcttccaattcctcacaaacaccaacgatagctttcttcaacactgcatcatatggcctccctgcggcacctgcagcatcaaccatgcagcacagcttctctggctccttttcttattaccctttggaagcatctcatgatcatcatgccccttctcatgaagacaaagcccttgctgctttgaggaaccacaaagaggctgagaagagaagaagggaaagaatcaactcccacctcgataagcttcgcacccttcttccttgcaattccaaggtatatatatgatatttcattttgtagttcaatctatgcatactctatcaatcttctcattcgtatgtatttgcatcatcttcgttttaaattaaacttattttaaagaaaaaaagttatttactgtttagagaattaaaagaacagttgctaagaaacagtgggtgtgaaagggtagtaacttgtaaaatctttctcgctttttgttcgcaaaggttgcatactttttgacccaccaaagctaaatgggtgcaccagttgactacagtgtaaaagctaactagtgtgtaacagttaacaactggcaatttattaaacttgatagtttaggagaccgagagttgcatgaatccaacttatagacacgtaataagaattcatctcatataaaaattgataataaaatatttataaataatatatcaattaaatattttaatattataataaagtaaaataataaattataaatttcataatacttaaataataaatttaataatatattactgttagataataatttataaataattatagtagtgaaagaacatttcaatcaagagtttgatgctatacaatgatttaatgttattaaaggtgataatattttgattc

SEQ ID NO: 27676 - DNA, 1758 bp, Glycine max
  Clone ID: TF_GmC6699_1
cccacgcgtccgctctctataaccggcctcctaattaaactcacttgttggtggaaaattaattaaagtacttcttcattcaatggatcagcttggaatcattcaaccatcttcttcaaccaaggttgaaagaaggctagtggagaaaaacagaagaaatcaaatgaagaacctgtacaacaaactcaactctcttctccctagctataaccccaaggaagcattaccactgcctgaccaagtggatgaggcaatcaactacatcaagagtttggaggcaaaggtgaagatggcacaggagaagaaagagaatttgcagggaattagaaagagatcccgtggttgcttctccaataatagtgccaattttgctgcaacttctggtttcccaaaatcgccacaacttgagattcacgaagtgggttcttctctacaagttgttctgacttgtgggctagaccaccagttcattttctatgaaatcattcaaatactgcatgaagagaacattgaggtcagaagtgtcaattcctcgctcgctggagactcagtgcttcatgttgtgcatgctgagattcctcagtcttttcttcaatttggagctaccaaagtaagtgagagattaaaaaggtttgtgaatgggtcctgcagtgatgtggaaacacagcccgagttgtgggattttgaaattggtactgatgatatgtggggtttctagatcttacaaggatgcatttaccaaaagttttgtaaaataagaaaaaaaaatgttagctataatactacaacaagctttaagagtactgtatcaaacatattttgcccatgttccaacaggttttgacgggaattaactaacgagatggtttatcttttgtttgtttgtttgttatgatttgtaactttcaacattaattcagaaaacaaagttctcctcttcacattaaatattgatacctaacataattaagaggtggacggtggtcagtttcattgactgtcttataagtatctactatcctaaatcaggttcccaaaaccataggcacatgcatattaattatatgtctggatcatgaattgcactcattctaatgacaaatttcataagcttcttctaaaactctctcaatatgaggttctatttgatgtcaacaagcaaataaaatattgatggaaaagacagtagtgaaccgaatgaagatgttggctaggatttaataagtagatgggagcacataaatatgttaattgcttcgctgtggattagacagttcacagaagaagattcaatagaaccttgctgagtttcttttccaattcccttgtactactgtccgccattggttttcaatgctcaagggctacacatcttgattcatttcactaatttttggcctttgctaaaacttaacataatataaccaagcatcatataactagctaaatttaattataagaaatttaattaactcatgcggaagaagtctttttctgttcgtatatagggtttttgtttagcagacctttctttgcaaaaaacaataggaaaatcaggtaagttgttctaatctttctcaacatatatatacttggtttggcgtaatgcaagctggaccaactcttatgtttttatgagcataaactaaaattgtaaatgcttttttcctcagtgtgttgtgtatctagggttctgtaatggttaaagaaaattttgttaatttatatattaataaaaaaattggagctgacacttct

SEQ ID NO: 27677 - DNA, 488 bp, Glycine max
  Clone ID: TF_17518532
cttaatcatatctaaaaatgggtcaacaacaacagggaagtcaaccttctccaaccaaagtcgaaagaaagattgtagagaaaaacaggagaagccagatgaagaacctctattccgaactcaactctcttctccctacccgtaatcccaaggaagcgatgtcactgcctgatcaaatagatgaagcaatcaactatatcaaaagcctagagacaaaagtgaagctggagcaggagaagaaagaaaggttaaaggaaaggaagagaactcgtggtggctgttcgagttcttctgaagcacaaggaagcctgaaatcgccaaatatccagattcacgaaacgggaaatttgcttgaagtcattctaacatgtggggtcgatagccagttcatgttctgtgaaattattcgaattttgcatgaagagaacgtcgaggtcatcaatgccaattcttcaatggtcggagatttagtgattcatgttgtgcac

SEQ ID NO: 27678 - DNA, 620 bp, Glycine max
  Clone ID: TF_GmC2279_10
aagctaagtcgaccaatctccctttttttccgttattgttgcttctcgtgtgaacacgtacactttgcatgacaatctgaaagtgtctgaacttgcttttgaaggtctttgatgtaatccacagccaagtccaacatatcagctgtgttagtttgcttgtccatgtttgggacaagatcctgaagtttccgaactagtagttttttttttttttttttgacaaacgccatgagtatgaactacaataagttccttacacaatatagtcttcgaacaaatggaaaatattaaaaactcaaaacattgtttttgcctcaagaaaataaaacactaattaattggataaattgaacctaggcagagcatacacctcagaatccaagcttggtgcgacgccagtgacggcgcttcgcgttgtacctgatggtgttatcggtcctcatgcggatccagtagggaatgggcctgttctgcctcatcttcttcgccaacttcttcttgattctgaatgtcttgtgcgacggcattttcgattcgtcttctggaggctcgactgcgcaccggtcagcgaaaaccctaataaccaaaccctccccttctgtcgtcttctcgcagccgta

SEQ ID NO: 27679 - DNA, 1651 bp, Glycine max
  Clone ID: TF_GmC60110_1
tcccggggctttctcccaacgcgaacaaagtggtgtctcccttgagagctacacttgcacttttccacttgaaaaaaaatttcaactttttccaacaagtgacaataaaaacaatggccctagaggccgtggttttcccacaagatccattcacttacggttgcaacaacaaagacttcttgtactcgttagtaggaggtgatggtggtggtggaggaggaagccacgagtacggtttccaagcatcatcagaagacaaaccccatgtgggaatcattatcaacaacaacaacatagaccacaccctgcatgcaaattgggattcatcttctccttcggtgttgcaaagtgtcaaagaacaatgggattcacactcctcccctgaagcttgcactgttgatcaatccctccccagagccttccctcttcctccttcttcttcatcccccgaagccgcttcctccgccaccggccgccgcaaacgacgtcgtaccaagagcgccaagaacaagaaggagatcgagaaccataggatgacccacattgcagttgagtgcaatagaaggacgcgaatcaacgagtaccttgccgtgcctagatccttaatgcctccttcttaagtacaaaggggtgatcaagcctctattattggtggcaccagtaacttcgtgaaggagctggagcagcttctgcagtgcatgaagggccagaagaagagaacaaaggagggtagtggcttctctgactcttcacccttttctgagttcttcatgttcccccagtactcgacacgtgccacacagagcagcagcagcagcagcagcaaaggctaccctggcacgtgcgaggccaataacaacatggcacggaacccttcatcatgggccgtggcggacatagaagtgaccttggtggatggccatgccaacatgaagatactctgcaagaaacgaccagggatgcttttgaagatggttgttggtcttttaagtcttggtctcagcattctccaccttaatgttaccactgttgacgatatggtccttacctcagttagtgttaaggtagaggaagggtgtcagctgaacacggtggatgaaattgcagctgctgtgcatcaattatcacgcacggttcaggaggaagctgtgttcagctgatcattaaactttgaaatactaaaaggctaggtattgcaccatcttttatcaataattgtgcaaaacagctttgatacccttgttgaaatgcgttcaagtttgtagggtgtggcccgtgaaggcatatagaacaacaagggataggcatgtacatgcatcagtgatctcaaacgagatatataaatgttccatttcaataagctaggagatgccaattaaagtatataggtttactcttttctcattttatattttttttcctcttttatgcttttcctcaatttataacccgagagggaaaaaaggtgtgttggaagcgacaaccaatttatgttgtggaggcccccccttactgaactgtgtatccacttgtgaattattagcgttattttccaaagcatggagctttgttaatttctttggaaaaactgtggacctcttacaattattttctcctgtagaaagatttctatacattaaacaatttcatc

SEQ ID NO: 27680 - DNA, 2447 bp, Glycine max
  Clone ID: TF_GmC1214_1
ttttaaattaaatattaatagcctaatagccacagcaacaacaaggcacttgatataactttcttgaactactaatagcctaatagcgagtattggtatttaactagactgcatgtgatttcatgaataggattagataatgcttctaaaaaaacttataataaacatgagaatgtatattcccttgacaataaaattaaaaaaaaatcctaaacgatttttttttatttctacactgcaacgtgctctcttgcctactgcagcttattcaaatctgtctcattttgtctaccaaatcacactctcaattacactaacacacactgaacttgagagttattttgctcacattcgattctatatatttatagccatagattcccattttggcagccactctttctctctaccctccaacgtgctctccttcccatcacacccacaatatcaaactaaccaattcaaagttcacacacacacacagcttggagaagaaaatcgagaattttccgagaaaatccgaagaaggcggggcataggtttccccggaaaacagtaccttggcatgctcgaatacccgttgatcgactacgttattcatgtacgctacttcccctttttcggtacccgcatccgcggttctctcgatccccacccgccgtcaatgggagcctcgaaattcattcgtagcttcgggattccgatggccccgcagttaaagcattcgatagaccgcgttgacgctaggatctatctgcctctcttccaaactccactgcataaaaaacagttctcgatttttctctccccaaatcacactttcaattacagtaacaccacactcagcttggaaggattttccccaaaaataccaagagctcgcgccatggtttccccggaaaacagcaattggctgttcgattacccgttgatcgacgagcgacgttattcccgtcggcgactcctcctttgcagtctccgcatggagcttctcctggcccccacctcccaccaatgtcagtgtctaaattaatgcttcgtcttggggattctgatggcctaaaaaatcctgctttgaagaaaaggactaaatctgattcaagtactgcttctagctccaaagcgtgtcgggaagatagttgaggagggataggcttaatgacaagtttgttgaattgggctccatcttggagcccggaaggcctcccaaaacagacaaggcttccattctgattgatgctgcccgaatggtgacacagctgcgggatgaagccctgaagttgaaagactcaaatacgagtcttcaagagaagattaaagagttaaaggctgagaagaatgaacttcgtgatgagaaacagaggcttaaggcagagaaagagaagttggaggtgcaggtaaaatcaatgaatgctcaacctgctttcttgccaccccctcctgcaatccctgctgcatttgctccacaaggccaagcccctggcaacaagttggtgcctttcatcagctatccgggagttgccatgtggcaatttatgcctccggccgccgtggatacctcacaggatcatgtactccgtccaccggttgcctaagttggcattgtacaattatttgggcttccattttggctcaaaagttgtaatcattttcctatagctttttagttattatcttctaagtgttccaagtaactggattcagtggtggctttgactgtatttggcatctgatactattatgaagtaatggctggtatttgcatgtaaatgttaataagcatgtctggctgtcttcacagcggctttgatggttgttactgtttttgatataacccaaaggcagaaccaaaataatgacaataataataaaaggtcaagcacagcgacttgttattttcgtgaaccaaagtcaatatacttcccttttgtgttgcaaagggtagctgaaagaagagagatgaagtgaaagatcttcgagtttgaaagagccattgtgggtaagaaaaaagagaaagagaataataatgtgtgtgcttaaactcacagatcgcctcgctaattgcgttttcccttttctcgctttcgttctcgcactctctgatttcgcctctttttgcttattattgatgattagggtttcttaatcggtgtttgattgtgttggttttgtgaatgtttggttttagggttttgtgtttcggaagttctgtgccgtacagaattttgtggtcttggaagaaatgtgatttttttaaaataaaaaaatttgggatttcttagtcaccggtggttgttggtttggtttttgttttttgaatgttacgtggctgaatttggtatttttgtgtgtaaatgtctggtcagaattaatgctggtgcctcaggacattcttgcacgtgcgagtcttaattgcttctgcagatttcacattgcttaattttctg

SEQ ID NO: 27681 - DNA, 1031 bp, Glycine max
  Clone ID: TF_GmC1094_1
tttacttcatcacaagcccaatatcaaacggcaaaatttgaagagaaacccaactgccccaatactctattaaacaagctcaagagagaagaatcaccagacgcagcgaagaaaaattctcctgagcctgcattcaagaggcaaagaattgagactccatctccattaccaacttttaaggttaggaaagaaaagctgggggaccgcatcactgctcttcagcaattggtttcacctttcggaaagacggatacagcatccgttcttcacgaagccatcgagtacatcaagttcctccatgaccaagtcagtgttttgagcactccatatatgaaaaacaacggagctcccattcaacaccagcaggattgtgataatctgaaggactcagaaggggcaaaacaagatttgagaagccgagggctgtgtttggtgccgatttcaagcacattcccagtggctaatgagaccagtgttgatttctggacgtctacatttggaggcgcactcattggcaggtagagacaagtggagaactcgtgacaataataactatatatttataaataaactaaaaggaagaagaagaagaagaaaacacgattatgctaaagagaaaattaaagctgaagagaacaaaagagcaaaaaagaaaaaggaagctactcttcaaagaggacacgtaaagcagaatgatgtacactagtaaatgattagtgactactggaagagatcgaataatagattaattagctataggtgctttaagaagttttagtgtttttattattaacatcgatgaggggcaggaacaagtgctaaattcagaggcatttgacatattagattagagtttttgttgctgctgtggttagagagtcagtattatatgcctgaatttagcagatggggctagctagctaacacgccttttgttcctgctataatcgatgtattattgtagtatatattttgaatcattaaaggggttttacaccaactttaattttttttattatttatatgaaaaa

SEQ ID NO: 27682 - DNA, 507 bp, Glycine max
  Clone ID: TF_GmC1094_2
gaattgagactccatctccattaccaacttttaaggttaggaaagaaaagctgggggaccgcatcactgctcttcagcaattggtttcacctttcggaaagacggacacggcatccgttcttcacgaagccatcgagtacatcaagttccttcatgaccaagtcagtgtattgaggactccatatatgaaaaacaatggagctcccattcaacaccagcaggattgtgataatctgaaggactcagaagggccaaagcaagatttgagaagccgagggctgtgtttggtgccggtttcaagcacattcccggtcgctaatgagaccattgttgacttctggacgcctacatttggaggcgcactcattggcaagtagagacaagtggagaactcgtgaccataataactatatatttatatatatatgtgtaaactaaaaggaagaagaagaagaaggcacgattggcaaagagaaaattaaattaaagctgaagagaacaaaagag

SEQ ID NO: 27683 - DNA, 2364 bp, Glycine max
  Clone ID: TF_GmC5663_1
cacgcgtccggggcacggagtggaggacgcgtgactctgtctagaggaacttcacgtatttgtaagcttcttccagaagcatcgcttggtccgttttcttgtcccacggcatcagcttctggagacaccgtgttttctggcttagcttctgacgacgttggcgagccaggttgctctgcgggatcaccggaggtcattacgactccacgcgctgccacttctgctccggcgagtagaggggagggaggcggaggtgtatctcattaagggtatttttgactttcagaaagaaatgacaggtgcaagatacactataggtagtgtaggattcaaaacctcaagtttgaaggatccaaatccacccactataaaggttacttctcacccacccaattacattaattttataactaactaccaaaagattcattatgctcataataattatttttataatccataatttttgtccaaaatcacaattattctgacaagagattccaaagtttattgttaattttttttctttagattccttatattagactagtcaacctcagattaaaaattaaactcctaacaccacgagcatgattcctagtattagttaaatggcctggtacaacacattctttatagatggatgtgtgccatcccacctgctatttggtgttagataacaactcatggtctcacactagcttttccttatgtttatttttattatattacttttacttcaaggtgcaaccaagtgaagccaccctcctatgaaatgccttcaaacgaaaaagctaagcagtcagtttggcagtaccaatcataataggctcaaatagttgcaacattttccttaacaaaaatgtggtacccttaaagcatctaagtttagtttatattacattaatttcacaatccctccacttcattctggtgcctccaacttgtcattcaattccaccctgaagattgtgcttcaggtggttcaaagaagatgggctcactagaaagatcaaagaagaaagtccttctatggaagaaggccatgctccatttttctctatgttttgtgatgggggttttcacaggcttggctccaacaggtaaatcttctctcttttccaccacagttggtgtctcaaataggacagaatttgcaccacaacctagtgaaatgttacacctcacaacaaatgtcaatagaatttggatagctccaatgccagataccatgcccgtgaagcctagaatccttgaaaatgaaaagaaaaaaacaacaaaaagttgcatgcaaaaaaacagccccagttgaagcctagaagactcataatcattgtaacaccaacaagcacaaaactaccccaccaagcagtgtttttgagaaggttggcaaatactataaagctggttcctcaaccattgctgtggattgttgtggaagctaaaaccaattccaaagaactgccagagatactaaggaaaactggcatcatgtataggcatgtggttttcaaggaaaatttcacggaattagaagctgaactcaatcaccagaggaatcttgcgcttaagcacattgagcaccacaggctcaatggcattgtacactttgctggcctttccaatgtttatgatctccaattcttccatcagcttagagatattgaggtctttggaacatggccaacagctttgttagctgcacacaggaagaaagtgaaaatcgaaggacctgtatgtgattcatcacaagtcattggttggcatcttaagaatatgaacaatgaaactgatactatcactcccccaattcatatttcaagttttgcttttaatagctccatcctttgggactctgagagatggggtcgcacttcctctgttcaagacacttctcagaattcgatcaagttcgtgaaacaagtagttctagaggatgaggctaaattaaagggaattccaccagaggattgctccaaaatcttgctctggcgtttcaattttcgtgccagaactcattaatttctagattttagtccaaggcaaaggggaaagacataaaataacgagtgatgaagcaatatagaaattggcagtacagaaattactttcctactactatatagaatttattcattttttttttctctttttcaaatttatcctatgtttaattgtttatagttttattggttcttcctgttttcaaatttttgttagcttatgtaagtgagagggtcttctgctaagaagcaaaaacatttaaagcataaatgaactttttcgaaaaaaaaaagggcgggaacttcccgaggtgtagggcattttttttttttaatttggagaacctaaattgttgtaaaa

SEQ ID NO: 27684 - DNA, 477 bp, Glycine max
  Clone ID: TF_LIB4164-013-Q1-N1-E8
gaagatggacaaactctacttgcatctacatatctttcattattaattattaaacagaagctcaaactctaacatagaaggaaaaaaatcaagcaaaacatttaaaaatgacagtatgacttttttgacagctctacaagaagcaccaatgatttgataataacattttacgttccatcaaattaaacaaaccataatatattcaattgaagcttcaatcctcagtgataaccaacatactacaatgttaaaaactttccaaagtgtaccaaagcataaacgagaaattaagcaaaggtcaaccttattgcaatttggtataagttcctgtaacgcacgcatcttctcattgatccggtctcttcgtctcctttcagatagattatgcacttcggctgaacggcttttcttggctccatttcgtcgtgcaggaacttccttgttgacaccaactgattctttctcaacatcctaaaa

SEQ ID NO: 27685 - DNA, 2098 bp, Glycine max
  Clone ID: TF_GmC298_1
catgacgaagaagatgtcgaagtcgcggaatgagcatccagttaaatcacgtcgtgtccttcccacgcgtcggagtaggttggttctaactattccccatctcgagattacattacacttctcttcatctggggaaacaaatggctaggtctgcgaaagggcatcaagatgaattcgacgacgatgatgaagaagaactcttaactgctaataacacctctttcaaagtgaaggtggatgaacccagcacggggaagagggtgaacccacagcgttcaaagcattcagaaaccgagcaacgtagaaggagcaagattaacgaaaggcaagctttaaagaaaagaagaagaaaaaattctttttgttgagttaattgtttgtgtgtaggttttgagtggaagtttgatgtaattctatattatttggcaatatatgctcgcttgaaaaaattgtgtttttgagccaggtttcaggttctgagagatctgatacctcaaaatgatcaaaaaagagataaggcatccttcttgttggaggtcattgagtatattcagttcctacaggaaaaattacaaatttatgaacagacttatgaaggatggaatcaggagcccacgaaattaactccatgggtaaagttatttggaatggtgcaatgcgaacattttttgtatctgtatactctggaccttgatttatgaaatgttaggcaatgcattatgcatggcaatgcaagtgtgcactatagcagctttcccgactgatagtggtgccacctcaacattgttagacttgtgattttctgattgtataaggattcattttgtatagactgcaaaagaaagagcatcaactaggaagccttattcccactaagtagggtcaccaacatggatttgggaacaccgatgtacttggtcatgtgccatgtactcatgatgccaactgcaaaaaattctcataaagagtttaagttcctttcatgtttaggatttcactactttatgctgtttctttgaattcatgtctgcttgttttctttttttatttatttacaatgtccttttcttccagagctagtagcccagtatgcatatttgaatgagttcaggatggcattgtggcaacttcagtgatctatttgtcacaatggttggttgtgacttagtgtcttgaaattgtaacaatggctttttatctgaagtttattgttctcatctgtttttttttcagagaaataatcacgggcctgcagaaaatactacagatccttctcaagctactcaaaatgggtctgttgatgagaaaaataacaatgtctctccattgttgcccaaaaatgtacagaacccgatagagtctgacttctcaatgacaactattcagaagggcaacatccctggttcaactacagaagcagttcccctgcccatgcaaatgcgattggacatgtttgatccagttgttagcagtagtatggcaacccaacatctgctggaacctgtatctaatgttaacatgctttcccatacccagcctcaattgtggcttgataaacgaaacaagggcaactatattcttccacataatgatacaatgaaggaacaggaggagctggtgaatgaaagtgggtcagatagcatctcaagtgcctattctcagggaattttagattctctcacacaagcactgcactcttcaggcgtagatatgtcccagactaatgtctcagtgcaaattgatgttggtagacaagaaaatgctgggctgatcccctctgcatctacttcaaagggtcatgaaaaccaatctgtgagcaatccagcaatagcacgttccggagttgattactgcaatattgattctgaacaaagttcaaagaggctcagacaagaagcaagctagagattcctctcatgttcattttgtcaggagtttctttttttgctgtttgtcttcagatgagagtaagaggaattgggtggatcggttcatttttgccatgctggttagggccagatcaaatgtaaattttcacgattctggttttgggactaagacattctgaaataaaatgttatatatgcttgcttcaaaa

SEQ ID NO: 27686 - DNA, 411 bp, Glycine max
  Clone ID: TF_LIB3167-024-P1-K1-G12
caagatcgagtttcaatattcgaccccttaatttcatcttttattctctctctatgggtctcttgctttctttgtaaccccacctctgatccattctttcttcctcacacttgtttaatttgcacaaatatattctactccgaataaaccacctcataatggaggagtcaggggaaaattggccttccgattcttatttagatgacttcgtcaacgatgatttaggttttgatgatgaagaatttggtagtgaagatgattcattttctgggatgggcgagaccgacagaaagaagagacagcgagaactcacagagaggttccttgcactttcagccaccataccaggcttcaaaaagacggacaagacttccatcctggccaatgctagcagctatgtgaaacaacttt

SEQ ID NO: 27687 - DNA, 756 bp, Glycine max
  Clone ID: TF_GmC582_1
ggaaaagattagtgaaaggatgaaaattcttcaggatttggtccctggttgtaataaggttattgggaaagcattggtccttgatgagataattaattatattcaatctcttcagcgccaagttgagtttttgtcaatgaagcttgaagcagtgaattcaagacttaactctggtattgaagcgtttcctcctaaagattttggtcagcaagcatttgatcctgctggcataccattcggttcgcaagctccaagagagtatagcagaggttcttcaccagactggttacatatgcagataggaggtagttttgaaagaacaacgtagtctacgagatcccttggtaataaatacataaaccagtggtattccattcttcagtagcacccagaaaacatcaatggtatactcggggaagcaagtacaatgggcacctcattcccattttctacactaggcatggagctgtcactgtttttcacaggactgcttcagtttctatttaagcatctccatatgttggtgtgttggaaaatgaattcatttactcaatatatgtagtatagtggacttttaggctttgtattctgctactcaacataacccttaaaatgatcattcttcttgtaaaagaatgctgcttcatcttaatacatgatgcttacagattgtgtaatactctcaatattggggtttgtgaaacaatgttgaataaattaacctcatagtactgtacaattctgtttttggttttt

SEQ ID NO: 27688 - DNA, 437 bp, Glycine max
  Clone ID: TF_LIB3242-176-Q1-J1-D9
aatttgtgttgtgtgtgcatatggaaagttactactattctggctggcctctggctcaattcaactctgcaccaaacagtgatcaattatctcctttttcagtcccaacaacaacacaacaaacactccctcttgttgctacttcaacttctgaccctgcagctgcagcctctcttcaatttggtgagttcccttcgtggcctgcccccattgcagcagaagatagagctgcaagtgcttccaagagccacagccaagcagagaaaaggcgcagggacaggataatgcacagcttgcaactctcagaaaactcattcccatgtctgataagatggacaaagcaacattactagggagtgtggtagaccatgtgaaagatctaaagcgaaaagccatggatgtcagcaaagccattactgttccaactgaaactgatg

SEQ ID NO: 27689 - DNA, 673 bp, Glycine max
  Clone ID: TF_GmC819708_1
gatagactctacatgctgagatccgttgttcccaatattagcaaaatggacagggcttcaatccttggggatgcaatcgagtatttgaaggaacttctgcaaaggatcagtgagcttcacaatgaattggagtcaacaccagcaggtggctcttcaagctttcttcatcatcctttgacacccactactctaccagcccgtatgcaagaagaactttgtctcagctcgttgccaagccccgagggccatcctgctaatgctagggttgaggttgggttgcgcgaaggaagaggtgtaaacatccacatgttttgcgaccggaaacccggactcttgctctctaccatgacggctctcgacaaccttggactagacattcagcaggcagttatcagctatgtcaatggatttgctatggatattttcagagctgagcaacgcaacgaaggtcaggatgtccatccggaacaaatcaaagcggttttgttggattcagctgctggcttccatagcatgtcctaattgcaaaaaacaaactactactgaaaataccttttcaattagtcaatttagcaatcttaatgtttttaacgctcaaaattcaactgtactatatacaggctcttttaacttctgctcagttgaattaggagaaaatttattttaccaatta

SEQ ID NO: 27690 - DNA, 1058 bp, Glycine max
  Clone ID: TF_GmC710842_1
gcttatggcttacctaaaacaatttatttatttaacaactttcaaacagcatcttacacaaaggctttgctttcttcatatgtcatgaactacttatcccagaaccccaaagttgttattattcacgggaagagaattcgtgactgaagaaccttttgactaccaaggtacaatatggtagaaagagtccactaattctgtctatggtcaaaagagtaaagttgctatctgtgactgtgaatgctcccaagacatgtacaaacccagattctgattcacatgattagtacaaactttccctaacaagtgaaaaggctatttgctaatgccactcactcactccctcttcatattcagatatatgccatgcatatggattatggagatttaaattacatatttaagaagaaaagttctcaaaagaaatctcctatagatgaagaactgaatatagaaatcctccttctcttcctgctttctaacatgtcctgtgaaacagaaaatctatctaacactgatcttagagcttgatgaacagaccctgccagaaactggcggtactcgggatcttcaatattttgttctttgcagctaattatcacaaacacactattcatccttcctcccaaggttgcaatctcagcccttattatcataagatgaagtgcatcaagtgcttgtcttatatcggccaataacccgggtttgtattcacaacatagtgatgccttgattgagtaagggaaaccattcaatccaccctcctgttcttcaactcttatttcatcactgtccttcggtatcattaggccttcactagcttgtgtcgcattcgttttcagctctttcaaatgtctaataacctcacccagcaaggttgctttgtccaacttcttagcaccaggaatgacagagcgaagtgtatcaagatgtgcattaattcttgctctccttctcctctctgcctcactatggttcttcaaggcttcaatgcttctctcaggagacacacccttgcgttccaatttgacaggggcctctacaagctctcccttctc

SEQ ID NO: 27691 - DNA, 1313 bp, Glycine max
  Clone ID: TF_GmC2302_1
gaaagttagtactagtaattgtgtagttgggatttggcgaagctcggttcagggtggaaaaggatcacaatgacggtttgcgctgtgcgcctttccctcacccacactccctcctaattgccatttaataaatccacctcactccttcatccaatgaatgattcctgactccacattctcccccgcttactctctcgccgagatttggcccggaatgccccatttcccccctcccttcccccacccctcctccgccgatcactccaccctcaccgacctcaccgccaccccccgcaagacaaaggactgctcctcctcctcctcctccgcctccaccgccgccgccgacgaggacgactgctccaaggtcctctcctccaccaccaccgccactgccaacctctccaataatgattctggtagcaataaacagatgaagttaggagggtccagtgttgaaaacgatggtttcaaagctgaggcagaagcgagttctgcgggtggtaacaagtcaagtgagcaaagcaataaaccttgtgaggcacctaagcaagactatattcatgtgagagcaagaaggggccaagcaaccgatagccacagtctggcagagagagcaagaagagaaaagatcagtgagaggatgaaaattcttcaggatttggtgccagggtgtaacaaggtaattggtaaagcacttgttctagatgagataatcaattacatccagtcactgcagcgtcaggttgagttcctttcaatgaagcttgaagcagttaattcaagaatgaacatgaaccctactattgatgggtttccttcaaaagatgttggtactcagccatttgacattgctggaatggtatttggatcacaagcagcaagggggtatgctcagggatcatcacctcctggatggctgcatatgcagataggaggtggtttcgagagaacaacataattcagagaagcctcattgggaatgacagatgaatcgataggattgattttctattaaaaaaacaaaaaaatagtgggttgattacagtgtgcttttttaacaacctagtcaactgttgtcgaatgttgtaggtttgcatttcccattgttatagtatgaaattatttatagaaagtgcatcttaatcgcatgtgcttcattgtattagcaattagcaagtagaaaacaatcttagtgtggttttcgtttttaatcctgttgtgataggactcctgcctcctgatttgatttgtataactatatatattgcaggtatgcaattgtgtattttgagtgatgatagtttctgaca

SEQ ID NO: 27692 - DNA, 1154 bp, Glycine max
  Clone ID: TF_GmC1355_1
ggttttccccccgagggaagacgcgagagaaggagaaggacgaggaggttgaggatttgagtttcgatggctccgggttgaactatgattctgatgacttgactgagagcaattataataatgtttctgagggtaatactgggaagaatggtggggttagttccaacgcgaacagcaccgtcatcaccggtttggatcaaaaagggaagaagaagggaatgcctgctaagaatttgatggccgaacgacgccgtaggaagaagctcaatgatagactctacatgttgaggtccgttgttcccaagattagcaaaatggacagggcttcaattcttggggatgcaattgagtatctgaaggagcttctgcaaaggatcaatgatctgcataacgagttggaatcgacaccagtgggttcttcactcactcctgtctcaagtttccatcctttgacgcctactcctcctacgctgccaagccgaatcaaggaagaactgtgccccagctcattgcccagccccaatggccaacctgctagggttgaggttcggctgcgcgaaggaagggctgttaacatccacatgttttgtgcccgcaagcctagtctgttgctctcaaccatgagggctttggataaccttggattagacattcagcaggctgttatcagctgcttcaatggatttgctatggatatttttcgagccgagcaatgcaaagaaggtcaggatgtccatccggagcaaatcaaagcagtactcttggattcagctggctacaatggcatgatgtaactagttttgacaagaaacaaactggtagctgctatttcacagtcaatttggcaagttaaatcagaatcagtttttactttgttatgttcacaattcaagtgtacgatactagctctggtaacttgagttaaagttgaggtagaagaaattttcacatgaattttaccccctgcagcggcagttactatttggtacctttcacttgctcatgtcgaaccgaatcttgatgctactacttcgagttcaattagttcagggacatttctgaaggcgcgttttgacgtgaagtttgtatttatgtttgtcgaacctattgtcctctttatacagttttcgccaaggacaaaactttaaagcaaa

SEQ ID NO: 27693 - DNA, 1804 bp, Glycine max
  Clone ID: TF_GmC1598_1
gaccgagtggaagtgaagtggtggaatagcctagaatagcaaaagaaagtgttgctgctaattccattatttcagtgacccctaattatgatggaggaattgaacaaaccaatggacggatcagcaaccagctggttatccgatttggaaatggatgattacaatttatttccagatgaatgtcccttgaacttgaacatgtttgatgaccgagagtttctctcacaagacattgctagtgcctttcaagaacagacacagaccttgcaacagcaatctttgtcttcagagtgcccttcaaaaactgtgagcaactcatccaccgatgaaaccacctttgactttgagagaccatccaagttgctgaaaacgacaacaagcactagttctaactttgactcatccaccatcaccaaaaccctttcccccaaactttccccatcatcttcctttcaatctcagattctctcttttgacaacaccaacacgccattcttatgagtcaaactttccccatcgtcatctttttcctcatttcagtctcagattctctcctttgacaatcctaacccaacctcatcttccaacaccaccacccagttttatgggtttgactgtaccttaaacccaacacagaacgagatggtgtcagtgtcagtccccaacatgagaaaaccacggttcccaactcaaaccgcaaaaggttcaccgaaaaatcaaaactttgaaacaaaaacctcacatggtaagaggtctccagctcatgctcaagatcacatcatggctgaaagaaaacgaagagagaaactcagccagagcttcattgcccttgcagctcttgttcctggcctaaagaagatggacaaggcttctgtgttaggggacgctatcaaatatgtgaaagagcttaaagagcggttaacagtgcttgaagagcagagcaaaaaatcaagggcagagtcagtagtggttctgaacaagccagacctctctggcgatgatgattcttcttcatgtgatgagagcattggtgctgatagtgtcagtgactcactgtttgaagtggaatcaagagtatcagggaaggagatgctgctcaggatccactgccagaagcaaaagggtcttttggtcaaattactggccgagattcaaagccatcacttatttgttgctaatagcagtgtattaccctttggtgattctatccttgacattaccatagtggctcagatgggagaaagttacaatttgaccactaaggaacttgtcaagaacctacgcgtggctgcattgaagatattgtcataacatgaacgtggcttgagtatggaggataccctcatgacatatgatatggattggaactctgaatcacatttaatgcgccagccaccgagtaaatcacaaccaaaatggaagccttgttattaatgtgtgatttccgctacaacctgcagtgttccccaatatgtagattcagcttgatcccaagtgatcttgtctttttcgtgttatgttttggtttctcaggccttcagtgtgtgcctgctcgagggaaaaataattgaataattttgtaaagatgttaggaataatttcaatctgacacggcttaattaacatgagcttaaatagagattagaagctggataatggtgacattgacagtttttgatgtaccatttgttcttttgaacatgtttgaaggatgcaaatctctctaatttctggttatgcttccactttaattataatattggcccccagcatttatgtaaatcacctactactataatgggct

SEQ ID NO: 27694 - DNA, 1786 bp, Glycine max
  Clone ID: TF_GmC19_1
cacacacaagacagccaaattgaactgagagagaaagaaaacagagagagagaaaacagagagagagaaaaaagaaaacattgaccgccattaaaacccacttcccttttttatatcactcccaaacacattcctctcatttccttttccattttcctttctctttgtctttctctcacaattcatcactttagcattgcaacactgaaaggaaaagaatactctttaagaacttaaaaaacaaccaattctagtttgtgtttcgttttctctacagttcctacagtccggttcggtttggttcaattggatcatggagcaaaccactctcgaagccattcagttcaacgaggaaatccaaggcctcatggctgctccggcgccggataccgtcaattacttcaaggcgttgctcgagcttccgtcgacgcaggccgtcgagctcctccactcgcctgagcgcgccagaaaaccgctgcgcctcaccccccctcccaacgccgccttaatcgaacgcgccgcgaagttctccgtgttcgccggcgagaactcgccgcctccgcccgacctcgcctgcccctcccccgccgcgcccggcgcccgcgccgcctgggtctccgtcttcgccggcccgaacgcgaccgcgaactcgaactcgccggaggtgaagcgcgagctgccggagaccgacgccaacccgagctccactcacggcggcggaggcgccggctccgtctccgatctcgccgtggagaaccagaatctgaaaactgcgaagaggaaggagcgagagaagaaggttaaagcgtcgtcgaagaagagcaagagcgtcgccgccgccgacgagatttccggcgacggcgagaagcttccgtacgttcacgttcgagttcgtcgaggtcaagccactgatagccatagcttagcagaaagggctaggagagagaagataaatgctcggatgaagcttttacaagagctggtcccgggttgcaacaagatatcgggaacggcattggttctggataaaatcatcaaccatgtgcaatctctacagaatgaagtggagatattatcaatgaaactggcagcagttaacccagtaattgatttcaacctcgacagcttactggctactgaaggagtgactccaatggactgtaacttccctccgacagttgcacctgtcatgtggccagaaatcccacagaacggaaacagacaacaatatcagcaaccatggccgtttgatgcactccaccaacccctttgggggagggaagaagacaacactaatttcatgactccagaaaactcactcttgagttatgactcatcggcaaattcagtatctctgcattcaaatcagttgaagatggagctctaaagggaaactacaaaggtggtggtaccagtagcaattagcctattagtgtatataacaaatatagtattagcaattagtcatgatttgagcagcctcaacattcagcaggttttccctaactctattttgtcagagtcagttggaaacctggattttattcagccagcaaggaagaagaattggtatgctatttttatttaatatattactatcactatgtatactaactatagtaatcattcaatctttcaagtgattgattgatttagattgtaaaatcattgaacgaactattactgaactatcattgaagtttgttgctttgttcattaaatgctacttagatggttggctctttttcaggattttcctaaaaaaagatattttaatataagaatt

SEQ ID NO: 27695 - DNA, 2787 bp, Glycine max
  Clone ID: TF_GmC414_1
atccacgcggaagcccatctgatcatataacacaacacactgcaggcttgttgtgttgtgctgtgttcattctgaaactttgatctatgtgagacaagttgtggctaccctgcaaagccagaaaaaatggtgccagagaacttgaagaaacaacttgctttggctgtgagaagcatccattggagctatgcaatcttctggactgattcaactacccaacccggggtgttgagctggggggaagggtattacaatggagacattaagactaggaaaacaagtcaaggagtagaactcaattctgaccaaatagggttgcagaggagtgaacagctgagagaactattcaaatccctcaaaactgtagaagtcacccctcaaaccaaaaggccttcagcagcagcactgtccccagaagatctcacagatgctgagtggtattacttggtttgcatgtccttcatattcaacattggccaagggttaccaggaagaactctagcaaagggtcaacccatttggctgaacaatgcccattcttctgattgtaaaatttttagccgttctcttctggcaaagagtgcatccattgagacggttgtgtgctttccgtttagggaaggggttattgagttaggtactactgaacaggtcccagaagatttgagtgtcattgaactgatcaaaacttctttcttgaatagtctgcatgccaatgttcccaataagtcagtagctacattgaaatcaaggaaccaggaaggtctttcttatgcagcatttgatcataatgactataatgttaaatcaattccagaagttgggtatgaaatagccaacacaacctctcctgatggtagttcaaatgcattccaagccaatcaaccgctagatgaaacatttatgattgaaagtataaccaatggcacttctcaagtccaaaactggcaagttattgatgatgaattgagtaactgtgtccataactccatgaattccagcgactgtatatcacaaacttttgcctgccctgagaatattgcttctgcccccaagtctaacaacccttctgatccttgtgcccgaaattttcaaaagtgcaacaacccaaaaatgaccttagtggatcctcgaagtgatgatttgcactatcagagagttctttctacccttataaaaagttctgaccagttacttatgggaatgcatttgcaaaaatttcctcaggaatcaagctttgttagttggaggaaagaacagccaatggattgcaaatggccaagagcaggaacgtcacaaaagttattgaagaaagtattgtttgaagttcctcaaatgcacttggatgggctgcatgagtctcaagaagagaatgactataaagagggaatgagagtagaggctgatgaaaacggcatgaaccatgttatgtcagaaaggaggaggagagcaaaactaaatgaaaggtttttaacccttaggtcaatggtcccttcaatcagtaaggatgacaaagtttcaatactagatgatgctattgattaccttaaaaagctcgagagaagggtaaaagagttggaagctcacagggtggtaacagacatagagactgggactagaagatcaccacaagatacggtggagaggacttctgatcattattttaggaaaaataataatggcaagaaaccagggatgaaaaagaggaaggcttgtggtgtagatgagacagaaaaagagattaattcagatgctttaaaaggaagttatgctaatgatgttactgtgagtaccagtgacaatgaaattgtgatcgaattgaagtgcccctcgaaagcaggaaggctgctagaaattatggaagcaatcaacagtttcaatatagattttagttcagttcagtcaacagaagctgatggaaatctttatctgaccattaaatctgtgctcacaggaccaagtgttgcaacaaccaaaagaatcaaacaagcactccaaaaattggcttccaagtgctgaatttttatctataccttaaaaaccgtggggggtgttgaatctaattcataccactgccgtgtgacatagagagtccattagaatgatggagtcacaactcactagtgcagctcttggagattttttttctttgaagatttctcataaaaggaaaatgtagactttcactcatctttcggcaataccataactcttggtgacgcaagatatatggactttgaatcacttgtaaatgggtaggtaggcttagttgactagatttatgtaattaatgccacttgctcctatgggaacactaaggttgaccaatgactaaatattgacagagagacgtacattattaattatgatagagctgcgcgtgacgttgaaattgaaaaaaaataaaaaaaacccagctgcacaaaaaaataaagggccttcgaaaaaaaaaatggtctccccagctggcggacccaggaaaaaatccaggtttatgtcggcgtgcataacattatataattctgctaggggaaatacactggccgtgactgacccgttggcactgcaaaaccctggtgacacccagcttattcccttccaattgccttagccttaaagcagtttgccgaaaagcgattaactaacgattgcgcccccttcctaaaatttgcgcaccatgtttgcaaaatgaaactccccttgaagcggcccattaaccccgcagggggcccgggtcacgtgaaacgtgcccacggccctcgccattgccttaccccccccctatta

SEQ ID NO: 27696 - DNA, 1196 bp, Glycine max
  Clone ID: TF_GmC371374_1
ttttcttataaataatcaccatccatattttaccgctataatatctagcagtaaaaaaatgatagtacaactgcaaataatagggagcagaacatgaatctgaatccagtccaagactaaacagaaaggatcttctacgtttagactgtataaagaactgcacttgccaacacaaataatctctaaaatagtatgaactttttaaagtggggtaaaaagtgctgggcaaaagaaaggggacagaaatactgcgagggtggaaataatttacatgttagtttgtttgttactgagaactgctaaaaagttagttctcgcgtattacatccgcttttacctcgatgcccgagaccgcttaaaacccccggctgtggcagctccggggggtctgcaagctacaagttagttacccgcatcatgtgaattgtccgggctagattgtagtagcctccaatcacgctttgcctgactgatgcttttctggattctcttgacctctactagtactaggcttgctgacatttggttggttcattgtctgcttccactgttgctgtgcctcttcgtgactgtgggcctcttgataaggatcagtgaagtttgggatacatgattgatctggatctagtgtaccaagtgagttaagcatattattatctgggtgatttgctccttgcattctggatgaatcaggtgtagcaacatggggcatatggaaaggaggcataggaaaccttggtcccaaatgaacagccgcagttgctgctggcaaagtcgaactagctaacatattgggaaatggcattactggtctgttcattcccattcccatttccatgcccatccccatcccaatccccattcccattggtggcatatactgctgtattccaggaaacatcataggtaccatgccatatcccatggacatcatctgcacttgtaattgcagtgacttcaagtactcaattgcttcatccagcattgaagctttgtcagacttgttgcacctaggtataagttcttgcaaagctttcatcttttcattaattctatctcgacgccgcctctctgagagattatggacttctgcagcacgagatctcttcgtagatgtagaaccacgaacttgctttttagcttccggagattcaaaatcaacatcctttttgcagtgagaccaatggagctggtgc

SEQ ID NO: 27697 - DNA, 1218 bp, Glycine max
  Clone ID: TF_GmC159_1
gagacgcttcatccctctctctttctctctcccaaaacgagtctttggatttggattagattcagattgtggccgtggcagccagcagcaatatctctaaactcgaaaaatggatcagcgaaagctacgagactcgtccaattcgaaacccgcttcagatgcagcaccccaacacgtcactctcacctctaaccgcttccgcaactctcaagctgctgtgagggagagagagaaagagaagggtgaaggggaaaacgaggatccaagtgcggcacgaaaggttctaaaggcagaccgcgagaagctcagaagggatcgactcaacgaacacttccaagagttgggaaacgcgttagatcctgatagaccaaagaatgacaaggcaactatcctcactgagaccgtccaaatgctaaaggacttaaccgctgaagttaataggcttaaaacagagcataaaacactttctgaagagtcacgcgaactaatgcaagaaaagaatgaactcagagaagagaagacatctcttaaatctgatatagaaaatcttaatgtgcagtatcagcagagagtcagaatcatgttcccatggagtgcaattgacccttcggctgtcattagtcaaccttactcatatccagttcccatacatatcccttctgctccaatctccatccacccatctcttcaaccttttcctttctttggaaatcaaaaccctggccacattcctaatccttgttcaatgtatgtcccatatactactccaactagccaccccccagttgagccgccatcaatgatgtatgcttccacgtcccacgcatcgaaccaaaaagaatccggtagcaagtcaccaggtcatagaaggtccagtggcgctgaaagaagtagcgagactgacgatgtggtcacagagcttgaacttaagatgcctggatcatcatcaacacaacagggttgcacttctggaggaaggaagggcaagatgaaggatagaaccatcataggtgggagtgcttcaagccagtattcttcatctctaggacttcaagatagctccaacagcgtgggtgacatcccgaagactgataattgatattgtatatggatttttgtaccatttaaccacttcatgcaggtcataaatctatagcagtttcgaattgatactcattccttggtataagtataatttagcaatagattctatcattt

SEQ ID NO: 27698 - DNA, 944 bp, Glycine max
  unsure (1)..(944): unsure at all n locations
  Clone ID: TF_GmC131137_1
atagcatttgaatggtttagaaattgagtaaggaactttactatggttttggctgtgactatggaaaattactatgattctggctggcacatgggcaacagcagctgggctcaatgcagtgatcattcttcttcttcctttgcagtgcctacacaaatactccctcatcatgtcactgactctgcctctcttcaatttggtgagtttcactcatgggcacttcccattgaaggggctgcagaagaaagagcaataagtgcttccaagagtcacagccaagcagagaaaaggcgcagagacaggatcaacgcacagcttgcaactcttagaaaacttattcccaagtctgataagatggacaaggcagctttactagggagtgtgatagaccaagtgaaagatctaaagcgaaaagccatggatgttagcagagccttcacagttccaactgaaattgatgaagtatcaattgactatgaccatgttcaagacgaaagctgcactaaagtgaacaaactgaaggacaatattgtgatcaaagcttctgtttgctgcgatgatcgaccagaactgttccctgaactcatccaagtcctcaaaggcttgagactcacagcagttaaagctgacatagccagtgttggtggcagaatcaaaagcatattggtgctttgttctaaggatagagaagacagtgtttgccttgccactctcaaacagtccctcaaatctgctgtcaccaaaattgcttcatcatccatggcttctagttgtcccgctagaagtaagaggcagagattcttcttgccttctcactgcctacagtaattcactgccgctattcactttttcatttttgtttttaattcttagaggggtcgtgtcactagctcacattattggtttcattntttcacatttgtttaccggtcagatataaaact

SEQ ID NO: 27699 - DNA, 1700 bp, Glycine max
  unsure (1)..(1700): unsure at all n locations
  Clone ID: TF_GmC138935_1
gttgcatgaccaggttgagcagcggtactgtctttcgatcttctagaaaacgaagcgtctgaaaaaaccaccccaaacttctcgaaacccctttcagttctctgcattcttctaacacacacacacacacacagaatgggtgacttgttccactttgacaagaacctctcttcacaagacgaaatctcactttttctgcgtcagattctgctccgttcatcttcaccttcccactccatgcctgctggatcctgcacctccaacgctgctcaacaaaacgtaaatgcacaccacccttctttcacagcgtcacagctccaagatgggaagatcttggcccttgattccaccgcttcttttgtctccggttctgctgcttgcagttccttcaagggccatggtgcttctgctgcaaatgtgtcttcttcttctgctggagtgagtgagaacgagaatgatgactatgattgtgagagtgaggagggtgttgaggctccggccgaagaagttccaacaaaggctgcttcttctaggagttcatctaaaagatcaagagctgcagaagttcataatttgtcagagaagcggagaaggggtaggatcaacgagaaaatgaaggctttgcaaaacctaattccaaattctaacaagacagataaggcttcaatgctcgatgaagctattgaataccttaaacagcttcagctacaagtacagatgctgtcaatgagaaatgggttgagtttgcatcctatgtgctttcctgaaggcttgcagcctctgcagttgtctcagatgggtatggaattaagtgaaagaaacaggtttacctctttaaacatgtcagctactctgcctctgcaccaagacaacaatcccttgcactatgcatccaatctacctaacaaacacaatctcccaaatcagccatctgtgccctatcctccatacattgacaacccagaaacttctttcggtctggaaccccgaatccaaacggatatgaaacctcttcaacacaaaggaggatcttctgagccaatacgaggggaagacattttgcagcaccagcaatcaagtggtatccattcagatgccaatacattaggtggttctcaagttgtcaaagaattcgaatcaggcacgagactatcattcccttttgacacgcaagcatgtgaacccaaagacaacagcaactcttcgcaaccatgcattggcggaagagatcattcaggagtgatcataagaaatagtgagaccaacattgttggtaggtaggtatatgatgcttatgtgaatgatatgtagctaggttcgtgcatgcaatgcaacatgtcttgaaaagcttttcaccagagactgcagaagggagaaagtggtcagtggcaactcgaagaccgaaaagtcagatttttgaagtttactgccagtaatgccttctgaattttggtttcgtaaaagcaggaatctcaatattatcccttgagcattttgtaatgttctcaaaaagcctctggcctacgtgacatgagagcagatttttttttttttctctttctagcttctcgagttgataaaattatgtatgtataatgtatgcagagaatataactccccattgttatgcggattatataacccctgtagaaaatcctatgggggttttatttcagttcccgataaaaacaanttgcctt

SEQ ID NO: 27700 - DNA, 301 bp, Glycine max
  Clone ID: TF_6913441
ggaagcactggatcacatcatgtcagagagaaataagagacaggagctcaccagcaagttcattgcacttgctgccgctatccctggcttgaagaagatggacaaggcgcatgtactgagagaagctatcaattacgtgaaacaactacaagaacgtatagaagatctagaataagatatccgaaagaacggtgtagaatcagcgataaccatagtaagatctcgtctctgcatagatgatgactcaaacactgacgaagaatgctatgggcgcaatgaagcacttgctgaaggtgaagca

SEQ ID NO: 27701 - DNA, 492 bp, Glycine max
  Clone ID: TF_jC-gmXLIB3563P013cc12a1
caagtggtgaagaaggagaatccaaagtaacagagcaaaccagcaacaagaatggcaaatccaacgcaaataaaaacaacaacagagaaacaacctctgcggagacttccaaggataattcgaaaggctccgaggttcaaaatcagaagccagagtacattcatgtccgagcgcgtcgtggacaagccacggatagtcatagcttagctgaaagagttaggagggagaagattagtgagagaatgaagtatttgcaagatttagtaccgggttgcaacaaagttgcagggaaagctggaatgcttgatgaaattattaactatgttcagtctcttcaacgccaagttgagttcttgtcaatgaaattagcggctgtaaacccaaggcttgacttcaaccttgacgaactatttaccaaagaggtgtttccttcttgtgctcaaagttttccaaacattgggatgccattagatatgagtatgagtaacaacc

SEQ ID NO: 27702 - DNA, 636 bp, Glycine max
  Clone ID: TF_GmC821579_1
ttcagaatggcggcgatgcagccgatacacatagacccggagtcggtgaagcagccgaagcggaggaacgtgaagatttcgaaggatccacagagcgtggcggcgcggcaccgcagagagaggatcagcgagaggataaggatactgcagagactggtcccgggagggactaagatggacactgcttccatgttggacgaggccattcactacgtcaagtttctcaaaacgcaggttcagtcactccaacgcgcttcctccgctaacaacaatattaggccacttggtactagtactgttaacgcaacaggaatagggttccctgttgctatgtctaccacttccaattccaccccttattttcctctgcctaaaccttaccaagctcgccacatggagaatatgcacgatagatatgattaaggttgtttagtgtgtacaactagctagttaatcaattcattatattttaagctttagcctctgagattatatatatatatattggtaacaattatatgtatgctgtacatcatggcatggcatagctggttggctcgtctcaattcaggcttctactttgaaattaaatccagttgtgttagttaacttgcttgcaagaaattccaatttttc

SEQ ID NO: 27703 - DNA, 1398 bp, Glycine max
  Clone ID: TF_GmC141926_1
ccggaattcccgggtcgcgtccgcgtccggttccacttcccttctgcagcagagaaaggaagagagggggagctatggagctttctcaacttggtttcctagaagagttggtagctcctagaagagactcatggaatgctttgtccactggattctgtgagctattgtctaatggctgttgttggagttttgacacttttcttgagaacccaacatttggtgcattttcagctccaagatttgacagcccttacagcagtgaagtatcagcagcatacccttttgctgctgatgggttcacaatgccattgtcagagcttgaccctgggagtgatgagccgccaccaccaccaccacttccaccatcattggaggatgcagagattggctttcatgacaacaacaacaagaagaagaacaactttgaagaaaccaaggttgtgtgcaaagttgaggagaaagacagagagattccactcttcaagattggcatgtgtgatgatggagagagaaaacccaagtccaagaagcttgaagggcagccctcaaagaatctcatggcagaaaggaggagaagaaagcgtctcaatgatcgtctttccatgcttaggtcaatagtccccaagatcagcaagatggataggacctctattcttggggataccatagactacatgaaagagcttttggaaaggattggtaagttgcaagaggaagagggtacaagtcagataaatcttttgggcatttcaagggaacaactcaagcctaatgaagcaatatttgatgttgagaggagagaccaggacaccaggatcagcatctgctgtgccacaaagcctggattgctactatcaactgtgaataccttagaagcaataggccttgagattcagcaatgtgttgtaagtagcttcaatgacttttcagtggaagcatcttgttctgaggtagctgaacagagagattgcattcatcctgaagagataaaacaagcattattcagaaatgcaggctttggtgagaaatgtctctaggggaaagatggaacatagctataacaatttgcagatggtgtaaaagaagcaactttccttcattagtttgtaatccaaggaattagggaagtagaggttttaatgagattcagaataagttggctttggttgatgatttctttcttaaagcctctcactgtgttttaacatatattgggggggctatcctttagtgcatgctgcaatttcatcttttgaaaaaagtgtattcttttttaagaagtgatctataatgaaggagaattattgcaaagccctcaatatagtggaatcaaattgattttccatggattcctaagtatgctgctgcatcaaaatttcttttctgggatcttagaac

SEQ ID NO: 27704 - DNA, 3116 bp, Glycine max
  Clone ID: TF_GmC2019_1
cttttatctccaaactcggcgtgggtatctgggctttatcccagtgagtgctttttttctgtaactaaccccaatcatcaactcaatcagcgaatgaattggtggacggatgagtactcctcggtgatgcacctcctcttgtcctccctcgcccaaactcaatccctgtgagtgctttctttctgtaactaacttgttccctcgttaaccctaatcatcaactcaagcagtgaatgaatctgtggacggacgagaactcctcggtgatggaggccttcatgtcgtcctccgatctctcctcaatctggccctcgccggcgccgccgcaatccacggcggtcttcaatcaggacaccctccagcatcgcctgcaggccttgatcgaaggcgcccgagagacctggacctacgccatcttctggcagtcctcttatgactattctggctccactctcctcggctggggcgacggttactacaaaggcgacgacgacaaagccaaagccaaggccaaggccaaggtcaaggtcacttccgccgccgagcaggaccaccgcaaaaaagttctccgcgaactcaactccctgatctccggctcctcctcctcctccgccgcctccgacgacgtcgacgaggaggtcaccgacaccgagtggttcttcctggtctccatgacgcagtccttcgtcaacggcggaggacttcccggacaggccttcttcaactccgctccggtgtgggtcaccgggggcgaccgtctctctgcctcggcctgcgagagggcgaggcagggacacgtgttcgggctgcaaaccctggtttgcataccgtccgcgaacggcgtcgttgagctggggtccaccgagttaattttccagaacccggatctgatgaacaaggtgaaggttctgttcaatttcagcaacaacaacttcgacatgggttcttcttggcccgccaccagcgccgatcagggcgaaaacgacccttcctcgctctggctcagcgatcccgaagttagggattccattaacactgttgctgctaccccttcggtcacggttcctgcacagactcaggggatttcgatttccaagaccatgcagttggaaagttctattcaaacccctggttccagtactttaaccgaaacccctagttctattcacgcgattccgcagaaccagagcgtcttctccagagaattgaacttttctgagtatggtttcgacccaaagactgggaacaatcagaatcaccattctctgaagccggaatccggcgagattctcagcttcggcgagagcaagagaacctcctacggcggcgtcaatgggaattccaattccaattcccattttttctccggtcagtcgccgtttgttgctgctgcggatgagaacaccaacaaaaataacatcaacaacaatgggaagacaaagtcaccgaattcgcgcggtagcaacgacgacggaatgctttccttcacctccggcgtgattcttccggcctcgaatttgaagtccggtggcggcggcgattccgaccactcggatctggaggcttcggtggtgaaggacccggtggtggagccggagaagcggccgcggaagagagggcgtaagccggcgaacggaagagaggaaccattaaaccatgttgaagcagagagacagaggagggagaagctgaaccagaggttctacgcgcttcgtgctgtggttcccaacgtgtcaaagatggacaaagcgtcactcctgggcgacgccatatcttacatcacggagctgaagtccaagcttcagaccctcgaatcagataaagatggaatgcagaagcagctggaaggtgtgaagaaggagctcgagaaaacaaccgagaacgtttcttctaatcacgcgggtaatagtagtagttgtaacaacaacaacaagttgtcgaatcagaagttaattgacgtgttggagatggacgtgaagatacttgggtgggacgcgatgataaggatccattgcagcaagaagaaccaccccggggcgaggttgttgacggcattgatggagttggacttggacgtgcaccacgccaacgtaaatttggtcaacgatatgaccatgctacaagcaacggtgaagatgggaagtaggttttacacgcaggagcagcttcgtgcggctctggcggctaaggttggggatgcacgatgatgttggctctgcactttgcggcagcgtttgagattatgtgtgtgtttgtgtcgtgttattagctagctagctctttgtaagttgtgctgctctgggatattttaagccttcccggtagctgtttctgtaaaattataagctttttttctttattgggtagcttagtattgaattttgaggtaatcaaattgggaagctccatggagtagtagaactagctagggacacttttcatcaaatctgtgggtggagtggagatagcagcagctatatgtggaaataggggtaattttatctgttttagattgtgtatatattataataatatcataaatgtgaacagcatcatgcaagttctcaatattattattaataaaaaaaaaagacgatgcagttagagagttctattcaaacccctggttcgagtactttaaccgaaacccctagttctattcacgcgattccgcagaaccagagcgtgttctccagagaattgaacttctctgagtacgggttcgacccaaagagtgggaacaatcagaatcaccattctctgaagccggaatccggcgagattctcagcttcggcgagagcaggagaacctcctacggcggcgtcaatgggaatactaataccaataccaattccaattcccattttttctccggccagtcaccgtttgttgctgctgtggatgaaaacaagaagaataacatgagcaacaacgggaagaaaaggtcaccgaattcgcgtggcagcaacgacgatggaatgctttctttcacctccggcgtgattattccggccacgaatttgaagtccggcggaggcggcgattccgaccactcggatctggaggcttcggtggtgaaggacccggtggtggagccggagaagcgcccgctcta

SEQ ID NO: 27705 - DNA, 960 bp, Glycine max
  Clone ID: TF_GmC2019_2
gtaagagagggcggaagccggcgaacggaagagaggaaccattaaaccatgttgaagcagagagacagaggagggagaagctgaaccagagattctacgcgcttcgtgctgtggttcccaacgtgtcaaagatggacaaagcgtcgcttctgggcgacgcgatatcttacatcaccgagctgaagtccaagcttcagaccctcgaatctgataaagatgtattgcataagcagcttgaaggagtgaagaaggaactcgagaaaacaaccgataacgtttcttctaatcacgcgtgtaataataacaataacaacaagttgtcgtcgaatcagccggcgttaattgacttggttgagatggacgtgaagatcattgggtgggacgcgatgataacgatcacatgcagcaagaagaaccaccccgcggcgacgttgatgacggcattgatggagttggacttggacgtgcactacgccaccgtaacgttggtcaacgatttgatgatccaacaagcaacggtgaagatgggaagtagattttacacgcaggagcagcttcgagcggcgctgtcggctaaggttggggatgtacgatgatgttggcactttgcggcagcgttgagattataagtgtgtgtttgtgtcatgttattagctagctatctctttctaagttgtgtgctgctctggggtattttaagccttcccggtagctgtttctgtaaaattttaagattttatttttctttattgggcagcttagtattgaattttgaggtaatcaagctgggaagctccatggagtagtagtataactagctagggacagttttcatcaaatctgtgggtggagtggaaataggggtaattttatctgtttaggtagtgtatatatttataataaatcataaatgtgatcatgcaagttctcaatattattatgcttcagctaaagggcggc

SEQ ID NO: 27706 - DNA, 1470 bp, Glycine max
  Clone ID: TF_GmC294898_1
ccagatgcaagcagggcatcaagcaatggtgtctggactactactttatccgccgagcctgaagctgttagagaccatgtgccgagaacaagtcctcagaatgaaaaagggaaatcggagatgcttgaaccaactacaacttcatcatccggtggctcaggtagtagtcttggaaaaaattgttcgctatctacgagaaaccagggccaaaaaagaaaaggaatagatgtggaagaatctgaggagcaaagtgaggacacagaacttaaatcagcacttggaaacaagtcatctcaacgtgcagggttggctcgaaggaaccgcgctgctgaagtgcataatctatctgaaaggagaaggagagaccggatcaatgagaagatgaaggcattgcaacaactcatacctcacagtagcaagacagacaaagcatcaatgttggaagaggcaatcgaatacttgaaatcacttcagttacaacttcagctaatgtggatgggatctggcatggcaccaattatgtttccaggaattcagcactatatgtcacaaatgggtatgggaatggctacaccgcctttccctcctattcacaatccgatgcaattaccgagactgccgcttgatcagtctgtatctgcgtctcagacaccaaaccagacattaatgagccaaaatcctattttgggtgcctttaattaccacaatcagatgcaaaatccagctctttcagagcaatatgcgcgttacatgggctatcatcttatgcaaaatgcctctcagccaatgaatgtattcagatatggtccccagggggtacggcatagtcaaacaatgattacacccagcagcaacagcagtggaaacatgagtggagcagcaaatattgatgaggctgtgagtggcaaaatgggttaattagtttcaaagcacgcttttgagtacctatggcgtaactaacaagataattgcaagatgatagaagcccttgtaaggcttgtatgctttcacaatatgtctgcctgctcacactgtcgcggctccacggttacggctaaaagacctttttaaacaatcacttgttctttgactaggataagaaataagatatataacttactagaataagccttgctctataagcattctccactggcatatttaatgttattatgctaatgattttggctgttgcatagctctttatgaattggtctcatttttctctctatattcattttatatgccagatttataccatcattctatgtttcatattgcatagaacttctattgagtgtttaatttcagtacttcatcaacaaaaaattagtaacaccatttcatggcattctacagttttttatgttttattattcctacctttttatagaaaaaagattttgtatttaaaatccattttatcttgagaattctgatactataattttcattaacagtttttacttg

SEQ ID NO: 27707 - DNA, 1203 bp, Glycine max
  Clone ID: TF_GmC6836_1
ccggttcctgtcgaaatcctcgacgaccacaccatctcctgcgccgacatcggcatcgttgccggagtccaagaaaccaaaaagcggagaataaaccaaacacaaacacaaaaacctcccaggaaaaacgacaactatgtcaactccgaacactccgattcggattgtcccacgttgccaaccgccaccaccccgacaacctcggagccgaagaaaagagggagaaaaccgattctcggacgcgagactccggtaaaccacgtggaggcagagagacaacgtagggagaagctcaatcatcgattctatgcgcttcgtgctgttgttccgaatgtttcgaggatggacaaggcttcgctgttgtcggacgctgtcgcctacatcagcgagctgaaggcgaagattgagtacttagagtcgcagcagccgagagacagtagtaaaaaagtgaagacagaaatgacggatactctagataaccatagcaccacgacaatatcgacagtggtggatcaaagcgggcctgaacctagattgggcccaagcccgcttggtctcgaggtcgatgtgaaaatcgtggggcccgatgccatggttagggtacaatcagaaaatgtgaaccaccctggggcgaggctaatgggtgctttgagagacctagaatttcaggttcatcacgctagcatgtcttgtgttaacgatctcatgcttcaagatgtggttgttaagcttcccaatggaatgaggagtgaagagggtcttaaatctgcgattctgatgaggttggatcagtgacactggtgaggttattagctgtaatgtaactgtgagatgttgttgctgttcatagtagtcggtttttggtgtacgttatagataatttgtatttatcttttttgtttttttggggggtctttgtcttgcgtggtgcttgatgacggtggggttggctccaacctgcaattatgtgagggaatctaagaagcctgtcgtttatgttttgtatatataataatccttttggattttgaagttgatcaagaactagactagaagaaaaagtggtcgccatcttgttttaacattcctcaaaatacaaatattataatccaaaccctataatctagtatcactagatttagattttgtatgaataaataatataattaagcatgtgtttactataattttattatataaaaa

SEQ ID NO: 27708 - DNA, 1086 bp, Glycine max
  Clone ID: TF_GmC301008_1
ggctcgagctgggtatatccacgttagagcaagaaggggtcaagcaaccgatagccacagccttgctgaaagggtgagaagagagaaaataagtaaaaggatgacgacgttgcagcgacttgtgccaggctgtgataaggtaaccggaaaggcccttgtgttggacgaaataatcaattatgttcagtccttacagaatcaagtggagttcttgtcaatgaaacttgcatccgtgaatcccatgttctttgactcggccatggacttagacaccctcatggttagacccgatcagaaattgagtaatatagcatcaccatcaccactaccatgtgtagcacaattcagaccccaccaggccattgcttttgctgacacaattaccaccccgaccaccactaccaatagcttccccacagctaataatgatggctatcttttggattattcatcctcactttttcttcaaggccatagaccaaatatctttgaggataacggtggtcagttttgggacgtagaagaccaacgacaaaagtttcttcatccatatagattcggcaataattcgggttctttcaattgattaatatcatattcaaatagcctttcaagtctacaaacatagtatgctgaactattgtttttagttaggttgggaaattccaaacaagtaccagtatctcagttggaaaaaaaatcttacatgcatgagcaccaaataccaaagctacgattggtatcacagtatcatcattttgagggaaattcgtggtttggtttggttccctgtcccccaaattgaagaggcctttgaacacgatgaataaagtgcagtaaaattgatggatgaagaacacaacacaaagtgccgaccaaataagaccatatcttttgctagatccgttgttccgttcctgtccaagtcatacatatagatgatgcacaaattccaagagactgtgtcaatcctacagacttgaaaattatgtcatgtaattattaattaaattataaaattatatgttaaagaaaaatgattcttgtggtggcagttattctgttgatacagttaatttcaccgtt

SEQ ID NO: 27709 - DNA, 936 bp, Glycine max
  Clone ID: TF_GmC224511_1
tgcttccgtttcggagattctatggccggtccggctgcccgggtcgacccacgcgtccggctcagagttcgctgatcaaaaaggcggtggagttggacggcgccagatcgaaaacggagcggaaatcaacggaagcgtgcaagagtcacagggaagctgagaggagacgcaggcagagaatcaactctcacctctccaccttacgtaccctccttcctaacgccgccaagtcggacaaggcgtcgttgctgggggaagtggtggagcacgtgaagcggctgaggaagcaagccgatgacgtgacgtgcggggactcgtactcctcgcgcagcggcgaaccgggttcggtccggtcggaggcatggccgtttccgggggagtgcgacgaggtgacggtgagttactgcgacggcgaggacggggaaccgaagcgggtgaaggcgacggtgtgctgcggggaccggaccggtctgaaccgggacgtgtcccaagcgatccggtcggttcgggccaaagcggttcgcgcggagatgatgacggttgggggaaggacgaagagtgttgtggtggtggagtgggaaaaggaagaagaggaggttggggcgctggaacgggctttgaaggctgtggtggagaatcgggctttggtgggctttggaatgggcccagtcattctgggccagaaacggggtagggattgctgtgcttcgcctagtagtgaggttgactctgacttcttgctgaggaatgggagcttttgctaattcgtaattagtttctttttttggtaaaagaaataattagatgcttagttagctttcgggttggtaatcttggagatgccttttttttatttatataggcatgatgctttagtttataccatagtctaaaatctataatttatagtaatatataattgtggtaattttattt

SEQ ID NO: 27710 - DNA, 1031 bp, Glycine max
  Clone ID: TF_GmC2279_5
aaccgttgaaaaaagtggcacctgaacagcggcaccctacagctacataaatttatatatactttttttttaatctttattttcgatacacgaatggccaaataatttaaatatatctttgtaagtacagaaatagagaaaaatcaatctagattctagcttcgcaatcaaattattactaatctgtacagagactaagtgtatgggaaaagtcctaaacacacgttttcccaatagcaagaattgattggttgcttctggagcattgaactcaagcttttcaatttcaacgggatatagaaacacaagctaagtcgaccaatctccctttttttccgttattgttgcttctcgtgtgaacacgtacactttgcatgacaatctgaaagtgtctgaacttgcttttgaaggtctttgatgtaatccacagccaagtccaacatatcagctgtgttagtttgcttgtccatgtttgggacaagatcctgaagtttcctcatacgctcactaattttagttcttctaaccctctctgcaatgcttcttgggtgagtggcacagccccgtttggcacggattttgcacggaacagaatctgaaaactgcagaaacttctcaatggcagctatttcagctgaagtatttggcaaactcaactgatgggccaaaggagcatgagtctgtcctgtttcattctgagtctcaaccgcatttaagccagaaaatggttttgaatcttcttcactaaatcttttgagaccaccaacgttgtcagacatcattgcagtatcatcccaatgaccaacttggaaaccggccataaaatcgttaccatcagcaaaagcttcactgtctggactactttctctataccctttgtccccaatttcagcaatggacgacattctccccgacgaagaatagttcggttgattcttcaacctcctcgaactagaaaatttcgcatcctcgatactgttgttaacagctcccaaactccccatgcctctcacaccagcatacacattttc

SEQ ID NO: 27711 - DNA, 1937 bp, Glycine max
  Clone ID: TF_GmC2279_8
ttgactttgcacaccggcaccctacagctacataaatttatatatatttatctttattttggatacacgaagggccaaacaattaaatgtatttttctaagtacagaaatagagaaaaggcaatctagatttctagctaggcgatcatcaaattattactaatctgtacagactacagagactaagtgtatgggaaaagtcctaaacacacgttttcccaatagcaagaattggttgcttctggagcattgaactcaacaagcttttcaatttcaacggggtatagaaacacaaactaagtcgaccaatctccctttttgccgttattgttgcttctcgtgtgaacacgtacactttgcatgacaatctgaaagcgtctgaacttgcttttgaaggtctttgatgtaatccacagccaagtccaacatatcagctgtgttagtttgcttgtccatgtttgggacaagatcttgaagtttcctcatacgctcactaattttagttcttctaaccctctctgcaatgcttcttgggtgagtggcacagccccgtttggcacggattttgcacggaacagaatctgaaaactgcagaaacttctcaatggcagctatttcagctgaagtatttggcaaactcaactgatgggccaaaggagcatgagtctgtcctgtttcattctgagtctcagccgcatttaagccagaaaatggttttgaatcgttttctctaaatcttttgagaccaccaacgttgtcagacatgattgcagcatcatcccaatgaccaacttggaaaccggtgataaaatcgttaccatcagcaaaagcttcattgtctggactactttctcgattccctttgtccccaatttcagcaatggacgacattctccccgacgaagaatagttcggttgattcttcaaccttctcgaactagaaaattttgcatcttcgatactgttattaacagcccccaaagtccccatgcctctcacaccagcatacacattttcaatgttaatttgggaaaatagtcctgcgggagagctactatgcctggtaaggttagaattatttccactatgcctgagtcccattgaaaacgatccttgctccatagctgagggaaggttcgggttctggttcggcaagggaggtttggaggaggagctttggtagaaattatgagaagcagagtagttgttgttgttgttgttgttgtaattattgatgttgttattactctgctgtagcgcagccaccgccacgtgttcctcgttgataccctggtcttgttggttaaccctcttccttaaccgcagcagaagaagaagaagaatcagttgagagcttgtgatgatggagcgaatcttcttcttcactgtttaagctgttaacgaagcgtgagaacactcgctccgtttcgggactcgagggacggttgaagacgtgctcgtagaactcgcggtcaatgatgttcgagaaataagaactcggcgccgatcggtaccgagttaaacccgaggaattcacctgcggctgctgctcgagatctgactccattgttgcaactgtaggcacgtgcggggaagcacagagagaaggagaagcaggaaaattttgctcagatctatgcggaaccaaatccgggtaattcagggagaagaaaaagggtggtgaaggaaaaaggtagtgggaaaaataaatatatgttgtattcttttttctatcaataaaagcgacgatggctagcgtcaagggcttttctgttcctgaaagtgaatcattcaacgctcaagaccactagcggcaacaggagcagatagattctcgcagctcgctatgcaacacccattctttttttctttttcttttttgggtatgcttctatgttgttgttgttgtgtatggagtggtggagatggccataggcc

SEQ ID NO: 27712 - DNA, 1268 bp, Glycine max
  Clone ID: TF_GmC869_1
accactcgatggcggcgatgagggagatgatattccgaatagcggttatgcagcccgttcacatcgatcctgaatccataaagccacccaagagaaggaacgtgaagatctccaaggatccgcagagcgtggcggcgcggcacagaagagaaaggataagcgagagaataaggattcttcagagattggtccctggcggcaccaagatggacactgcttctatgttggacgaggccattcactacgtcaagttcttgaagaaacaggtgcagacgctggagcaagcaggggcaaatacgtcaccacacagtaatactaatagtcccaataatcacgttgttggtgctgctggttttccgctagggatgtcttctaactactccaataatagtagtgttaattattcttctttgttgatgaagggtggttgccaaccttgtcaaatgttcggttccacttctaaacaattgctcagctaatagttgttaggggaagtttgagagggaatttgcttgtttttgtgatgagaaagcaatgggttgtgtagtgttgatcaattggtgtatgcatgggtttggtggatcgggaagaacatgtttctccatgttaatgccattgttgcaatgatcttttgcttttacaatggtgggggtgggtgtaatcgaaatttcattaacataatggatgagtatgttctacagatgagggagatgatgagacgggaagcgcttgtgtttccgatgaatagaggcccggtatccatcaagccaccgaagagaaggaacgtgaagatttcaaaagatccgcagagtgtggcggcgaggcacagaagagaaaggataagcgagagaataaggatacttcagagattagttcctggtgggaccaaaatggacacggcttctatgttggatgaagccattcactacgtgaagttcttgaagaagcaagtgcagacgctggaacaagcaggggcaagtagacccttgaatgttgttggcttccctactactgcgtccaacgccaataataataatagttattctggttttgtgaagagttgtcagccttatccaatgctgggttctgcagcttctaaacaattgcttagttgagaagtgtttgtttgatacatgcatgaaaaatgaaaatcaatgaattatatatgtggtttttattttattttttatcttcatagtattgtgatcgatcgtgcatggattataaagacagtgtttgtcagtgtaattgtcattgtttcgagaatt

SEQ ID NO: 27713 - DNA, 2673 bp, Glycine max
  unsure (1)..(2673): unsure at all n locations
  Clone ID: TF_GmC1279_1
agggtttgtnaccccanaanccnncnccancnnnnggctcgagccaatcttctccaccactccacacaaccttaaatccaaacccaaaccaaacgaaaaacacacacacacacaccccaagagaaggaacagaaaaaatgggttgccgttagtatctatgagtttcgatgttatgtatgtgtgagtgcgatagcaagttagaaactactacaacaactcatgtttttcttttttacttcttttgatatgttttttttcccttcctagcctattaattcgatctgttcctgattccgaggcaacccaattcacagttgcaagttaaattattaatcatctagatttggggtatgcttatttcattttttagatatctggaattgttaagctgaaagcttggacaaaagaattttccctctgccacgttcatctcccatttggtggttccttccaaaaattgagggcattctagtaaaactctaacacaacacacacaccaaatctgagagctggatttatgtctctgtttacttctcattggctgcacctcttcacaaactagatggaatgttattttataatccttctccatcttttctcttgagccttccttccatcttctccaccacttcacacaaccttaaatccacaacccaaaccaaaagaaacacacacacacagaaacaccaagagaaggattccgagaagttggtgtgatctgatgcgagtgttaagaagataatctgagaagaaaaaagaaagaaaaaaaagtttcattttttttttcaatggagtcagatcttcagcagcaccctcccatgtttttggatcaccaccagcagcagatgaattcagggttgacacgttaccgatcggcgccaagttcgtatttttcgagcatcattgaccatgagttctacgagcacgttttcaatcgaccctctagccccgaaacagagcgaatgttgacacgctttgtgaatagtcttggtgggggtgatgctgatgcagaggattcacttgctactactcagaatcccccaactgttgttgcggttaaggaagaggttaatcagcaacctccggatgttacatccatgaataatgaaccacttgttctccaacaacaacagcagcagcagcaacaacaacaacaaagtaataatatgtataattatggctcttctggtactcagaatttttaccaaagcactggacgaccacctttgccaaaccagatgaagactggtcatggaagtagttctaatcttatcagacatggtagctcacctgctggattgttttcaaacattaacattgatattactggctatgctgctgttgtaaggggcatgggaactatgggagctgctgctaataacaccagcgaggaagcaaacttttcaccagcaacaaggatgaagaataatgcaccaaacttctcttcaggactaatgtcatcaagggctgaagttggaaacaagagcaatacacagaacaataatgcagaaaatgaagggtttgctgaaagccagggcaatgagtttatccctgcaggtttccccgttggtccgtggaatgattctgcaatcatgtctgacaacgtgacaggtctgaagagatttagagatgaagatgtgaaaccattttctggtggtttaaatgcacctgaaagtcagaatgaaactggaggccaacaaccttcttcttctgctttggctcatcaattgagtttgccaaatacttctgcagaaattgcaaaacacttctgcagaaatggcagccattgagaagtttcttcagctctcggattctgttccttgcaaaattcgtgccaagcggggctgtgccactcaccctagaagcattgcagagagggttagaagaactaaaattagtgagcgaatgaggaagctacaagatctggtccccaacatggataagcaaacaaacacagcagacatgttggacttggctgttgagtacattaaagaccttcaaaaccaagttgaggcactttcggacaatcgggcaaagtgtacgtgtttacacaagaagcagcaataacggaaaaggaggagggtacccgcgtcattccctgtacagcttagtaataatttggtctagaaactagcgcacctttccgataattatctagctacatcacttcttctgcgcttgtttgggagtgtggtggcaaaagttgagtttatatatgatcgatcaatatttgatgcccacatattcaaggcatggtgtacaaaattttctgatatgtaagtctatttgcctttactcttaggggcccccatttacggggatgatggaggatggggtgagttggaaaattgaaattttcatttttgcatcttcaaggttcagccataacgttaaaaaaaagagagagagagagagagaatgttatgtatgggtttggtttcacattcaaggacatgggaaacatggggggaccgaagccaacatagttttgttggttatatatatacttggatgcctattgagtagtgtgtgtttgtacttttattttttttcttttttttttatttttgttatgattttaatgcgaagtagttgtcattaaaagtatgacacatttgaatacatatgagtatttttttttataaaattttttttatattcaaagagtcattt

SEQ ID NO: 27714 - DNA, 1068 bp, Glycine max
  Clone ID: TF_GmC1279_3
aacttctcttcaggactaatgtcatcaagggctgaagttggaaacaagagcaatacacagaacaataatgcagaaggcgaagggtttgctgaaagccagggcaatgagtttatccctgcaggtttccccgttggtccgtggaatgattctgcaatcatgtctgacaacgtgacaggtctgaagagatttagagatgaagatgtgaaaccattttctggtggtttaaatgcacctgaaagtcagaatgaaactggaggccaacaaccttcttcttctgctttggctcatcaattgagtttgccaaatacttctgcagaaatggcagccattgagaagtttctgcagctctcagattctgttccttgcaaaattcgtgccaaacggggctgtgccactcacccaagaagcattgcagagagggttagaagaactaaaattagtgagcgaatgaggaagctacaagatctcgttcccaacatggataagcaaacaaacacagctgacatgttggacttggctgttgagtacattaaagaccttcaaaaccaagttcagactctttcggacaatcgggcaaagtgtacgtgttcacacaagaagcagcaataacgcaaaaggaggaggatacccgcgtcattacgtgtacagcttagtaataatttggtctagaaactagtgcacctttccgataattatgtagccacatcttcagcggttgtttgggagtggttgtgggaaaatcagcttataaaagttgactttatatatcatcaaaatcaaaatttgatgccacatattcaaagcatggtgtacaaaattttctgatatattacaagtctatttgcctttaatctttaggggcccccattttcggggatggaggatggggtgaggtggaaaatggaaattttcatttttgcttcttcaatgttccccaataacgttttaaaaaaggatgttatgtatgggttattgggtttggtttcccattcaatgacatgggaaacatggggggccgaatttgttggttatatatacccttgtatgagtagtgtgttttcctttttt

SEQ ID NO: 27715 - DNA, 1467 bp, Glycine max
  Clone ID: TF_GmC64817_1
ctcaaattcgtcccctccaatccaacaacaccgatcagtttcatggtattgttgtttcttctgccttaagcccaaagcgataagaccaaggtgcttcagtttactcccacatacccggaaacgtttatcagaaaaccagaactttgaagctgaaagccccaaaggccatagaagctacaagtccccatctcacgttcgggatcacatcatcgccgagagaaaacgaagagagaagctcagccagagcttaatcgctctagcagctcttattcctggcttaaagaagatggacaaggcatcagtgctgggagatgctataaagtacgtgaaagagctccaagagcgtatgagaatgcttgaagaagaggacaagaatagagatgtggagtctgtggtgatggtgaagaaacaacggctgagctgctgcgacgatggttcagcttcacatgaagatgaagaaaacagtgaaagactcccccgcgtggaagcgagagtgttagagaaggacgtgctccttcggatccactgccaaaagcaaaaggggcttttgctcaacatacttgtcgagattcaaaaccttcatctcttcgttgtcaatagcagtgtcctacctttcggggattccgtacttgacataaccattgttgctcagatgggaaccggctacaatttgaccataaatgatcttgtaaaaaacctacgcgtggctactttgaaatccatgtcataacaccaacgtgatcttgtctgtttctggtccagcaggatggtctggtggtgggtggtaatattaataatgatattttcatgttttgtggtgtgcagatacccaaaaatgattgaaaatgagttattgtttgaaggtaaaaaatttggtcctccagtctatttttaattttggatttgatctcccactaaattaattcacaaatattatttttttattttataaaatcatgtaatgttcgtcctccagtccacacttgaaccttaacgggttacaaggtgacgttgattattgtcacgtgtcacttttttattgaatgatgactttcacgtgtcatgttttgatgggtcaatgaaaacaacaatgtatttcatcttttatggaattaacatccacatgatacgtgacaatcatcattcaataagaaagtgacacatggtagtcaatgtcactttgtaacaatcaacgtccaattgtgggttgagggaccaacattgcatgattttaaaaagtaggagaaaaaaaaattgtgaattaatttaatgggggacaaaatttgaaattgaagacaaactggagaatcaaaaatgtaattttgccttgattcaaatgctctcttgtcaatttgaatgcacaaaatttatatgtaattgaactttcatttcaaaatttacttctcttgatatttaatgcaaatatttattatatgaattgtttaaatgaaacttcaattttaattt

SEQ ID NO: 27716 - DNA, 1441 bp, Glycine max
  Clone ID: TF_GmC521_1
tacagtacactagcctctgcgcacaaccctccactctccaaggagattacaatccattctttctttctcccttcttccattctctttctcattcagtgtgagagagactgcacacaaatttctattattccgagaacgacaatggatccggcggcgataatgaacggcgccgccaacacgacgtcgtatcacctgtcagagatctggcagttcccgcctcccaacccgccagatgagctgggactcagaaggccccacttcacccacggcttcgcggactttgccccggctccgacccgagacgccgccccggctcccgaatcgccccgcattgcccatcagaagcgccgcgacgcctcgggcgaggaggaggaatccgctaagggcgcctccaccaccaatgccgtgaatgaggggggtcgtgtgtggtgatgggaaacgggtcaagacgagtgagagtgggaaaggtgaaggagaaaccagttcaggaaagcttgcggagcaaagtggtaagccaccttcggagcctgcaaagcaagactacattcatgtccgagccagaaggggtcaagctactgatagccacagtcttgcagaaagagctagacgcgaaaagatcagtgagaggatgaaaattcttcaggatatagtcccgggttgtaataaggttattgggaaagcattggtccttgatgagataattaattatatccaatcgcttcagcggcaagtagagtttttgtcaatgaagcttgaagcagtaaattcaagactggcccccagaattgaagtgtttcctcctaaagattttgatcagcaaacatttgatacaactggcatgccgtttgcttcccaagctacaagagagtatagccgaggttcatcgccagaatggttacatatgcaggttggaggtggttatgaaagagcaacgtagtctttgaaatcccatcacctgataataaatgcatataggatcattaatctctccatcagagctcccataaatcatatactcaaggtgttgttgtttagtcctatagacacctcattccctgttttctacaagaggcatggagctgtggtttgtttccacaggatcactagttagtactcaagcaactccatttgttagtgtgttggaaaatgaattcatttacccaatatgtagtttagtatgctgatactcttcattcataacctttaaaatgatagttattattcttgtaaaagaatgctgcttgtcctgaatacataaaggcttacatattgtgtaatagtatcaacattgttgtttgtctgtgaagctgtgttgaataaattaagcccatgtgattttgttaaaaaaaaaaaaaaaaataaagcctaaaatgttgtgtaatagtgtcaacattgttgttggtatgtgaagctatgttgaataaatttcccccatgtgatt

SEQ ID NO: 27717 - DNA, 1224 bp, Glycine max
  Clone ID: TF_GmC949_1
cggattcggctcgggtaggccacagtcacacacagcctttgcctttgcctttgctgttcagtgctcccactcccagtccgggccgaggcagaaaatatcggaaactaacctttcacactcacacatccatcgtcatatctgaattggcaactcattattaaatcaattacgaaaacgaagaaacccaacaaaacaatggtagtagcttagctaattgcctaattgaatgaatctcaatggaacctcctctcatcaacgactccacattctcttccgctaacccttccttgtccgagatttggccctctcattttcccacagaccacactcccagtaacaagagacacctctccccctcgactgattgtggcagcaataaacatatcaaatcatcaggatcaggatcccaggatcaaaacggtgccttgaaggcgggtgaagtggacgcgacttcagtagccggtaacaagttacccgaacaaacggcgaaacctagttcttccgagcagccacctaagcaagactatatacacgtgcgagctagaagaggccaagccaccgatagccacagtctcgctgagagagctaggagagaaaagatcagtgagaggatgaaaattcttcaagatatagttcccggctgcaacaaggtaattggtaaagcacttgtgctggatgagataattaattatatccagtcactgcagcatcaggttgagttcctttctatgaagcttgaggcagttaattcgagattgagcatgagccctactattgaatgttttccttcaaaagaagttggcactcagccatttgaccttgccggaataatatttggatcacaaccggccaggggatatgctcaaggatcacagccgggatggctgcatatgcagatagctggtggttttgagaaagcaacataatttaagggaggttcattgggaatgacagatcaatcagtgtggttggttttacattgaaaaggaaaaaagtcacttgggctggttggttagcatggtctgctctattaacaacctagtcaattgatgcaaaatgttgtaaggtctgtatgttctttgtcatagtatgatatcgattgtaagaaatgcatctaatttcctcgcgcatcatctgactgggaatgtagtgctgcactatgttagcaattgaaataatcttattgtggtttagttttcgtattaaaaaaaaacaaaccaaaaa

SEQ ID NO: 27718 - DNA, 791 bp, Glycine max
  unsure (1)..(791): unsure at all n locations
  Clone ID: TF_GmC6831_2
aaaaaataaaaacaacacctcataaaagcaagcaaacacacaaaagaaagtaccatatattatacataaaccttattcattcgccttcaaccaaaccatatatcttattctattttctctacctctctaccactctctttctttctccttctcctcaaccataatcatggagaatattggagaagagtacaagcattactgggagaccaacatgttcctccaaacccaagaacttggcagttggggattggatgaggctttatcagggtactacgattcgagttccccggatggtgccgcttcatctgcagcatcaaagaacattgtttccgagaggaatcggaggaagaaactcaatgaaaggctctttgcgcttagatcggtggtacctaacattagcaagatggacaaggcttcgattattaaggatgctattgattacatccagcacttgcacgagcaagagaagattatccaagctgagataatggaacttgaatcagggatgccaaagaagagtccaagttatgattttgagcaggagctgcttcctgtggttctcaggtccaagaagaagagaacagagcagctatatgattgtgttacttcaagaaactccccaattgaagtccttgagctgagggttacacacatgggggagaaaattggtgtggtcagtttgacatgcagcanaaggacagacacaatggtgaaactgtgtgaagtgttcgaatcttttgagctcaagatcatcactgctaacatcacttcgttttcagataggcttttga

SEQ ID NO: 27719 - DNA, 698 bp, Glycine max
  unsure (1)..(698): unsure at all n locations
  Clone ID: TF_6847396
ctgnntagtcagatatttattagaaacacttccatcgccactagtagtacagagaaaattaaagtacaacgtagacacgtagatattttgtgaatgaaatcctgggacacggtttaatttccagccccagcatatacacaaacaactaacacaagatgctcaaattttctgctagatcttgatttagtattaacaaattagaaaaggtcaagcattctgaaatactaaaacgcccttcagaacgaccaacttccagaacaaagtttttctcgttcagcaaagttgtgtttgaattgtgaagtatgatttcttggattcatgatctttttgggattcatctttgagatgaaagaatggcatcaatggcttgtctcacttgagaaatgtcaggggcttttccaccttggactggccaaaattcatcagctgccaacaccttcacttgcaactgaagaaacttaacataactaattgctttctccaacattgtgaccaaatcaaccttggaaccgttggggaccagttcttgtagtatcttaagccgctcacttattctctctcttctattcttggcagcaacactttgnnnatcctnnnatgggtttgactttgnnnntgctgctttacttgcacttgtgcatggcttcttgnnnanngtaacttgcatgttctctcccataaaannnngcttttnnnng

SEQ ID NO: 27720 - DNA, 476 bp, Glycine max
  Clone ID: TF_uC-gmroLIB3259P211c01b1
gggcgtgcgtggagctcaagaactacctagtgaaggtgcaaaggggaactctgagaatcaacagaagggagaccaacaaccaatttcaacagccaacaaggcttgtgggaagaatgccaaattggggtctcaagcttctgatcctttatggaggaggggtacacgttagggctcgccggggtcaagcaacaaatagccatagccttgcagagagagtgaggagggaaaagataagtgagaggatgaagtttcttcaagaccttgtacctggatgcagcaaggtcactggcaaggcagtaatgctagatgaaatcatcaactatgtacagtcacttcaacgacaggttgagtttttgtctatgaaacttgctacagtaaatccacggctggattttaatattgaaggacttcttgctaaagatattcttcaacaacggcctggtccttcaaccggactagggtttcctctagaatat

SEQ ID NO: 27721 - DNA, 593 bp, Glycine max
  Clone ID: TF_GmC1356_1
tagaaaacagaaagctcgtgtcactgaacgtcaacgcaggcaacgcatcgctgataacctcaaagccttgcatgaattgcttccaaatccagcagagggaagtcaagcttacgtattggacgacataattgactatgtcaaatatttgcagcttcaaataaaggaacaaagtggaagtagattattgcaagcggactcaactgctataccactagtttttcatgagggttacggccattatatcaaccaaaagatgctgaatgaaccccttgaggagataatggggaaactagttgaagatgattcagcagcagctgttcagctactagagagtaagggtcttttcctgctgcctatggcattggttgatgagttgagtgaggctgtgcaaatgtttggtgggagtgcacttgtctgacaaaagctttcttttatttatttcaaattctccattatggatcatttctagacagtggcagtagtatgattattgtttatgtttttgatgttacaacaataacatttatgacttattacaaactatcaaaatctcagctaactcgattccactagttctagtttcgattattagg

SEQ ID NO: 27722 - DNA, 1599 bp, Glycine max
  Clone ID: TF_GmC133935_1
accggaattctcgagccgattctcctcgcgcctctgtatcccattcctctgccatatcctgaaatacgttttcacaacactcacctttgccatatacagcataatcatcaattttctgaaatgagccagcgtgtccccaactgcgatgtggacgacaataacaacattcccacaaccacaaaaatccctcttcttcccaatttcaatttcatatcccatgaagtcccaatgttgggctaccaagctgctgaactaccatgcaaaaagggacaaccttcgacgtacaaaggcagccacggaaacctaactagtacgtgggacaaacctcgtacaagtggtggtaccttggagtccatagttagccaacatgtcagcgaaaaccgctacaagttggttactatggacgccttagtgccctgttcagaacaacagggcacacagaaggcagtggtgtcagaaaggcttgatgcgtgtgggaagagtcgcttcccacgcgtggtggcgcaggaggaagtggagaaacgcgctggggtggtggcgcgtgggacgcgtggtactacaacgctagaattgggtggctgcaaggattggagtgtgagtggtagtgaaacttgtcgtagggagttgagtgtgaccttcaattctgccaccaagggttcgccggaaaacaccactagctctggcaaacagtgcaccgggaccaccaccaatgacgaccgtgattccattagccaccgtatatcgcagggtgaggtaccggatgaggattacaaggcaacaaaagtgcatcgttctcctgggtccttctcaagaatcagtgcttcttcagtagtgcacaaacaagctgaacggagaagaagagataagatcaaccaaagaatgaaggaattgcaaaagctggtcccaaattccagtaagactgataaagcttcgatgctagatgaggtgatccaatatatgaagcaattgcaagcgcaagtgcaaatgatgaattggatgaaaatgtacaccacccagatgctgccaataaccatgcagcagcagcaacaacaacaacttaaaatgtctatgatgatggctcagatgggcatgggcatgggaatgagtaaggatatggttatgaatatgaacagcatgaacattcctggattcccccctatgcttcccttcccctccttcatgcctatggccccatgtggcgatcaattacaaggaacaccagagaagtccgtgaccatggatgcatacagtacgatggcttccctgtatcagcagctatttcatcctccagcttctagctcaaagaactgagcctttcgtgttctaccttcctgacaatattatggtgagctataaattaattaagagtgtgcatgtgtgtaaaattttggtgagaaagattgaagtgtgaagagccatcagcttttttttttcttttttatcggcaaaataaaatgtaatttctttgtaccaatagtacaaaaataagatgtttggaaatgtacattattagattagatgtgttcactccccttctgttcactgtcagtcttttaccactataattaatgtgctaatgtagggtgtatatataatata

SEQ ID NO: 27723 - DNA, 468 bp, Glycine max
  Clone ID: TF_jC-gmst024100b03a1
caacctttcccatggcctgacgtttggagacgatatcggtcagaatatcggtcagaatcacaattcttctgctgccgcagtttacgcagctcgcgaggcgcagagcatgaaccaaaaaccgactgtcggttctcctgaatggcaccaagtcagaaaaaataaccataaagaaggcacgtgctcaggtctatccgcgtccagtatatactaacgtcgtcccagtggaacgtcgccgccgtgaggcaatcaacgagggtatcaaccagatcgctcgcctcgtacctaattgcgacaaaaacaaaggcgcgatcttgcaacgtgccattgagtacatcaaccaactgcatgaggaaaagaggcagatgagcgaacgatgggagcagagcaatatgacgacaagtcacgctatcaacgaaatcagtgcgcaaaactcaaagttaaaggtcgaggtcaaccgccccggtgata

SEQ ID NO: 27724 - DNA, 802 bp, Glycine max
  Clone ID: TF_GmC1226_3
gaagtgtgagaatacgaaagaaggggggtttattgccaaatgaagaaggctcacgagatacgcatgggatcagtcacatgctagcgctcctccttcttcttctctctccggtggtggtgactcgccggaagacaccaacttccaccttcaacgccgccgctgaagtgctcagtgataccctttgtttagaacaatgagagcagggaaagggagccaggaagaggatgagtacgaggaagaagagtttggttcttccaagaaacagggtacttcctctgcccctaacgccaacaaagatggaaaagccatcgacaaggctagtgcgataagatcgaaacattctgtgaccgagcagcggagaaggagcaagataaatgagagattccagatattgagggatctcatacctcatagtgatcaaaagagggacacggcatcatttttattagaggtgatggagtatgttcagtacttacaggagaaggtacaaaagtatgaaggttcatatcaaggttggggtcaagagcccctgaagttgatgccatggagaaatagtcattggcgtgtccagagctttgctggtcaacctacagctgtaaagaatggtttgggtccagtatcaccttttcctgtaaagtttgacgaaagcaatgctagtatctctccaactatgcttagtggcacccagaatacaatagatccttatcagagcagggatattgtcaacaagacggctgagaggcaacctgatttagtaaacaagggaatgcctcttccccttgctatgcatgcaaacatgtct

SEQ ID NO: 27725 - DNA, 1277 bp, Glycine max
  Clone ID: TF_GmC6831_1
cagcaaccacaaacaacacctcataaaagcaagcaaacacacaaaagaaagtaccctagagccgaatcggctcgagcggctcgagacggctgcaaaacagacaacagaagggggcaccagtcaacaaaaaataaaacaacacataataagcaagcaaaacacacacaaaaggaaataccatatattatacacaaaccaaaccatatatcttattctattttctccctctccaccactccccttctttctcctcctcctcaaccttaatcatggagaatattggagaagagtacaagcattactgggagaccaacatgttcctccaaacccaagaacttgacagttgggggttggatgaggccttatctgggtactacgattcgagttccccggacggcgctgcttcgtctgcggcatctaagaacattgtttccgagaggaatcggaggaagaagctcaatgaaaggctttttgcgcttagatcggtggtacctaacattagcaagatggacaaggcttcgattatcaaggatgctattgagtacatccagcacttgcacgagcaagagaagattatccaagctgagataatggaacttgaatcagggatgccaaagaagagtccaagttatgattttgagcaggagcagcttcctgtggttctcaggtccaagaagaagagaacagagcagctatatgattgtgttacttcaagaaactccccaattgaagtccttgagctgagggttacacacatgggggagaaaattgttgtggtcagtttgacatgcagcaaaaggacagacacaatggtgaaactgtgtgaagtgttcgaatctttgaagctcaagatcatcactgctaacatcacttcgttttcagataggcttttgaagatagtcttcattgaggcaaatgaagatgagaaagatcatttgcagataaagatccagacagccattaaagctcttaataatgaccctttaagccccatgagcatttgaggaagaaaatatataaattggggttctcattttggggtcactagtatataaatagaaagtttaggaaccgtgggttttataggagtttctcgtatttggtttcgttaccccctttttttcttcgcactcaacattccccttaatcaggactcttcttcaactttattatcagggaaagtttgctagtttcatccccttgtgtgcttagtgtatcaattaatgttattcttataataaaaagttcacttcacatcatcgtggatcttttgtttt

SEQ ID NO: 27726 - DNA, 489 bp, Glycine max
  Clone ID: TF_GmC94732_1
ctgaaagtcctgatcagtcttttgtccctgcaagaccaaccaagaggctcaagacattcaatacctccaacacttgtgccagtgacataatttcccacaaggtttctgcctcttcatcctcccaagttatttcctttgaccacttcaatgccccatcagatgcttcttccctgcaatttcatcgaaacctggacttcgatgtgaagccgaaaatcgagaaagcgtctagtgggaacatggattttgcagctttcgtttctcacggttcgtatgtggacaaaacattcctaagttctgatacgaatcaggttggaataacctctaggaacccaatccaagctcaagagcacgtaatagctgaaagaaaacggagggaaaagctcagccagaggttcattgctctttccgccatcctccctggcctcaagaagatggataaggcttctgttttgggagatgctataaagtatgtgaaacaactacaagaac

SEQ ID NO: 27727 - DNA, 1675 bp, Glycine max
  Clone ID: TF_GmC3871_1
gaactacccagcaatagtaagtgcaaaaccgaaaacaaaaaaccaaacccaaacgaaaccgaccaaaatctcgccaacttcactttccgcttcatgtagtttctgcgttcccaactccttctcccgactctaccctgactcgcccgagtccacactcaaacccgcgctcatggcaaataacccttccgacgctcccgccgatgacttccttgaacaaatcctcggcctcccgaacttcgcttccgccgactccggcctttccgctgccgatgtcggcctcgccggtgcggccactcaggctccgatgatgctgcaactcaactccgccgacgccaacgctcacctcgccggcgccgccttccacgcgcccgtgtatcagctagggctgagcttggaccagggcaaaggtgggttcatgaagcccgaggaagcctccgctagcggaaagcgctttcgcgacgacgtcgttgataatagagctaagaatgtttttcatgggcaacccatgcctactactatgcctgctgctccacatcctccagcaatacgtcctagggtgcgggccagaagaggacaggctacagatccacacagcatagctgaacgattacgcagagaaagaatagcagaaagaatcagggcattgcaagaactggtcccaagtgtcaacaagacagatagagctgccatgttagatgaaattgtggattatgtcaagttcttaaggcttcaagtgaaggttttgagcatgagtagattgggtggagctggtgcagtggcaccactggtaactgatatcccattatcgtcagtcgaggaagaaggcggtgagggaagaaaccagccagcctgggagaagtggtcaaatgatggcacagaaagacaggtagccaagcttatggaagaaaatgtgggtgctgccatgcagtttcttcaatcaaaagcactctgcatcatgcccgtctcactagcttcagcaatataccagtcacaaccctcagacacttctagtatagttaagcctgaaactaatcctccttcataatcatagtcagaactctggcacagatgcaccatccagtggtcccatcaagggctcacctaacactgctaggacccacgtgtaatttgcctgtttcaaacccccttaaccttagtcattggttcgcatcaagttgcattcaaggttggatgccatagtctttcctttttgtcgttctttcaacttttttgtctagacagggtttgatgtcaatgcccttcaaaacacaagcaaaccccatcttgataaatttcatgtaaagggaaagaaattgtcgaagttcacttgatatgctcttcctttttgtatcaattagtgggggttagtggaacgtgatggaagcgcttttatagtggggcttggttttttgtagtgggcagtgggaccttctaaaaggttagggtggtgtgtatattttattagtgatgtaactcttagggaatttgaattgcagagctgaaatggataatgattgctttaacaatgctgggctttgctagtcctccagaaaatgatattgctttttgtttgtttatttcaggtgtgctctagttagttatttaaaaggtcttgcgacccccttgttctcatgcagggagagatggaaggagagtatggtgctattttaaacca

SEQ ID NO: 27728 - DNA, 1512 bp, Glycine max
  Clone ID: TF_GmC3871_2
attttataaaaaactggagcgttatttattttcttcttaaccccttcttcctcttgcgcatcgtctcaactcaactggcatttctgaacactctaaaaaaccagagccaaaccccaaacaaaattgtcttctcttctatttctccaattacaactcgtttccctaactcggccgagtcatcatggcgaatcacccttccgaagctcccaccgacgacttcctggagcaaatcctgggcctctcgaccttcgcctccgccgaccccgccgccgacgcctctccgatgatgcttcagctcaactccggcgacgccgccacccacctcgccgccacccacctcgccgccttccacgcgccgccctaccagctcggcctcagcttggaccaaggtaagggaccattcctcacgcccgaggacgcttctggaagcggcaagcgcttccgcgacgacgtcgttgataccagacctaaaaacttttttcatggacaacccatgcctactactgttcctactgctccacatccaccagcagtgcgacctagagtgcgggctagaagaggacaggctacagatccgcatagtatagctgaaaggttgcgcagagagagaatagcagaaagaatcagggctttgcaagaactggtccctagtgtcaacaagacagatagagctgccatgctggacgaaattgtggattatgtcaagttcttgaggcttcaagtgaaggttttgagcatgagtagattgggtggagctggtgcagtggcaccactggtaactgatatcccattatcgtcagtcgaggaagaaggcggtgagggaagaaaccagccagcctgggagaagtggtcaaatgatggcacagaaagacaggtagccaagcttatggaagaaaatgtgggtgctgccatgcagtttcttcaatcaaaagcactctgcatcatgcccgtctcactagcttcagcaatataccagtcacaaccctcaggcacttctagtatagttaagcctgaaactaatcctccttcataatcatagtcagaactctggcacagatgcaccatccagtggtcccatcaagggctcacctaacactgctaggacccacgtgtaatttgcctgtttcaaacccccttaaccttagtcattggttcgcatcaagttgcattcaaggttggatgccatagtctttcctttttgtcgttctttcaacttttttgtctagacagggtttgatgtcaatgcccttcaaaacacaagcaaaccccatcttgataaatttcatgtaaagggaaagaaattgtcgaagttcacttgatatgctcttcctttttgtatcaattagtgggggttagtggaacgtgatggaagcgcttttatagtggggcttggttttttgtagtgggcagtgggaccttctaaaaggttagggtggtgtgtatattttattagtgatgtaactcttagggaatttgaattgcagagctgaaatggataatgattgctttaac

SEQ ID NO: 27729 - DNA, 784 bp, Glycine max
  Clone ID: TF_GmC3871_3
ggctcgagccactaagtccgtgcaaaccgaagaaataaaaaaccaaacccaaaccgcttcatgtagattctgcgttcccaactcgttctcccgactcaaccctgactcgcccgattccaaactcaaactcgcgctcatggcgaataacccttccgacgctcccgccgacgacttcctcgaacaaattctcggcctcccgaccttcgcttccgccgactccggcctctccgccgccgatgtcggcctcgccggtgcggccactcagtctccgatgatgctgcagctcagctccgccgacgccaacgctcacctcgccggcgcatccttccacgcgccggtgtaccagctagggctgagcttggagcagggcaaaggaagattcatgaagcccgacgaagcctccgctagcggaaagcgctttcgcgacgacgtcgttgataatagagctaagcatgtttttcatgggcaacccatgcctactactatgcctgctgctcctcatcctccagcaatacgtcctagggtgcgggccagaagaggacaggctacagatccacacagcatagctgaacgattgcgcagagaaagaatagcagaaagaatcagggcattgcaagaactggttccaagtgtcaacaagacagatagagcagccatgttagatgaaattgtggattatgtcaagttcttaaggcttcaagtgaaggttttgagcatgagtagactggggtgggagccggtgcagtggcaccactgggtactgacattccattatcatcagtcg

SEQ ID NO: 27730 - DNA, 1633 bp, Glycine max
  Clone ID: TF_GmC3897_1
ctcgagccgctcgagccggattactgcgtgcgttcttccttggctagctctgcgggaattcagactattgttttggtccctactgatatgggagtggtggagttgggttctgtcagaatgttacccgagagttttgaactcttgcaggctgttaaatctgtgttctccacgcagtctccttcataccaaggggtgagtgtgagcaccggtgggaatgctgttttccctggtttggcaattggggatgctaataaggtagatggaggagtttcgattcccaaggtttttgtcaacacaattggaaatcggacgcatttcagagagaaacttgcagttagaaaaatggaggataataggccttggccaggccatggccaccccgaccccaatgggaacaatctccacaacaacgttagttttccgaatgtgcggggtaatagtcttcatgtttcgagttgggcagtgaattcggatctgaggcagcctggtccccttgagatttttgctcctagggcccccacgagtagtgtcctcgcagagctggctaatgttgggaaacaggatttcagacctcaaaggcaggtgcaaatgcaaattgactttaccggagccacttccaggccttcttcagcgagaccggtcgtcggtgaattggagctttctgatgttgaggcctcttgcagggaggagcaacaacccagttttgccgatgaaaggaagcccaggaagcggggaaggaagcctgccaatggaagggaagcgcccctcaatcatgtggaggcggagaggcaaagacgcgagaagctcaaccaacgcttctatgcgttgagatctgtggtgcctaacatctccaagatggataaggcttcattgctgggagatgccattgcttatatcaacgagcttcaggctaaagtcaggatcatggaagctgaaaaagagagatttggaagcacttcaaatgatggatcagtcttggaagctaagttgagattggaaaatcaggagaaaaaagctcctgatgtggatattcaagcttttcaagatgaggtcattgtaaaggtgagctgccctcttgacagtcaccctgtttcaaaagtaatccaaacatttaacgaagcacagatcagtgttgtagagtctaaacttgctgctgcaaatgataccatttttcacacatttgtaattaagtcccaaggacctgaacagctcacaaaggacaagttgattgctgttttttctccaacagaatccaactcattgcagccattgtcacagttggatagcaagggaattgcagtcagcatagtccatacgtagagaaataccaatttctaaaagcttcctcagaatttttttgttacaccacggaggatcttaaaagaaaagcattgggaactagaatagtagaataataggttcccattaacgatgtaggcagccaatttatgtttgtctatagtgtaaacacagcagaaaattgttcctgcaatgtcaatcattttaattagtttaaccgatctagttgtcatggttcagtttatgtcttgatgcccatgtctttcaagttcttgttttttcatgtcttgttctgtgcataagaggaaagaattcttaatttttgctgcaaaaa

SEQ ID NO: 27731 - DNA, 1826 bp, Glycine max
  Clone ID: TF_GmC8207_1
ccttcttgtccgcggacgcgtgggagcaaatagggctattttctagatgaaatgggcgtaccagaccaatatgattgaaagatgtcacatctattaatcagatatattaattaggttgatagcttcagctgtttttcatttcatgaggacttctcatatggagatttcatcaatcagagggttgcctgaaatggggataatagaggatcctaacttcctccatcactggcagttaaactctattgatacaactagcctaacaggtgctccttttggagagattttacaaaagcactcattctctgataactcaaatttcaaccccaaaacatccatggaaacatcaccaactggaattgaaagacctgcaaaacagctcagaaataacagctggaatcacaacaaaagtcaacaacagacaccagaaacacaatttgcttcatgctcaaatcttctttcatttgttaattcgaattacacgagcgaattgggactagtgaaacctaaggtggagatggcgtgtcctaaaattgacaacaacgctcttgcagacatgttgatctctcaaggaaccttaggaaatcaaaactatattttcaaggctagccaagagaccaaaaagattaaaacacgtcctaaactttctcaacctcaagaccacataatagctgaaaggaagcgaagagagaagctcagccaacggttcattgctctatctgctcttgttccgggcctaaagaagatggacaaagcttcggttcttggagaagctataaagtatttgaagcaaatgcaagagaaagtgagtgctcttgaggaggaacagaacaggaagagaactgtggaatctgtggtaattgtgaagaaatctcagctatctagtgatgccgaagactcttcttcagagactggtggtacatttgtcgaggcactacctgaaattgaagcaagattttgggaaagaaatgtcctcataagaatacattgtgagaagaataaaggagtcatagagaaaacaatcagcgaaattgagaaactccatctaaaagtcatcaatagcagtgccttgacatttgggagtttcatcctggatataaccattattgctcagatggatatggaattttgcatgacagtgaaggatcttgtgagaagtttacgctcagctttttcatatttcgtgtgaagagttatgcatttttcggtcgtccccgaaaggtacatgaagaataggagtgcaatcaatttatatatagcagttccatatatcaactatattatcaagtttaagttcttcaataataattctgtttccaaggccggtctgcaatgtctgccatccacaccatgtttgctctgaggttcatttttgcagaagggttttttgtagcgatattttcttcttgcatggtccacttgttgacagtgttatattgtcacactcacaccctactgtttcaagagtgaacgtagagcttgttaggcattttttggcaggaagttgaaaagttcaactacctgttttccatctatttcttacctaaatcctgacagacaggcctttgttgagtgacttattatcttcttttttttttttcaagtgttctcgagttacttttttatttgaaacaaaatatgcttgtaaaagtttggttgaaattggtagtgatggaataatcgtacttttttatatcttgtgtatatgctcgacatgttgcatggcctcaacatgatattctgcaaaagcattaatgctaccaatttaagcatatgtaaattgtaggtggtggattaagcttaaaaaaaaaaaaaaaaaaaaaaaaaaa

SEQ ID NO: 27732 - DNA, 1362 bp, Glycine max
  unsure (1)..(1362): unsure at all n locations
  Clone ID: TF_GmC126664_1
cccgctccgcgccaagttgtttttggtctgatctttcaagttcaatggctggtgacgtaggaagagccttgcctcctcctgattcagaagaattctcaaccttgttcagccaactcctccacaattctcccccccgagcactccaccccgatcatccgcctcctcattctctctctctccactttgtttttggtttgatctttcaagttcaatggctggtgacgtaggaagagccttgcctcctcctgattaagaggagtgcggagcgctgnnnnaggcggctnctncggagagggtcccccactaggaatggaccccaatcattcacctcctgatttcaccccacatctaacaacactcatcaacatcaacagcaacaacaacaacaacgctgttccttcctctccctcaaatttcaatttctctgacccccatcattacatccctgcctctgatgccaccaccttcaagcaacacaacatcaaccacaacaacaatcacacccctgatttcacttcttctcatgttgagaagagtgtggaggcatcgaaacctgtcccaccaccacgttcttcgtcaaagaggagtagagctgcagagttccataatttgtctgaaaagagaaggaggagtaggattaacgagaaaatgaaagccttacagaatttaattccaaattccaacaagacagacaaagcttcaatgctagatgaggccatagaatatttaaagcagctccagcttcaagtgcaaatgttaatgatgagaaatggtttgagcttgcatccaatgtctttgccaggaggactaagacctatgataatgcctcagactggattgaatcttgatgggagtaatggatttcagaattctacctgtgcaattgcctcatcttcaaatgatgaaagcttggtgcggcatgcctttagttttccaaagcaatgcagcatctcaaataagtctattggtgtaccctccgtgaaaaacatagcaacttcggatacctcatccacttttcatccctctattaaggatgcactctacggcaacatgccacaaccgtttatggatacaacaaagattggaaaaccctctccagacgtgtcttaaacagctcgatttcattgagggagaaaagaattttttagatggcaagtcgcctcgtaaaagggtagctttgttcaggcattataatctacatttaaatctgctgactatatgacactccattgggttgttcctggtgcagtttaatttgtagcagtttgacagagtctttgtgccattgttgacacttgcataaaaatgtacaagtattttataacttcatcaattgcaaaatgcagataatgaacattctgc

SEQ ID NO: 27733 - DNA, 1390 bp, Glycine max
  Clone ID: TF_GmC75820_1
gggagaagagggtggtggagaagtgagaagggttagggttgtttttgatgatgatgatgagaaggtgcagaggatgaggaagggggtgttgcagaagctgcacatgacttttgggggttctgatgaggacaattatgcttttgggttggaccgcgtgaccgacacagagatgttctttcttgcttccatgtacttctcttttccccgggggcttgggggtccaggtaagtgttttgcttctgggaagcatttgtgggtttcggatgtgttgaaatctagttttgattactgtgtgaggtctttcttggccaaatctgctgggattcagactgttgttttagtgcctactgattttggggtggtggagatggggtctgtgaggatggttggtgagagttttgagttgttgcaggctgtgaaatctgtgttttctgcacaggcatcatcattattagtcccccacatggttaagccaattgcaccgttggatttggtgagggaaaagagagatgggagtgagagtgcaaatgctcttttatctggtttggcaattggggataagaataagaatattaacaaccacagtaataacagggtagagggagttggtgttccaaagatttttgggcaggatttgaattgttccactcaatttagggaaaaactggctgtgaggaaaatggaggagaggccaaggccgtggggaggtcatccccccaaggttaatagtattggctttccgaacggtgttcagggttctagttggggggctggtcaagttgtgaggcatcttggtcctcctgaaatgcttgctcctaggttggccagctccggcacattgccaaagctggccaatggtgcgaggcatgactttgtgcataacaactttgagcagcaacggcctgtacagatgcaaattgatttctcaggagccacttcgagggcagcttctgggagatcaataattgcggagtctgagatttctgatattgaggcgacgtgcaaggaggagagagttagtgttgccgatgacaggaggccgaggaagcgtaagaggaatgccggctaatggaagggaggaacccctcaatcatgtggaggctgataggcaaaggcgggagaagctgaaccagcgattctatgcattgcgagctgttgtaccaatttctctaagatggatacatcgctgttgagagatgctattgcaccatagagaatctaaaagtaaagtagtgggcatttagagacgtagaataatagcttctattaaccctctagggcagccagtttatgtttgtctataatatacacagtttatcataagaagtattattcctgctatgtcaattattttgtttagtttaaccattctatcattttaccttgaaaa

SEQ ID NO: 27734 - DNA, 1072 bp, Glycine max
  unsure (1)..(1072): unsure at all n locations
  Clone ID: TF_GmC126039_1
gcataagcatcacttcacgttcatgaccacaaaaactgaaactgtaccacactctttcagtcccccttaggtttccttcttattagcctccccccctcacacctaccctatcatcatgcaccactttgccatggacaactctcacctcctccaattccttcccaacaccaccaccaccaccaccaccaccaacacccccttcttccatgctgcacctcacactcacaccatgcaccaccccctctctactaattcctccaataatactaattactaccccttccacctctcccaaattaccgaaacaccctcccaccatgatagagcccttgctgccatgaagaaccacaaggaggctgagaagagaaggagggagagaatcaactcccacctcgaccaccttcgcactcttctcccttgtaattccaagacagacaaggcttcgcttctggcgaaggttgtccagcgggtgaaggagttgaagcagcaaacctcggagattaccgagcttgaaaccgttccgtcggagaccgacgagatcacggtgctctccaccaccggaggcgactacgcctccggtggcggcgacggaaggctcatcttcaaggcctcgctgtgctgcgaggaccgctccgacctcatccccgacctcatagaaatcctcaattcgcttcacctcaaaaccctcaaagcagaaatggccactctcggaggaagaacacgcaacgttctcgtggtcgctgctgacaaagaacacagcattgaatccatccatttccttcagaactcgctcaggtccattctggaccgatccagttccggcgacaggtcgaaacgacgccgtggcttagaccgaagactgatgtcttgaaccggatactgtttccatagctacacatgcaaatgcatgccttactagtatcactcctaatattgttggttaattcgaaatggtttatgtgtttgcaggttttttgtaatgtaaaaagaaattaagacagatcatgagtttaaggactatgcattatcagttcaaatataaacattttngcactctcaactaatcataaaa

SEQ ID NO: 27735 - DNA, 2075 bp, Glycine max
  unsure (1)..(2075): unsure at all n locations
  Clone ID: TF_GmC42302_1
ccacgcgtccgctcttctcttcctctttgattgtttgtctggattttgagttctgatccaaactgttgaagctgaagaacctgagcccaattgaactctaacgtgccaaaattttttgagttgcatgtgattgtgaagataagatgagtattgtgtatagtcatgctgtgaagtactctcaaggggaaacaaggatgaacccagaaatggattcaaacattggtcaacattgtcaccaacaaaattctggactaatgagataccgttctgccccaagctcattgctcacaagccttgcgaacaacaacaacattaataataacaccaccaccaatggttgtgttaatggcaaagctttcagaagtgtgcataatcatcatcagcagcaacgttatcctccctccacaagttctgaaatggagaccatgttggccaagttgatttcttcaaacaattctgagcctttgcaagtgaaggaagaagcagtggcctctgtttcacagccaccacaacagcacaatggttactcctatgggtcttcacctcagatgatgtaccaaactcagcaaattcaaggcttgtctatgccaaatggttctttagggaatgcttttgatggctcattcagtgcagtgaattcccttgcttcacagaattccacacaacctagactgggtgcttccaccaattgcaacaatctcattaggcaaaagagttcccctgctgggtttttctccaattactcagttgataatgcaatgagagatgtggcaagttttaggggctgtgatgtctcaaatggacaagctattacatcctcaagtgggttgcatggtggtactttgaacttatcatctaggccatcctcttgctccacccgaatgccacagattgctgaaaatggaaatgaagatgtggaagcaaattatgttgaaagtagaaacctgagaaatgacaatatcaacaccactaaatgttacatgcctagtttcaccactgacttctgggatggttctgcattcagtgcctccagaacagctagtaacagaggtgaaatctcattttccacttcaaaggctatggatattcaggatgaagattttggataccaaaaagttggtttgacccaccatttgagtctgcctggctcttccagtaggatggctacaatggagaagctttatcaaattcaaggatctgttccatgtaaaattcgtgccaagagaggttttgccactcacccgagaagtattgctgaaagggaaaggagaacacgaattagcgcaagaatcaagaaattgcaagaccttttcccaaaatcagacaagcaaacaagcactgcagatatgttggatttggcagttgagtacattaaagacttgcagaaacaagttaagattctcagagatactagggcattcggcaccagtacaagcaatcagaagcactgatttatatatccttgtagataacaaaaagaaggagcatttttttttcttttcatgtatttatcctttggtgtaccaaaatttttggtcagtgtgattatgtagagtagcgctgatatttgctagtatctaagaatttaggtccaggtccgtgtgagtctcttcagttttgtttttcattttccctcatttgttttttctttctttcctttgcttgatttaagtatcacaatgtaataaaaagtttagaaagagccaattgtaactgttcattttactcataagaggtttgatggcatcacaaaataaaattgagtctcaactgtcacacgctaaagattgagttctatatggaagaaattaccggtgcaataagtagttaagatctttgtattcgtgttgcaaatatagggggtgtcctgattaggagttcagaaaagaggggtggaattgccttgatgttgaaccaatgccaagctatgcacactccagtgcttatcatcatttcagaagggtgatgaagacattagatgtgagaggagaggtctagcttatattagatgtagcaaagaagagtgctgggaatttattttccaatacaccgaatttgttagaacaacnngatca

SEQ ID NO: 27736 - DNA, 591 bp, Glycine max
  unsure (1)..(591): unsure at all n locations
  Clone ID: TF_jC-gmro02910073h08a1
ggctcgaggttcaccaagacacactgacgtacatgtttgattttgagctgtacgacttcgttgctgatccaaattttgatcagttcatcaatttgttccgaggagagaatgaagatgctaactgtgatcacttcggttctgaccttatcaatgattgttttgctaacaatcagcagcagctactttcatgtccagcaaacccttttgatcagaacaataataataatgctgtgaatgtctatgatccaagctccacatttagctccttctcttactatgatagggagctcaagggggaaggaggagaagaacttgatgaagaacattcttctgggacgatgacaacgacaactaacaatgctgttggcaaaccaaaagtaaaaactgatatgtccaagactctcatttctgagaggagaaggagaggccgaatgaaggagaagctttatgcattgcgttctttggttcccaacataactaagatggataaggcttctataattggagacgcagcatcatatgtgcatgaccttcaagctcgagctangaagcttgaggctgaggttgcaggacttgaagcatctttatagt

SEQ ID NO: 27737 - DNA, 1833 bp, Glycine max
  Clone ID: TF_GmC154228_1
cggctcgagcggctcgagtacggctgcgagaagcaaaagcttggggattgctgcgcgacgatcttccttgtttgtgaattctattctattctattctatcagcactttcaagtttcaagacagcaagcatatcatacaaaccttgtcccttgtcattatactttcactgaaatccaagtcagagtcaattctcagtgtctcacttcccaaaattcttcacccttttggccttttttcccattcagaaaatatgattcagttcaatacaaccaagatgaaaaagtggatgttttcacactgatcttctccttaaaccccgccaagttagtttttctttttcttttcccttgcctaatggaagttatgtcaaacaccatcatcaagcaaagcaacaacatagcaatttcacaaggcaccatccattttcaaaaactttctttctggttcgcccctcgaactcgtccaccgggttaattttccttctgatctttctcttggagctccactccactaaaagggttttcaaaggttttaaaaaacctctaccatagcaatttcaactacaaaagtcaaggattttagactaatcgcaattcgtgattgtaactgtggttgcatcggctgtatttgttggtaatttttttacaacatcaagtatcaaaataaaactgcaaccacgactgcaatttaaaacctttaggactatggtttactccttctatgacaaaacctcttcttcttctggctccgatatttcggggttgttcaatcctactttgcataaccttggagcttgcaatgacttgtcatcatcaccacattctttggtatttgagagtgataagggagagctggtgaagtgccttgcagctgcaaaggtagggaagagtgagatttgtgaggccaaagctttggctgctttgaagaaccacagtgaagcagagaggaggaggagggagagaataaacggtcatcttgcaacactacgtggccttgtgccatccactgaaaagatggataaagccactttactggctgaagtgattagccaagtgaaggagttgaagaaaaatgcagcggaagtaagcaagggttttctgattccaaaggatgctgatgaagtgaaagttgaaccatataatgatcatgaaggaggagaaggatccatgtcttactgtgcaactatctgctgtgatttcagacctgaaatactatctgacctaagacagacccttgattcccttccactgcatctagtcaaggcagaaatttcaactttggcaggtagaatgaagaatgtgtttgtcttcacgtgttgcaaagaaaacattaataatattgattttgaaaaatgccaagctcttgcaagtactgttcaccaggcactatgttctgtgatggaaaaggcttctgcctcactggatttctcaccaagaacatcacatgcaagcaagaggagaagactatgctttattgaaacatccaattccacatgcaaccatgggtcttgtttgtgctgatgtcaagaatttgatgtgttatgttatctgtttctgctgcaagtgttagagtgtggtattaacatttcttattttttgaggaatgctaacaacacacctgatagtatattgtttaatatgttttctattattgggtgaatctcactgaacaataaatgagattcgttaaatagcatatgtgacatcatataatgagagtcacgtttatccaataatagaaattgtgctaaaaaaagtttgtgagagaatgcactattcgtcttactatgcagcaaaattatagctgtttgtattgaaaaaaaaaaaaaaaaaa

SEQ ID NO: 27738 - DNA, 715 bp, Glycine max
  unsure (1)..(715): unsure at all n locations
  Clone ID: TF_LIB4281-033-R1-K1-C5
ccacgcgtccgcggacgcgtgggcggacgcgtgggcggacgcgtgggcggacgcgtgggtctgaacactctaaaaaaccagagccaaaccccaaacaaaattgtcttctcttctatttctccaattacaactcgtttccctaactcggccgagtcatcatggcgaatcacccttccgaagctcccaccgacgacttcctggagcaaatcctgggcctctcgaccttcgcctccgccgaccccgccgccgacgcctctccgatgatgcttcagctcaactccggcgacgccgccacccacctcgccgccacccacctcgccgccttccacgcgccgccctaccagctcggcctcagcttggaccaaggtaagggaccattcctcacgcccgaggacgcttctggaagcggcaagcgcttccgcgacgacgtcgttgataccagacctaaaaacttttttcatggacaacccatgcctactactgttcctactgctccacatccaccagcagtgcgacctagagtgcgggctagaagaggacaggctacagatccgcatagtatagctgaaaggttgcgcagagagagaatagcagaaagaatcagggctntgcaagaactggtccctagtgtcaacaagacagatagagctgccatgctggacgaaattgtggattatgtcaagttctttgagcttcagtgaaggttttgagcatg

SEQ ID NO: 27739 - DNA, 1915 bp, Glycine max
  Clone ID: TF_GmC8965_2
cttcagccaggcaacaagcctggtgccacctataagttcacaaacgctaggggacatggtggattccttcactgggacaaccttgtttaatgtcagaagagaagaactgagacgaagcaaaagctgaaaagcttaaactggcgaaatataaagacccatccaaaagcactatacgaaatccaatcccaccactctcttttttcttcttccttttcgtgctctctctcaaattcaacacgagagacacaaaacaaaacattctcgggaagcgtaaccgcccagaattccgaccattttcacagaccttgttttctgctcttgatgtttttcaccccccaaatgtggcaataaaaaacgggtggcttaatttgacacaatcggtggttattgcaaagttgagatggcaggtaatagtggttcagaggggttgggcgatgatttcttcgaacagatcttagcagtgcctgaagccggcacagtgggaatgttgcaattggggtccacaactggtggtttcagaggagcttctgggttaatgcctctgggcttgaatttggaacaagctgccttcctaagacaccaagttaacgttgacgacgacgttgttcatgttaatgttgatgatgccaccatccaccaacatcacctcactctccataacaacaacacctcctcatcaccctcttccactgcaccaatcaccgatagggattctatgcatatgaggggcttattttccgcgtttggacaactgcatactcctatccgccccacgctgccattgcctccaccacctcgtcagccacaactccacctccaccatcataaccaacagtttcagggccaggcagctgcagctccagcgtcaatggctgctatgccacaaccacctgggatccgccctcgtgtgagagcaagaagagggcaagctacagatcctcacagtattgctgagcggttgcgtcgtgaaagaatcgctgaaagaatgaaggcattgcaggaattagttcccagcatcaataagacggacagagcggcgatgcttgatgaaattgtggactatgtgaagttccttaggctccaggttaaggtcctgagcatgagtagactgggaggagctggtgcagttgctcagcttgttgctgatgttcccctttctgcagtggagggggatcaggacatagaaggtgtatccaatgagcaagcctgggacaagtggtccaatgatggcacagaacaacaggtggctaagcttatggaagaagatgttggagcagctatgcaatttcttcagtccaaggcactttgtatcatgcccatatctctagcctcatccatttttcgcatgcctcaatcggaagcatcaacaggcatcaaacctgaatctaacagtcactgatattagcgatagaaccgaaacaaaaagtatcatgacagacactagataattaaatttcttcatccttaatttatgacaagggtaatattctactttcttgtataatttaattttcctgattggatggagaaggatctagtcggtgcagcagctggttcactcttctcaagttttgtcaaagaaggagtaattgttattcctattaagtaaaatcggaggagccaagcaaatgtccttttcatggtgaagattaatattttcaatggccttattcaagtttttcttgcaaatatctgtggtggggttggtggtggatgaccaaaatatttgtagtggaacctcttttcttggtttagtatttttagtcagtggggagtgggaccatttaaaaggaaaggatggttacgaatgatgtatcgggagaaaactttaatacaagttgaattataatatggttagttaccttgtaaagatgttttggaagcatctgacaattggaaaagctaaagatatttt

SEQ ID NO: 27740 - DNA, 1044 bp, Glycine max
  Clone ID: TF_GmC227_1
gtaattttgacgtgattctgttcgcctacaattaacttgacagttgatcatacacactcttcttcttcttcttcttctctcttcttgcttgcaatatggacatgaattcctcaggtggtgcctgcggttggctttatgattatggctttgatatccctgttgctggttctgacttcatggcttcagactctggtggtttcagttgggggccccagagttacaacttcaagggtccttcaaatatgagcttggaaatggaatactcactggattcaactgtcatggaaaatggtccttcaaagcggttaaggactgaatcatgtgcatctggctccaaggcatgtcgtgagaaattgcgaagggataaacttaatgagaggtttctggaattgagttcgatcttggagcctggtagacagcccaaaacagacaaagttgcattattaagcgatgcggctcgagtggtaatccaattgagaaatgaagccgagaggctgaaggaaatgaatgatgaattacaggcaaaagttaaagaattgaagggtgagaagaatgagcttcgtgatgagaagaataggctgaaggaagagaaagaaaagttggagaagcaagtgaaactgacaaatatacaacccagcttcctacctcaagccccagatgctaaagggcaagttggtagccacaagctgatacctttcattggataccctggaattgccatgtggcagtttatgtcccctgctgcagttgatacttcaaaggatcatctgcttcgacctccagttgcataaagtggttagcaatagcatccacttctttgttgtatgtgttctttacatgtgttatatttttgtgtttaagttatccatcctgtctaatgtgtgttttctaaagtcactggtagaaagtgtgctcggaaactggttaatagtataagtttgtgctgttgctgtctgaactatgataagaaagtgctacatgtcatggctacaaagtgtgttgcatgattaaaaataaaagtcagtttaagtggttctttgctgt

SEQ ID NO: 27741 - DNA, 431 bp, Glycine max
  Clone ID: TF_GmC227_3
atctcgagccgattcggctcgagtgaaatttgtgattaattagcctttgtgtgtcttttttttttatttgtcacctttctctctcttcaggttaaggactgaatcatgtgcatctggctccaaggcatgtcgtgagaaattgcgaagggataaacttaatgagaggtttctggaattgagttcgatcttggagcctggtagacagcccaaaacagacaaagttgcattattaagcgatgcggctcgagtggtaatccaattgagaaatgaagccgagaggctgaaggaaatgaatgatgaattacaggcaaaagttaaagaattgaagggtgagaagaatgagcttcgtgatgagaagaataggctgaaggaagagaaagaaaagttggagaagcaagtgaaactgacaaatatacaacccagcttcctac

SEQ ID NO: 27742 - DNA, 1695 bp, Glycine max
  Clone ID: TF_GmC135879_1
atgtacatgtccatcttaaagaagaatgtaaagaggcagttgcaaaactggatgctcaggaggcacagggaactgctgtaccaaaaagactatcagcattttatatggaaaattatggacaagagaccaatgagtacaggagacaggccaaaaatgcatgatcaaaccggttgctttgatcccaacacaacgggagaaagtgtaccctctctgaaggataactttcctcaaactctacctccatcatcacctatggttgttgtaggaaacaccaccacaaacagcatcaataatagccttgaagagaatctcaggctttctgtggaggagctctcctgtaaccatcacaatccacaacaccaacaagatcatgtctccacctatgcaagtggagtaactgccacatctattgaaatcccacttccacagcatcttggtttgaacatgggaaactcctacatcaacaacaacaacaacatggataatcatttggtgcaagaggtcattgatgcatttccctatcagcagtccacttgggaccctactattgttcaggaattacaagacatggcctatgctaatcacacagaacaaacacaacagcaacaacaaaatgaacaacaatttcagcaatttgagactcaaaactgcagccaaagctacaacaacccctcttccatactagaccctccttacccttcaccagatctcctaaaccttctccacatgccaagatgctcagcctcatctttgctcaccaatccctccatttgcctcacaaacccaactcagaacacaccaaactttcagaatccaatggcctttcttggagatcttccaataggatcagaaaacacaagtgcatcctcagttttgtatgatcctctattccatctgaaccttcctcctcagcctccagcactcagagagctgtttcagtctctcccccgcggctatagcttgccaacaaactcgaggaatggctcactctttggtggaggggatgagatggagggtgatggaagccagcttgacatgggagtgctggaattcaacagggtcacactcacaccttctgttggcaaaggaaggagaggcaaagctaccaaacattttgcaactgagaaacaaagaagagagcaactcaatggaaaatacaaaatcttgaggaatctcatcccaagccccaccaagactgatagagcatctgtggtgggggatgccattgactatataagggagctgattagaacagtcaatgagctcaaactactggtggagaagaaaagatatgcgaaggacaggtgcaagaggcccaaaacagaggaagatgctgctgagagctgcaacattaagccttttggtgatccagatgggggcataaggacctcatggctccagaggaaatccaaagacagcgaggttgatgtccgtatcatcgacgacgatgtcacaatcaaactcttccagaggaagaagatcaactgcctgctgtttgtctccaaggttctggatgaacttcagctggagcttcaccatgttgcaggtggacatgttggtgaatattgcagtttcttgttcaatagcaagataatggaaggttcttcagtctatgcaagtgccatagccaacagggtgattgatgttctggacagtcagtacgcagcagcagttccacatacaaacagctattag

SEQ ID NO: 27743 - DNA, 584 bp, Glycine max
  Clone ID: TF_jC-gmXLIB3563P001be05a1
ctcgagccgaatcggctcgagcggctcgagaaccctctctaggagtgacagagtctgcagcgaagctagggcagtggacatcaacggagcgaacgtcacagtcgttttctaacaatcgtcacggcggtttcagctctcgctcttcatctcagacaactgggcagaagaaccagagttttattgaaatgatgaagtctgcaagggatagtaatgcccaggatgaagtgctagaaagcgaggaaacattttttctcaagaaagaaccctcctcgaatacccaaagagaactcagggtgaaagtggatgcgaagagtactgatcaaaagccaaacacaccaagatcaaaacactctgcaacagaacagcggagaaggagcaaaattaatgacagattccaaatgctaagagagcttattccacacagtgaccaaaagagggacaaagcatcttttttattggaggtcgttgagtatattcattttttacaagagaaggtgcacaagtatgaaggttcatttcaagggtggagtaacgagcccgaaaaattgatgccatggagaaataatgacaagccagcagaaact

SEQ ID NO: 27744 - DNA, 1341 bp, Glycine max
  Clone ID: TF_GmC330_3
tacggctgcgagaagacgacagaaggggaaaagtgaagaaaacagaccaaaaatagaaagaaagagaaataccaaaaccttggcgcatcatattctttattccctcacttggatcgttaattccgcgaacgagcttctgcccttcaaattaaccatggagaatattggtgaggagtacggctactggccggagaacgacatgcttttccaaaacgaagaccttggcagctgggcgataatggatgaggcagcgttatcagggtcagggtactatgattcaagctccccggacggtactggtgcttcttcatcggtggcatctaagaacattgtctccgagaggaatagaaggaagaagctcaacgataggctttttgctctaagagcagtggtccccaacattaccaagatggataaggcttctatcattaaggatgctattgagtacatccagcacttgcatgaccaagagaagagaatccaagctgagattttggatcttgaatctgggaataaactcaaaaacccaacctatgaatttgaccaggacctccctattctgctcaggtccaagaagaagagaacagaacagctattcgattctgtcagttcaagaaattctccaattgaaataattgacctgagggtaacatacatgggagagaagacgtttgtggtgagcttgacatgtagcaaaaggacagacacaatggtaaaactgtgtgcggtgttcgaatctttaaagctgaaagtcattacggccaatatcacttctttttcaggcacgcttctgaagacagtcttcatccaggttagtcttccattttgcccttcttaaattaataagtaaataaataaattgttaattgtttaatatttgtgtttaaagattaaattagtttttttaaaaataatactcatcggctagaattttgggggccacatactaggaaacctatggaccactttaataaaagtgggaaacccatttatgggataatgggcattttagggtcaatgatgagaattaaggaccttatggcagtgtcctattcaaatcagctgatgaggcaattaacaaggaaggaccacgtgaatcttgtgctttaaacaaagattgatgggaggaccacatgaatattgtgctttaaacaaagattgatgggaggaccacatgaatattgtgctttaaaaatagagaaaaaattatgtgagtattatatgattattttggtgatttttatgcttagaaagaaattaatttctacttatcggtagaagatattcttttgaaaataaataaataataaaagactcaatttcatgacgtaggggataaaa

SEQ ID NO: 27745 - DNA, 464 bp, Glycine max
  unsure (1)..(464): unsure at all n locations
  Clone ID: TF_jC-gmst024125b09a1
ggctcgagggtcaagcaacgtgtagtcacagccttgctgaaagggtgagaagagagaaaataagtgaaaggatgaagacgttgcagcgacttgtgccaggctgtgataaggtaaccggaaaggcccttgtgttggacgaaataatcaattatgttcagtccttacagaatcaagtggagttcttgtcaatgaaacttgcattagtgaatcccatgttctatgacttggccatagacttagacactctcatggttagacccgatcagaaattaaattataatatagcatcaccatcaccatgtttagcacaattcagacccaaccaggccattgcttttgctgacacaaccactaccaacagtttccccacagctaataatggtgactatcttttggattattcatcctcactttttcttcaaggcccgagatcaaatcttctttttgagtataacngtggtcag

SEQ ID NO: 27746 - DNA, 1164 bp, Glycine max
  Clone ID: TF_GmC1312_1
aggttcacgaagacacactcaagtacatgaatgattttgagctgtacgactttgttgctgattcaaattttgatcagttcatcaatttgatccgaggggagaatgaagatgccaactgtgatcatttcggttctgaccttatcaatgattgctttgttaacaatcagcagcagcccctttcatctcctgcaaacccttttgatcagaacaacaacaataataataatgatgctgtgaatgtctatgatccaagctccacattcagttccttctcttgttttgatggggagctcaagggagaaggagaagaagaaaatgatggagagcattcttctgggacaacgacaacgacaacgaagaatgctgatggcaaactgaaactaaaaactgataggtcaaaaactctcatttctgaaaggagaaggagaggccgaatgaaggagaagctttatgcattgcgttctttggtccccaacataacaaagatggataaggcttctataattggagacgcagtgtcatacgtgcatgaccttcaagctcaagctaggaagctgaaggcagaggttgcaggacttgaagcatccttattagtgtctgaaaattatcaaggatcaattaacaatcccaaaaatgtgcaagtgatggcccgtaatattagtcatccaaactgcaagaaaatcatgcaggtggaacatgtttcaagtggaggaaagagggtacttagcaaaaatagtgtgcaataaaggagaaggggtggctgcttcactgtacagggctctcgagtctcttgcaggttttaatgttcagaactcaaacttggctacagttggtgagagttttctacttacatttacgttgaatgtaaaaggaactgaacaagaaattaacctgccaaatttgaagctatgggtgactggcgctcttctgaaccaaggctttgaattcgtggcatcttttcctgcttgactcactgcaccaagtatgacgtagaagcaattgcattttagagaatatgatgagccatgaaatattacgtataatatccacgtcaacatcttgagctagtatgatatcacttagtattaccgcaacaccgttgctaccttcgttctgtgtaattctccagttttcagaacaaataataacactacaaagactagc

SEQ ID NO: 27747 - DNA, 894 bp, Glycine max
  Clone ID: TF_GmC544_1
atcaattaaaaaagataaacagaggagaggagaggagaaggcgatgcaacccacatccggcggcggcgggctggcaaggttccgttcagctccggcgagctggttagaatcagttctgttgaaggaagaggaagaagaagaagaccccttaagcttcactcaactgctttccactatcgatgatgctccctctcattctcaacaccaactctatggtgccgctctctcaaacaaggataaaacacctgaaatcttcatgttagaagattccgttccttgcagagtgagggctaagcgtggctgtgctactcatcccaggagtattgctgaaagggttcgcaggactcgtatcagtgaccgcatcagaaagctgcaagaacttgtgccaaacatggataagcaaacaaatactgcagatatgttagatgaggctgtagcgtatgtcaagtttctacaaaagcaaattgaggaactgtcagagcaccaacggaggtgtaaatgcgtggttcaagagtaaattgctgattgttccatgcagtgcttggctttttacgatttacttatgaattattatcagaatttttttatgttctgatgaagatcaaccataccacactctggatgctaattaaatttaatatctcctgataacttaaaagatgcatatattatacatgttaggggtgacattgccaagttcgagacgaataaattacaaatagaattttaccctagagtgttataattgtgttgtagtgttgtacaactcttaagatacacaaatctgccaagttaatagctacttggacttaagatatatacataaccatatgtgttattttattaaataaaaaaaaaaaaaaaaaaaaaaaaaaaaaaaacccaaataaaaaa

SEQ ID NO: 27748 - DNA, 2512 bp, Glycine max
  Clone ID: TF_GmC7716_1
cggccgctcgaggcggcaggccgggctttgcttgagttgagtttcttctctctttctccttcctcgtccacctctctacactcacgagatcttgctcttttttgtcaaaaagcagcaaaataatcaaatttggcaaactgcccaaactcatctctttctgcttgtccttttccctgtttggggtgtttatctgttacgcttctgcacaacacctttccctttataatccctccttgaattttgtgcaaccaaggtttccttttccttcccgtttgggttccttctcagttctcacgtgatccttttcatttttttcatctcccataatgattctctagcatctcatatcaccttgttgactttgttctctttcaagtaacaaattaattgattatggattcgaattcgcgctaccaagttcagcagcaacaccaacacaattctgggttacctcgatttcgttctgcccctcccgcaaatctcaaacaacaaggcgaagctgccaataataatgggagcgcgtgggagggttctgaaccgcttttgagattcttgaattccggggacacccatgatacgacgtcgtcgcctaccttacgagaattcgtggataataaggtttctaataatagtaaacctgcgaaggagtcatcatcacctctgagtcgcatgaattcccaacacagttatagtacttctatgttaccctctcggagtactgtggcttcagctatgatgatgttttcttccggaaagaatcagagtgcagcaagctttgatgcgtctcttctcaggcaaagtagcttccctgctggccatttctctaacaacatctcctttcagaacgggtatgatactatgaaaggtgttggaaactatagtggggtcaatggcaatgatggtgaacttagtctatctatgaacagaatgaagaatcaaataagcttctcatcaataagtccttcttcttccttgggagtgctatcaccaacttccaaaataggcacggagggtattagggtaactagcactgaggatgggaggcagggagggagcaatggtgatgctcgatattttggccctggattctcctatgcttcttggaatgagccttcacaccacaaaagacagcgaagtagtaatgatgagttactttctgattctcaggatggagaactaggaaatcaagttcaaacactttcgcatcatttgagtttgccaagaacgtcgtcggatatgtttgctatggatagtttgcttcagttttcagattctgttccttgtaaaatcagagctaagagaggctttgctacacatcctcgaagcattgccgaaagggtgagaagaagtcggatcagtgaacgaataagaaaattgcaagagcttgttccaaacatggacaagcaaactagcacagcagagatgttggacttggctgtagactacataaaagatcttcagaaagaattcaagactctgaacgataaacgggctaaatgcaaatgtataaacatgcagaagtcagaagcagatcaagttgcttgagtttcttttgtacaggtaataaaaaggaactacgccaaacatgaataggacccgggttttatattttgacgtgctgaaaaatcaatagaacaaagttaatatgcagaatgccagcttttaactcttcatgccacattgtgtattttgagttaacgggagttccagccacacagacaataaatcataattttgtatacaaaaattctaatgaattaattttagcttatttttccccgtgctcctaaacttatcaaagacttcccagagtttggattaggaggaaaatttgtggtttctttctttttattattacaaaacaatttagatgagttggatttcaggaactcaccaagctaaacagcttttaagactcaaagaatgagatatgaatttgtttttttaaaaaatgaacattgactattcttttttatggagagcaattcaatattgcagagatactttgattttctcattttattgttagggctgccaggttgtttgaagaaattaaaaagtgatgcaggtatgaccgaataagccatgaggtactccacgcttggatggatacttaaacagagattccgggaatggttaaagaatttgacgtaaaagattgattgttacactcaaaatagcaaataggttgaaatcaagtaatcaacacgggcttcaattcaacttgaaagataaagacgaaaaacagaagtcgttttaaagggtttcattttatgaacaaaaaatatcatttgaattttgacatttagggtctattacatgaatgatgtggggagcaaatgttagtctcatctggccaacttgcttgtattgcaacaaagtcatgtcgattggagggcccttatataataatcccaaacaaaaccgttcaataccaagtgtaattcgcttcaatccggtcgtgttcatagtagattatccagttaaatgttaatttgttgacaaatgtaaa

SEQ ID NO: 27749 - DNA, 600 bp, Glycine max
  Clone ID: TF_GmC142014_1
atttgttaactgctcctaagtcctaactaacaagtcttcaccatcattatggttgctttgttttcccctccagtgttctcaaccaagggatggctcttagaagaggatccattaagctatgatgtgtcctctgagtactcatttccctatcaattttattcaccacagacacagattgagcttgaaattgaaaggtccacttctccatcccctgaagaccctgccatggtcaaaaagcttagccacaacgctagtgaacgtgatcgccgcaagaaggtcaatcacttggtttcttcacttcgttcacttcttccagtggctgatcaaacgaaaaaaatgagcattccgactacagtttcgcgagttataaaatacatacccgagttacaacagcaagtggaagcactatctaagaaaaaagaggatcttttgtgcagaatttctcggcaattgcaaggagatgcggtgaacaaagaatctcaaaggagaatttcccatcacaattctgattttgctgtttcaactagtaggctcaacgattgtgaagctgttgttcacatttcctcttatgaggctcacaaggctccactatccgacatc

SEQ ID NO: 27750 - DNA, 1285 bp, Glycine max
  Clone ID: TF_GmC85409_1
gctaaaatgggtttctattttggtaataggagattcgatcaatataaatatatatatatagatatatatatatatatatatatatatgattatatacgttatgtacataactttcctagaaattattcaaatgggtttctattttggacactaatgactatcatttattcagtgaatatgacatgaactctgtcgaggaacaattggagggagagaattcagtggatcctggtgaactctcatgggaaaatcactcttattcatatctcactaaagaaagcaccacccttttgagcaattcttcatctttggaagagatcaacactggctttgatatgacaagtctcaaacaagatgcttctccacagaaaccgaagtcttgcattctgtcttttgaggattccactttagtgccaattaatcccaagaaaacatgccaaatatatgatcatggtgaacattcaaaggagacacaagaaaagccacacaatagaaaacccctcaagaggggtagacgcttttctcagacacttgatcacatattggctgaaagaaaaaggagagagaatatcagcagaatgttcatagctctttcagcacttattccagacttgaaaaagatggacaaggcttctgtccttagcaacgctatagagtatgtgaaatatcttcagcagcatgtgaaagatttggaacaagagaacaagaagagaaagacggaatccttaggatgtttcaaaataaacaaaacctgtgatgataaacctataaagaaatgtcctaaagttgaagcaagagtctcaggaaaagatgttctcatcagagtaacgtgtgagaagcaaaaggacattgtacttaagctactggccaagcttgaagctcataatctctgcatagtgtgtagcaatgtcttaccttttgggaattccgctctcagcattaccagcattgctatgatggaccatgaattcagcatgacagtggacacgtacgacctagtgaaaatgttgactgaggaattgttggagtgctgtaaattgcaacgataatgagccacgctaacgaattggctaccagtaaatttaaaagtgcattttaagcagttcaagcattttatttggtgtccctattagataattaatattggcagtatcttcatatattatgcatttggtgtgcataatagttgtctttttggccatcttcacaaataatcatcatttttatggcaaaataaaatgattttgtgatttcacattttgtgcattttcaatatttttatatt

SEQ ID NO: 27751 - DNA, 1397 bp, Glycine max
  Clone ID: TF_GmC298_2
ctcgagccgaaaagattggtttgagtcggtatcgattcagttaaaacacgtcgtgtcctaagactactggtactaggtaggttgtacttctcttcatctggagaaacaaatggctaggtctgcgaaagggcatcaggatgaattcgacgaagatgatgaagaagaactcttaactggaaacatctcttccaaagtgaaggtggatgaacccagcacggggaagagggtgaaccctcatcgttcaaagcattcagaaactgagcaacgtagaaggagcaagattaacgaaaggtttcaggttctgagagatctcatacctcaaaatgatcaaaaaagagataaggcatccttcttgttggaggtcattgagtatattcagttcctacaggaaaaattacaaatttatgaacagacttatgaaggatggaatcaggagcccacgaaattaactccatggagaaataatcacggacctgcagaaaatactacagatccttctcaagctactcaaaatgggtctgttgatgagaaaaataacaatgtctctccattgttgcccaaaaatgtacagaacccgatagagtctgacttctcaatgacaactattcagaagggcaacatccctggttcaactacagaagcagttcccctgcccatgcaaatgcgattggacatgtttgatccagttgttagcagtagtatggcaacccaacatctgctggaacctgtatctaatgttaacatgctttcccatacccagcctcaattgtggcttgataaacgaaacaagggcaactatattcttccacataatgatacaatgaaggaacaggaggagctggtgaatgaaagtgggtcagatagcatctcaagtgcctattctcagggaattttagattctctcacacaagcactgcactcttcaggcgtagatatgtcccaaactaatgtctcagtgcaaattgatgttggtagacaagaaaatgctgggctgatcccctctgcatctacttcaaagggtcatgaaaaccaatctgtgagcaatccagcaatagcacgttccggagttgattactgcaatattgattctgaacaaagttcaaagaggctcagacaagaagcaagctagagattcctctcatgttcattttgtcaggagtttctttttttgctgtttgtcttcagatgagagtaagaggaattgggtggatcggttcatttttgccatgctggttagggccagatcaaatgtaaattttcacgattctggttttgggactaagacattctgaaataaaatgttatatatgcttgcttctacttcaattttccattttaatgccttcgagtatgcttgatattttaatgtcatatattcatggttttgacatttattt

SEQ ID NO: 27752 - DNA, 571 bp, Glycine max
  Clone ID: TF_15663066
gaaacctggagaacctaccaaaaagactaaagagctcaatagaggtcccaaaaacatcgaggaatgctaaatcaaggaaaaattcaaaatctgcttcaactagcaacgatgaagatgatagaagcttgagcctccaagtccaaaggaataatagctgtttttcacagagtgactctaatgcttatcttgagccaaatggaggggcatcaaaagatcctgcacctcctaatttggatagaaaatcaagagcaactaccagtgccgccgctgatccacagagcctctatgcaagaaagagaagagaaagaataaatgaaaggctgagaatactgcaaaatcttgtccccaacggaactaaggtggatatcagcaccatgcttgaagaagctgtccaatacgttaagtttttacagctccaaattaagcttctgagctctgaagatttgtggatgtatgctccaattgtttacaatggaataaacattggactagacctcggtatttctccaaccaaaggaagatcaatgtgatagcatagcaattaaagaggatataatatttcattaactta

SEQ ID NO: 27753 - DNA, 2106 bp, Glycine max
  Clone ID: TF_GmC3662_176
tggaaaatgcatggggtttcaacatggaaatgagagcattctgacttgtccaacttccggtctcagtggtgcaaatgttaatgtttcagaaatggctattagttctgtgtctatagccaagccttcagatgtagttaacccttttattgcttcttccgcttgggatccacttgtttcattgagtcaggttcaatcttttggaggctcttcaatggtttctcatagtgagtttgccaattccaactcatcttaccctcttgttttggataaccaagggataagcaacacgtctcacctggttcaatacatgtctgactcaaatcttgggggcatggtccccaaggttcactcctatgcaagtgggggattctcagaaatggttggtgctggctctttttgccaacataggtctgctgatatggctaacacagggtatccaatacattataatccgatcaaggaggctccaattaatggtgaacaatctcaggttgaggactcaattcctgaagaggaagcaccaggatctgcacctagtgggaatagaagaaagagagggcttgatcataattccaccttcagtccaaataagaatgctgagggtgatgctgtgaatgattctcctgggaaggcctctgatggttcaaaagaacatgaaaagagaccaaaagtggagcagaataatggcgcagatgtgcgtggcaagcaatcagtgaagcaagctaaagacaacaattctcaaagtggagaagctcccaaagaaaatttcattcacgtgagagctagaagaggtcaggccacaaatagccacagccttgcagaaagagtgagaagagaaaagattagtgagcgaatgaggttgcttcaagaacttgttccaggatgcaacaagataactggcaaagctgtaatgcttgatgagataataaactacgtgcaatcacttcagcaacaggttgaggtatgattgtagtgccaccttttatgctttcaatttaccatttaaaactgaatagtgcatgttaagagatattttatgataactcaataacacaattttttttgtctgttccattattattgttttgtgactagtcaacttatcaaagagatattttgcagtttctgtccatgaaacttgccacagtgaacccagaactgaactttgatgtagacaggatcctatccaaggatattctccaatcacgcataggacatggaattggtgcatatggtcctggtatcaattcctctcacaccttccccaatggaagtttccatggaacattggctggcatgtctagtacatcctcacaattccctcctttgccacagaatgttttggaccatgagttccaaagcttctatggaattggatacgattctaatacagcacttgacaacttgggacccaatgggcggttgaaaacagagttatagtgtgtgcattattacatagccatgttactacagcaacaaagactttggaattttcttgttgactgcacaatttaaccgaagatgaaaatgggaggacaatagagagggaaagaaaaagaaaaaaaataaaggttttagttgtatagggtctttaatacctaactgttggcacttcgaatttttagcagaagatgacttgttagatttatcaattggaaaatgagttacacatattatgtatagaatctagatcatgtagaacaagttgcagtggtcttgtttaatgacacggagagcagtattttgaggagcatgcgagtaaagtgtgtgcaactatcattacttttattgaattattatgtatagagttgccgggttcggatttttgaagcacaatgttttcaaatttcaagtgttgcagattggataatgtgtgtacttgactactacttatgctagggtttatggtttttctttgtatttttcttttcaaaagaaaatgtaaccaatgaggagattcttagtgcatacaacttcaaggatgaatatgttgcaacttgtatgagggtgaaagattgtttaagtagaccagtgcttcaaacattggccttcttttgtttttcattttcccatttgttggtgtttcttatttgaaaagtgtaattt

SEQ ID NO: 27754 - DNA, 1442 bp, Glycine max
  Clone ID: TF_GmC1728_1
ggctgtgttatgcggggggtgtgggtagcgaggctcgggcgtctcgtggggggcttctcaaagcagtccttagaagacagcggctattgggattttctcgattactctttcattgatcaagcgccccctgatttcctttggtccaataatactattagtgtgaacaccgaagttgacattccaggtgatgctgctgcgtgtcaagagaacaccaagaagaggggacatgctgattcaagctgccaggtgggatctaaagcttgccgtgagaagttgcggagggagagactcaatgaaaggttctgtgacttgagctctgttttggagccagggagacctgtgggatcgcgcgcccccgctctcctcgttgccgctgtctgccgctgcagccccctggtggctgatccccaggagcgcaccccattgaagctcaaagatccaacctcccacgcggtccctacgcaatatttgaaggttgtgttattctgaaagagaagatagggagggcggtttggtttggtgcaaatggattccttagaagacagcggctgttgggattttctcgattactctttcatcgatcaagcgccccctgatttcctttggtccaataacaataatagtgtgagcaccgaaattgacattccaggtgatgctgttgcttgtcaagagaacaccaagaagaggggacgcaccgattcatgcttcaaggcgggatcaaaagcttgccgtgaaaaattgcgaagggagagactcaatgaaaggttctgtgacttgagctctgttttggagccagggagacctgtgagaacagataaaccagctatacttgatgatgctatcagagtcttgagccaacttaaaaccgaagcccaggagctcaaaaaaacaaatgaaaaattactagaggaaataaaatgtttaaaggcagagaaaaacgaactacgcgaagagaaacttgttctgaaagcagataaggaaaggattgagaagcagttgaaggccttgcccgttgcaccagcagggtttatggctccacctgtagctgctgctgctgcagcatatcaagcaggggtgaacaagatggccgtatatccaaactatggctacatcccaatgtggcaatatcttcctcaatctgtcagagacacatcacatgatcatgagctcaggcctccagctgcatagttgtttctattattgttgcactttggataattatttaacatttgcgaagtattgacatgtaaatattgtcatcgtttcgattatttatttttattttttacttagtataatgtgctaaaaataggttttcaagtaatctatgatggcaatgacatgaaaactctgtcgatgtacattgcaaattgcccagttcttcacttcttagtagctcgctaaattcaatactaaatttattgaaagttttattttatgag

SEQ ID NO: 27755 - DNA, 2331 bp, Glycine max
  unsure (1)..(2331): unsure at all n locations
  Clone ID: TF_GmC1767_1
attaatgttttctcatataagtgaaaaatgaaacatgtttgctctatctaatcagtctcaaaatcaacaccatatatcgttgaaatgttcagaattaactacacctagcaagatacttattgttaaatcaaatcacatccctgttttcttctgttgtaatgatattagagtacagtaattgagagttagttttttacattattcttgcagagaatgggaagcatatttaagtgagaggtaaaaaagagtatgagagatgttaatcttaactatagaatcaaattaaatagtaagattaggtttaagtaaatcattgtgagggttgtatgctcaaaattgacttctcttatctctcattaaatatgttcccaaaattgataatatatatatatatatatgcaattgcgcataataataaacaagaccagtttgatgtcatgaggctcgagctccggacgcgtgggtttctactctcacagctgtttattttcttcctcttctcaactgtgttcgtgtgtatgcatttgagttgaaagccagactcaaggagctgaaagacaaaagaagaaacttggatttgaatcagccaaaatttgagttacacgtaattgcaaagataagatgagtgttatgtatagtcctgttctcaattactcagatgtggagcatcagctaaggaaaaaccaagacatggattcaagtattggacatccacaacaacactgtcaccaacccaattctggactattgaggtattgttctgctccaagctcattgctggcaagcctcattgacaacaccattcatggctgtgtcaacgaggaatcgttcacaagtgagaatcatcatcatcagcagcagcagcagcagcagcattatcttccatctacaagttcagaaatggagaccatgttatccaaattgctaccatccaacaatggatggagcaattcagaagctttgcaagaatttggaggcaagcctgtgaagcaggaaataggggaatctattccacaagagccaccacaacagaatggttattcttatggtggctctcagttgatttaccaatctcagcaaattcaaggcttgccaaatggtggatcttccagtgcttctggcagtgcttttgatggctcttttggtgtggtgcactccatggcttcagaggactccattcaatctaaaatgggtatcaggaattgctccaatctctttaggcaaaagagttcccctgctgcatttttctccattgaaaatgatcttgcagcattgagagaagtaggaagctttaaagccgatgatgtttcaaatggactagttactgcatcaactggtgggttgcatagttctcatactttctcatctaggccatcttcatgcttgaaacggttgccacaaatagccgaaaatggaaatgaaagcctagaagaaaattgtgaccaaagtagaaacctagtaaatgacaatggtagctcaaaatgttacatacctagcttcaccaatgaattatgggaaagttctgcattcaatgccccaaaaacagagaatgaagatgaaatcatgttttccacttcaaatattttggaatctcaggaagcagatttcagctttcaaaatctgggtttgactcaccatttgagtctacctagctcttctactaagatgtcatccatagaaaagtttcttcagattcaaggttctgttccttgtaaaattcgagccaaaagaggctttgccactcacccaagaagtattgcagagagggtaagaagaacaagaattagtgaaagaatcaagaaactgcaagacctttttccaaaatcagaaaagcaaacaagcacagcagatatgttagatttggcagttgagtatattaaggacctgcagcaaaaagttaagatactctcagattgtaaggcaaagtgcaaatgtacaagtaatgagaagcattacactagaacttgtgcttgatttatttgcatgtagatagcaaaaggatggaagattttttagtgtgccaaagttagcaattgtaattagataaaataatgctgacatttgcctggagtgagtttaggaccaggtgaatttttttttttacttttttttttcattttttcccttaatttctttttcttcatagtttgatttaaggatcataaagacctagcatgtttagcatgagttttgtagctcttcattattacatataagaatttatgttgaaatttatatggaaaaaacttttgaaacttcaaaaaaaaagggcaatgcccggacatggaacgaatnccaagnncttacggtacgcgggtgcagtgcgacgtc

SEQ ID NO: 27756 - DNA, 2769 bp, Glycine max
  Clone ID: TF_GmC5053_1
gattacaaccctcttaaaaattaatgttaactatctcatttcttctagttataatacatctactgtatcttgtaaacataagagcaccttccaacattcacatagtcaaactattaaaagatgaaatatataatgagcaacctgcatgcagctatttctcagttctcacgccagtgaagacagttttccagagaatccaatcagaaactgccacgtgtcccaatgtgccaccacttctctgtttccttggctcaggttaagaatagaaggcatctttttacagcctctcccattcagcgatttaatcggcgtgtacctttcctggaaacctcgcacttttcacagttttcactcaaatgaaacccaaatacactccacataaataccaaacccaaatccacccccactcactcagtcactaaccttatctctctcctcagatagatacacacactctctcttttccactccctctttcgccgccagaacaaaccaaacccacacttcactctcatccaattccaaattctcgttgttgctggtgcacggaatgaccgagtaccggatgaacctgtggaccgacgacaactcctccgtcatggaggccttcatgagctcctccgacctctcctccctctggctccccacgccgcaatccgccgcctctactaccactcctggactggaaaccacccgagcaccgccgcctcagtcccactccctcctcaaccaggagaccctccagcagcgcctccagacacttatcgaaggcgcccgagagagctggacctacgcaatcttctggcagtcttgctacgactattcctccggcacctcccttctcggctggggagacggttactacaagggcgaggaggacaaagacaaagtcaaaaccaaagcccccaaaacgaggtcgtccgcagagcaggaccaccgcaagaaggtcctccgcgaactcaattccttaatttccggcccctccgcttccgctgacgacattgacgaagaagtcaccgacaccgagtggttcttcctggtgtcgatgactcagtccttcgtcaacggtagcgggctgccgggccaggctttttttaactcgagcccggtctgggttgccgggccggaacgactttccgagtcggtctgcgaacgggcccaccaggggcagatgttcgggctccagactctggtctgtataccgtccgcaaatggcgtcgtcgagctcgcctccgcggaggtcatttttcagaaccccgatctgatgaacaaggtgcgtgatttgttcaacttcaacaacaacaacaacaacaacaaccctgaaacgtgttcctgggcgttgaattgcgttgccaccaccgatcaaggcgagaacgacccttcctcgctctggctcaaccctgaaatcaaagactcctccaccgtctcgccgccgaattccacggttaataagacgatgcatttcgaaacccctggttccagtaccctaaccgaaacccctagcgctgctgctgctgttcacgtccccaattctaaaagccagggattcttcccgagggaattgaacttttcgaattcattgaaacctgaatccggtgaaattctgagctttggggagagcaagaagagctcttacaatggggctttctttcccggtgttgttgcggttgaggagaacaacaacaataacaagaacaagaagaagaggtccccggtggtttctcggagcagcattgacgatggaatgctttccttcacttccctgccggctgcaaatataaaatcagttaacggtgcttgtgtcggtgccggtgattcggatcactcggatctggaagcttccgtggcgaaacaggtggtggagcccgagaaacggcctcggaagagggggcgaaagccggctaacggaagagaggaaccactaaatcatgtggaagccgagagacagaggagagaaaagctgaaccaaagattctatgctctacgagctgtagttccaaatgtatccaagatggacaaggcatcgctgttgggggacgccatattgtacattaacgagttgaaatcgaagctcaacgtgctggattcagagaaaacggaattggagaagcaattggattcaaccaagaaggaactcgagctcgcaactaaaaaccctcctccaccgccaccgccgccaccaccaccaggaccgcctccatctaatagcgtagaaccaaagaagacaacaagcaagctcgctgatttggagttagaggtgaagatcattggttgggatgcaatggtaagaatccaatgcagcaagaagaaccaccctgcagccaggttgatggcagcattgaaagatcttgacttggaagtgcatcacgccagcgtgtctgtggtgaatgatttgatgatccaacaagccacggtgaacatgggaaacaagttttacacgcaggaacagcttctgtcggcactatcatccaaagttggcgatgaactacgatagttccttctgtactattattggtagcagtagctgtagctttctatgtaaattagtgttcttatttttggttagtcctttttggtagcttggactaaattaattttattgaggtaatttgatttgggaagctgaatgatcaaccaggggatagtaatatctctgatgaagtccaagtggattttttttgtgttaatattattatctgtttatattgtatatatatatatatatatgtttatgaattatcataaatgtgaactgatgttggtgaattt

SEQ ID NO: 27757 - DNA, 712 bp, Glycine max
  Clone ID: TF_GmC385855_1
caaatcatcctcaatccatcataaagtactatacgataatgttcgtatcatgaatatatttttttaatacaatctgataacttacatgatgcactagcacggatcactaattcactattgcatgtcatacacctccaatagataatctctcagttttttcactaggtcatgcatggtcatgctgttttcgccattcatctgagcaataatgttgattataagagtagaagtcccaaatggcagtacggtgctactggttgtagagagatggagctttccaagcaaggcatgtattttgaacactatgtccttttgtttctcacaatggattccaatgagtacttcctcatctaagactcttgcttcaacctcaaatagtgatatttctttgttcgtttcacaattgccggtgtttttatctgaggaggcttcagatttccttatgaatgttgctgaatctactttgttttgattttccaactctttaactcgctcttgaagttgttttgtgtaattgacagcttcacgaagcacataagccttgtccatcttcttgagcccaggaatagttgctgaaagtgctataatgctccctgtcagttcctgcctccttttcctctcagcaattatgtgatgccgtgtctcacatgaccttctaaccttcttctttggttgggtttggggcatcaatgcatcaaactcgagctggtgc

SEQ ID NO: 27758 - DNA, 701 bp, Glycine max
  Clone ID: TF_GmC220815_1
ggctagaaaatgaagatcagatatgttaatcgttgagattggtaatgaaatgataggggtcatggggggttgttttgtttgaccccatgggaatgatggatgtgacagaggggtggtgtttgcatgggaaaagaagggttgaaagagaaggcaatgctagtaggaggacaattcattgcatcaactttgtttcctagactttccagtgccttcacctgtgacctgagaaacttgaggtagtttgcagcctcatcaagcattgatgctgtgtccatcttgcttcccccaggcacaagcttctgcaaaaccctaatcttctcatttattctctcccttctgtgccttgcagccacagtttgtggatcagttgatatcttcacattcttcctcttcggcttttcagccacctccaacccaaagttcactggcctaaaagctgcagccctatatatcatttccttcatttgtgcaattgcctctggatcaggctcttcaatggaagaagaaatggatgaatttggttgctggaaattgatattatttgaggaggaactcatatcccatcttgatttcttgcattctggttgataagtatctgagataagcctgaaaccaccttcttcaataggagaagaattctgaacaatactgaagcaggaatcaccaactttgatcattttagattgatcatgggcatgact

SEQ ID NO: 27759 - DNA, 1750 bp, Glycine max
  Clone ID: TF_GmC1226_1
tttttctttttttttaaaccaggacaaggtctcccatcgcagtttgacattaacatggaccaaaatgattaacattcaggtaaagactcgaaaatgattaagaaagaagtgagaatacgaaagaaggggttttattgccaaatgaagaaggctcacgagacacgcatggggtcagccacatgctatccctcctcctcctccttctctctccggtggtggtgactcgccggaaaacacccactgccacctctaacgccgccgccggcgaacacccttctcaaaatctcacccgacccaattcacctttctcctctctcttctcaattccccatctgggtatccctgtttccctcaaagttctcttctttttcgtgattcagaagtgctcagtgatacccttttcttagaacaatgagagcggggaaagggagtcaggaagaggatgagtacgaggaagaagagtttggttcttccaagaaacagggcacttcctctgcccctaacaccaataaagatggaaaagccatcgataaggctagtgcgataagatcgaaacattctgtgactgagcagcggagaaggagcaagataaatgagagattccagatattgagggatctcatacctcatagtgatcaaaagagggacacggcatcatttttattagaggtgatagagtatgttcagtacttacaggagaaggtacaaaagtatgaaggttcatatcaaggttggggtcaagaaccctcgaagttgatgccatggagaaatagtcattggcgtgtccagagctttgccggtcaacccacggctgtaaagaatggtttgggtccagtatcaccttttcctggaaagtttgatgaaagcaatgttagtatctctccaactatgcttaatggctcccagaatacaatagatcctgatcagagcagggatattgtcaacaaaacggctgagaggcaacctgatttagtaagcaagggaatacctcttccccttgctatgcatgcaaacatgtctgttcctgtcagaagtgatggcgtacttgcacatcctcttcagggaactgtttctaatgcacaatcaactgaatgcccaacaactagtgaaccacagaatcaacaggatgaactctcggttgaaggagggacaattagcatctcaagtgcatactcccaagggttgttgaataatctaactcaagcgctacaaagtgctggtttagatctgtctcaggctagcatatcagttcagattaatcttgggaaacgggcaaacaaaggactgaattgtgggacctcttctctcaagcatcatgacaacccttcttcaaacaatcaaacaattgcacattttagagatgcaggcagtggagaagactcggatcaagcacaaaaaagaatgaaaacatataagtgatatatatgtggcattttcatgagaatccacttgcatccagatttctcacttattcttggtgcagcatataacttgtggttactgtacatccttccccatttgtttgacttttaatggttattttaaaactatttaaaccttgaacacgatcatttgtggagatattgaggcttctactgtagggagcatgtcatctatttcgcttgtatgatacatattataattataattattcagtattattgagcttttggatggcaattttatgatatatgtatacttagggaaaaaaaaaaaaaaaaaaaaaaaaaaaagcggccgctttagagga

SEQ ID NO: 27760 - DNA, 704 bp, Glycine max
  unsure (1)..(704): unsure at all n locations
  Clone ID: TF_jC-gmXLIB3563P042ag07d1
cccgcgtccgcccacgcgtccgtacggctgcgaagacgacagaagggggagaatacgaaagaaggggttttattgccaaatgaagaaggctcacgagacacgcatggggtcagccacatgctatccctcctcctcctccttctctctccggtggtggtgactcgccggaaaacacccactgccacctctaacgccgccgccggcgaacacccttctcaaaatctcacccgacccaattcacctttctcctctctcttctcaattccccatctgggtatccctgtttccctcaaagttctcttctttttcgtgattcagaagtgctcagtgatacccttttcttagaacaatgagagcggggaaagggagtcaggaagaggatgagtacgaggaagaagagtttggttcttccaagaaacagggcacttcctctgcccctaacaccaataaagatggaaaagccatcgataaggctagtgcgataagatcgaaacattctgtgactgagcagcggagaaggagcaagataaatgagagattccagatattgagggatctcatacctcatagtgatcaaaagagggacacggcatcatttttattagaggtgatagagtatgttcagtacttacaggagaaggtacanaagtatgaaggttcatatcaagggtggggtcaagaaccctcgaagttgatgccatgga

SEQ ID NO: 27761 - DNA, 1742 bp, Glycine max
  Clone ID: TF_GmC1598_2
gaatagcctagaatagcgaaagaaagtgttgctgctaattccatttcagtgacccctaattatgatggaggaattgaacaaaccaatggacggatcagcaaccagctggttatccgatttggtaagaaaaaaaaaaaaaaatcattttcattcttccattcttcaaatgcccaaatagatgatcataatccataaatcctttaacccttttgtgttcctcttttgttttgttttatttataggaaatggatgattacaatttatttccagatgaatgtcccttgaacttgaacttgtttgatgaccaagagtttctctcacaagacattgctagtgcccttcaagaacagacacagaccttgcaacaatctttgtcttcagagtgcccttcaaaaactgtgagcaactcatccaccgatgaaaccacttttgactttgagagaccagccaagttgctgaaaacgacaacaagcagtagttgttgtaactctgactcatccaccatcaccaaaagcctttcacccaaactttccccatcgtcatctttttcctcatttcagtctcagattctctcctttgacaatcctaacccaacctcatcttccaacaccaccacccagttttatgggtttgactgtaccttaaacccaacacagaacgagatggtgtcagtgtcagtccccaacatgagagaaccacggttcccaactcaaaccgcagaaggttcaccgaaatatcaaaactttgaaacaaaaacctctcatgctaagaggtctcctgctcatgctcaagatcacatcatggctgagagaaagcgaagagagaaactcagccagagcttcattgctcttgcagcccttgttcctggcctaaagaagatggacaaggcttctgtgttaggggacgctatcgaatatgtgaaagagcttaaagagcggttgacagttcttgaagagcagagcaagaaaacaagggcagaatcgatagtggttctgaacaagccagacctctctggtgataatgattcttcttcatgtgacgagagcattgatgctgatagtgtcagtgactcactgtttgaagtggaatcaagagtatcagggaaggagatgctgctcaagatccactgccagaagcaaaggggacttttggtcaagttactggctgagattcaaagtaatcacttatttgttgctaatagcagtgtcctaccctttggtaattctatccttgacattaccattgttgctcagatgggagaaagttacaatttgaccactaaggaacttgccaagaatctacgcgtggctgcattgaagatattgtcataacatgaacgtggcttgagtatggagaataccctcatggcatatggcatggatattgaaactctgaatcacatttaatgccccagccaccgagtaaatcacacccaaaatggaagccttgttattaatgtgtgatttctgctacaacctgcagtgttccccaatatgtagattcagcttgaccccaaatgatcttgtcttcttcgtgttatgttttggtttctgaggccttcagtgtgtgcctgctagagagggaaaaataattgaataattttgtagagatattaggaataatttcaatctgacatgtcttaattaagattttaattgagttgattaaacagaatggatgagttgtttaatttctatgaataaaaaaaatctgacacggcttaattaacattagcttaaaca

SEQ ID NO: 27762 - DNA, 1720 bp, Glycine max
  Clone ID: TF_GmC284_1
ggctcgagaaaaatactaattgttatgttgtgaatcttgtgattttgatttattgaaattcaaggggcagagttttggagcttcccatcatacacacttgcacaaaaacaaacctcgcttcccaattccgatcctcaaggccgaacccgaaaacttctcataccacaatgctctttccgttgtttccacttcctctcccactctgagtcagttcccatttaaaaacaaagactccctctaacccttgtcctcttcctcatcatcgcattttccactcgttcgtggttttacattgctatataattatgcagccctgtagcagagaaatgccaaggccttaactccctcctaaactcttccgcccaaagttccctgcacagccattcagagtcatgcatctaatcacgctcaacgtgttcctaataagcaccaagagcaaagtgttggcgctatccaagccagtggtgacagcgacgcgggtgaggctccggctaacggtgctcacgcgggtccaaacccgggtcagccgaagcagagggttcgagctaggagaggccaagccacggacccacacagcatcgctgaaaggttacggagggagagaatcgcagagagaatgaaggccctacaagaactagttcctaatgccaacaagacggacaaggcatccatgctagatgagatcatcgattacgtgaagttcctgcagctccaagtcaaggttctgagcatgagcagattgggcggtgctgctgctgtcgctccccttgttgctgatatgtcctctgagggaggcggagactgcattcaagccaacggcaagagtaacggcggtggggcccaggcttcaaccaccaacaccaacaccaaccaaacgacagcgacaacaacctcaaacgatagcctaacgatgacggagcaccaggtcgcgaaactaatggaagaagacatgggttcggctatgcagtatcttcaaggaaaaggtctttgcctcatgccaatttcacttgccactgcaatctccactgccacgtgtcccaccaggaacgttaacgttaaccccttgatcaacgccgccgccggagccacccattttccgaccgcagccaaccccgccggcgaagggccgtcgtctccgagcatgtccgtactgacggtgcagtccgccatcgcaggcaacgacggcgccgcctccgtttcgaagccgtgatgacggtgtttgagtgactttataggaaaaagaagaaaaaaacaaagtgaacaaaggacagaaaatgacgtgtgtttttttttcttaaaaaaaaaggagccgttaaagtctacgaaaataaggcgtcagggatacggaggactcgacgacgccgtatttacctagactttgtttggctgatgctaactttcaaccaaccaattacaaactccaccatgccaattacctacttcttcgtcttctttttctttattattattgttaattgttaactgtcgctttgggtttcttctgttcattgtttttaaaaatctgtagtggaatttctctttttggtgtttcatttccgtctaaacaagttaatcttgtactggctagcgtttacgttttatgttactttttctttagcttatcccgttcgacagtccaacatttgccttatcttttggttaagagaaagaaaacaatctaatgttttatcttatttaattggaaaaatatttaaaaaat

SEQ ID NO: 27763 - DNA, 1222 bp, Glycine max
  Clone ID: TF_GmC284_2
accggccgggagataccggggtggacccacgcgtcggacccacgcgtccgctctaacctacctctttttcgttgctatcagcaactacaacatctttctcagtggtccatgcgacgaccccagggtcattcccactcggaacctgagcctccccatagagcgagaagccctccaactcctggcgttagcgccagcacgggctcgagtggatctcttcaacccaataatcaaactcaccattttcaacaacaccctcagcctcaggggcagagttttggagcttcggctccggctaacggtggcggttcgggtcagccgaagcagagggttagagccaggagaggacaagccacggacccacacagcatcgccgaaaggttacggagggagagaatcgcagagcgaatgaaggccctacaagaactagttcctaatgccaacaagactgacaaggcctccatgctggatgagatcatcgattatgtgaagttcctacagctccaagtcaaggttttaagcatgagcagattgggcggtgcagcagctgtggcaccccttgttgctgagggtggcggtgactgcatccaagccaaacgcagcaactcaaacgacagcctcgccatgacggagcaacaggtggcgaagctgatggaggaagacatgggttccgccatgcagtacttgcagggcaagggtctatgcctgatgcctatttcgctcgccagcgcaatctccaaagccacgtgtcaccccttcatcaacggtgatgggccctcctctccccgaatgtccgcgctcactctggctaacgccgtcgtcaaagacgcggcctccgtttccaagtcctgattatcacgccgttaccgtcaatgaagaacctgaacatagcaagtcacgtggagtctaggaagcgggtggcttcactgcacgacgtcgtatttaccttgacttttgcagacgctaactttcatgcttcaaccaatccaatcacaaatttcggagtttcccattcctctatctcatttctgttttttttttttgtcttttcctttcttttcttttcgcaacgagttttgttatttctttttctttttttacatttatgttactttttctttagcttatcccgttcgacagtccaacatttgccttatcttttggttaagagaaagaaaacaatctaatgttttatcttatttaattggaaaaatatttaaaaaat

SEQ ID NO: 27764 - DNA, 2160 bp, Glycine max
  Clone ID: TF_GmC284_3
aattagctcgagggacggttcatcttctcctatttaaaaatatccactccaaccaaacttaaaaatagagtttccatacactcttgcacagaaacaaaactcgcttccgagttccgatcctcaagacagaaacccgagaacttctcataacacaatgctctttccgttagttccacttcctctcccactctgactcagttcccatttaaaagcaaaccctctcaaatcaaagactctctctaacccttgtcctttatcattatcatcacattcataactctttcacaatttggatatataattatgcaaccctgtagcagagaaatgcaaggcctcaactccctcttaaattcttcatcccaaatctcccttcaagaccttcacaatcacaccactaaccagatccaaaattcacacatgaaccaccaacaccaccaccaacaacaacaacaacaccaacaacaacaacaccaacttgctcactttgattcaacttctcacgacgactttctcgaacaaatgctctcttcctgctcttggacagatctcaaccataacaagccattattatgggaccctaacaccacccaacgacatcaggccccccgacgaaacgacgccgtccaacaacaacaacgacgctactactaatgtcgcatctttttcctccttcgatgagcactccaccttagcctccaagttccgcaaccaccagatcagctccaataacaacgcgcccaaaaacgccgcggcggcggctctcatgctccaacaccaactcctcagagactctggtcttctcaacatgcctctttccttgcccggaaacgacgtcgtggttgacgcttctaccttcgaatcccccaatccgagtggtaaagcttcagtccaaactctctacaacgggttcgccggatctctgcatggcgtaggccaatcctcgaaccagactcaacattttcaacaccctcagggaagttcgaatccgatgcaagggcaaaattttggggcggtgccagctggtggtggtagcgcgacgaatcaggctccagcgagtggcgctgccgcgggtggcgcgccggctcagccgaggcagagggttcgagcgaggagaggtcaagccacggacccacacagcatcgctgaaaggttacgtagggagagaatcgccgagagaatgaaggccctacaagaactggttcccaatgccaacaagacagacaaggcatccatgctagatgagatcatcgattacgtgaagttcctgcagctccaagtcaaggttctgagcatgagcagattgggcggtgctgctgctgtcgctccccttgttgctgatatgtcctctgagggaggcggagaatgcatccaagccaacggcaagagtaacggcggtggggcccacgctccaaacaccaactccagccaaacgacagcgacaacaacctcaaacgatagcctaacgatgtcggagcaccaggtagcgaaactaatggaagaagacatgggttccgccatgcagtaccttcaagggaagggttgcctcatgccaatcccttgccacgcaatctcgccacgtgtcacaccaggaacgttaccgttaacgtccccttgatcaatgccgccgccgccgcccagattccgacagccgccaaccccgctggtgacgggccgtcgtctccgagcatgtccgtgctgacggtgcagtccgccgtcgcggtcaacgacggctccgccgccgtgaaggacgctgcctccgtttcgaagccgtgatgacagcgtttgtgtgactttataggaaaaaaaaaagaaaaaaacataaagtggacaaaggacagaaaatgacgtgtgtttttttaaaaaaggagccgttaaagtctacgaaaataaggcgtcagggatacggaggactcgacgacgccgtatttacctagactttgttggctgatgatgctacctctgaacaaaccaatcacaaactccaccatgccaaatgataaaaaaactccaccatgacaattacctactttgtttattattattattattattattattattattaactgtcgcttttggtttcttttgttcattgttttttcttgaaaaaaaattagtggatttcttccctttaaaaaaaaaaaaaaaaaaaacccaaaa

SEQ ID NO: 27765 - DNA, 965 bp, Glycine max
  Clone ID: TF_GmC1808_1
cgtagatgggtcatggtgagtggttcttggcacaccattccccccaccaccttccccccaccccctttctcccgctcatcctcttctcctcttcgtccccacctccagcatacccttttggccggagatgagtaatagtaattgggtgttggattatgattatctagacaacattcctctcaccacccttgaaccacccaatttctcttggtcttcctcctctcctcctcctacactcagtgtggagctagatgactcatttggaatttcggatggtctcaaggaaaacaggtcaagaaaacgtttgaggtcatctgattctaaagcatgtagagagaaaatgcgaagggatcgacttaatgacaggtttatggaactggggtctatcttggaccctagaaagcctctcaaaatggacaaggctgttatattaagtgatgcagttcgagttgtttctcagttacgagaggaagctcaaaagctgagggagtccactgagaatctacaagagaaaatcaatgcattgaaggatgagaaaaatgagcttcgcgatgagaagcagcgactaaaagtagagaaagaaaaccttgagcagaaggttaaagctttgagttcacaacctagctttctggctgcagcaggacaagttgttggcagcaagctggtgccattcatgggctacccaggagttgccatgtggcagtttttatcacctgctgctgttgatacctcacaggaccatgttctcaggcccccagtagcataacttgccaaaggctctgtgttttggtccaatggagaaagagaatttatctttttattttttgcttttgtgaaatgtgaaaaaagaaatcttattgttgaggcagctttttgataactatttaacttccggttataggctaagtttgaataaacttctttataggttctaatataaaagttctatcatctaaattgtctat

SEQ ID NO: 27766 - DNA, 1126 bp, Glycine max
  Clone ID: TF_GmC330_2
gaaaagtgaaccacgcgtccgtgaaaacagaccaataataataataataataaaagaccaactccttggcttggcgcatctttattccctctcttctataaatcgttcgatcgttaattcctcgcacgagcttgtgtccgtcgtcaaaccatggagaatattggtgaggatcagtacggctacttgccggagaccgacctgtttttcccaaacgaagaccttggcagctgggcaataatggatggggaagcggtctcttggtactatgattcaagctccccggacggcaccggtgcttcttcatcggtggcatctaagaacattgtctccgagaggaatagaaggaagaagctcaacgataggcttttggcacttagagcagtggtccccaacattaccaagatggataaggcttctatcattaaggatgctatagagtacatccagcacttgcatgaacaagagaagagaatccaagctgagattttggatctagaatctaggaataagttcaaaaatccaacctatgaatttgaccaggacctccctattctgctcaggtctaagaagaagaaaacagaacacctatttgattctctcagttcaagaaattccccatcaattgaaataattgagctgagggtaacatacatgagagagaagacgtttgtggtgaacttgacatgtagtaaaaggacagacacaatggtaaaactgtgtgcggtgttcgaatctttaaagctgaaagtcattacggccaatatcacatctttttcaggcacgcttttgaagaagacagtcttcatccaggcagatgaagaagagaaagactttttgcatataaaaattcagacagcgatttcagctctcaatgatcctctaagcccaatgagtatctgatgaagaaacgagttcagatcgaagctgagattgttctgtttgttgagtttctttttctcactcaatgttaattatctttagtgaatgagtcttaaactcgaaagttggcaagttttctttttctttttcattttctgtatgttgatgttgatagcctctaacgttgtaagctttacgttattaatgaaatcgcattttcatgttcttcatggtaaaaaaataaaca

SEQ ID NO: 27767 - DNA, 1952 bp, Glycine max
  Clone ID: TF_GmC11360_1
aattcggctcgaggatttttctttcgtacaagaaacaaccaccagactgcgatctccattatttgagtactactactttgcataaagggttcaacaattcgtgcgtgcacagtgccaaatcgtgatcacatgaacttaatcttaatctgttagctagcttcaaatgcgttattgggtctcacaaaaaggagctagctaggaagtgaatactactattatttacctgccacacacacagaaacaacatagatctagaagcaaaggcaaagaaggatttcaagctcaattgtttagcttaattaatttccttcaagcaaatgatgattcagaagatgtttgaccccacccgttctggtatgacaagaagctcctcccatgtagcctccatttatgacaatgatttccttgagttggtgtgggaaaacggtgagattgttgtacgaggaggttcatcaaacagatcacgaaagacaaacgacgaaagaatacatgaagatgccagcattaacaaaagaacaaggttaaacccattattatactcacttgaagatcactttccacctcaaagggactctgacatgagcacttcacaccaaagcaataatggccaagattcgtgtcaatcctcccaaagcaagaattcctgcaagcttcatgaagaatttgcaaacttacttaagcccgttagcacaggcaatagtcacttacaacagtgcttaccttcatctccgctcaagaaacaaagaaccgattcaactcaaacaccaagaccagcaaaagtgaacttctccaacttttcaatacctgcagtgtttctcaaatctactactactactactactaataattatcagggaaacagtgcaactcaacagacaaaaaatcattcatctccagcaagagtggaggagattgaagcgctcaaggttgacaaatcagcgaaagaaacacagtgttttcagaagcaaacatcattaactgttgaaagaagcacaaaattaccaaccccagcggttgatgaacactccggctgcgagaagacgacagaaggggttcttggaattcacagatcccaaggtcaaacctcaacctcagaagcacttagagccaaagcaaaagcttataataataataatattaacatgtgtcatgaaccgttgctagcatcttcttctgtgtgctctcttggagcctccaacgacccaaaccttggtttcaggaaacatgaggacactgatgactcaacgtatttaagtgataatgatggagagcctgaagatatggtaaagcaagatagggagggtaacagagtcaagagaagcaggaaccctgaggttcataacttatctgagaagaagcgaagagaaaaaatcaacaagaagatgcgtacattgaaagacctcattcccaactgtaataaggtggacaaagcatcaatgctagacgatgccatcgactatctgaagaccctaaagcttcagttacaggcaaattttcagataatgtcaatgggaagtgggttatggccactcatgatgggattcaggccaccacagctacctattccaccactttctgctatcacagacaacagacttattcagatgtttggttccccaaaccaaataccacccatgccaatgcctcatgcacctttcttccctatcattggaaattctgccacacaatcacacttggctaataacaccaccaccacagctgcagctaccaccaacttggcagaacatttagctaattctctacatggaaatgcaacaaagctagcgccaccaagtcagatttcctttcaacaccaccacacctctactagtactcctacactagctacccctttcatttttccacaaaaatagataaaaatgtatatgaagggaaaactattcctgtaacaaaattagattagagatgttaattaaagacgagtgtaaagt

SEQ ID NO: 27768 - DNA, 1542 bp, Glycine max
  Clone ID: TF_GmC1654_1
ctgaaaagcacaagaccttttctgccccttctcacgtgctgcgtatcctctaatctttggtttttttttttttttcatatccgaattaaccactttatcaagtacggctgcgagaagacgacagaaggggaaccaactgagttagattttggtgttatcctttgatataaactaagctctttcatttttccaatattaaaacttccagcttcttccttcctctgtgactcaaactgcatcaaccaagttagtgggattttctataaattgttgtcaatttgtcatgtcatgtatatgagaaactcatgaaaactctggtggtgacttattagttctctcggcaagtaaggatttcaaacaaactaaagttgaagagagtataaatgactttggaaactcttcaatccaatgagttctccaacttcattatctatgacactatctctgcaactccatttagcagccatggctccccagaggctagtttcttggaaagttttgtgaactatcaggagcagcatgaccaccctacatttgataattgcgcaatgaggacccgaaagcgtgaagccagcgaaccagaaagcattggccggaggcagaattcggtggcagtgcaagggaggaagaagaggagaaggaagccaagggtttgcaaaaacacggaagaggctgagacacaaaggatcacacacattacagtggaaagaaaccgccggaagcagatgaatgagcatcttgctgtccttcgttcactcatgccggagtcctacgtccaaaggggtgaccaggcctctatagtgggtggtgccatagagtttgtaaaagagctggagcacctcttgcaatcacttgaagctagaaagctgcaacttttgcaccaagaagtggcacaaaccaatgaaaatacggccatttccaaactcatgcaacctccttttgcacattgtttttcgtatccacagtacacatggtcccagactcctaacaaatacacatccaagaccaaagctgccatagctgatatcgaggttactttaatcgagacccatgcaaatcttcgaattctcaccaggagaagcagccacgggcagctaacaaagttagtagctggttttcaaacgctgtgcctcaccgtcctacatcttaatgtcaccaccatagaccctttggtgttctattccttcagtgctaaggttgaagaaggattccaacttggttcagtagatggtattgcaacggcagtccatcatttgcttgcaagaattgaagaagaggcttccctttgctgttgatcaggttcatctggggacacgagattttagtgaaatgaccaaatcaaccatctacaccaacctcaacagagagagaggggggaaagaatatttgctaatggctttagttttttatttttgtttgtttgatgtccaactgatgtgttaatgctaaactttagttgcagtagatgatggtgttttttaaaagttgcttcaagcaagtacaactaaaaatcaaatgaaaaagaatgttgatacagtttgg

SEQ ID NO: 27769 - DNA, 2257 bp, Glycine max
  Clone ID: TF_GmC277_1
ggcggaacctcttctgtcaggttttataaaatctcatgtctgttcaaagctttcttattcttattcatcatacaccacgccaaatcacaatacccttcaggtaattttgctctttttgtttttacgctgaatctgtttgttccccttccttgaacgtttttcattggggtttcgacccactatgttggagctcaatactaagttagattccttttgattttcatccattatctgtgattaggaacaccgatgtcaccaatttcacaacttgtgggttttagttggatgttttcaagggtttgattctagggttacttatgcagtttttgggaattttggctcagttgagatctctgtgaaacgggtttggaaaattttttgatcttgaggtttatgagattttaactgtggaagaaagatggtgggtgagaagttttgtgtgagcgaagatgacaagggtgtgttggagtctgtgttgggtgcagaggctgttgcgttctttatttcagcactttccaataatgtgttttcccgtgtcgttgcgccgtcggctggtgctgacccggctctccggcagcggttgtgccagcttgttgagggttccaagtggaattatgctgtgttttggcaggttgctggcttgaaatctgaaggaagcggggttccttgtcttgatgggcattgcagtgatcccaaaggggagaggaatggagttgggaaggaggatgaacaggagtgagaaagaaggtactgcagaagcttgatgcttgctttggtgggtctgtgttgaaagatgctaatcatgtgagattggacagggtttcggatttgctcatgttttacttatcctcaatgtgctatatatttggttttgattcgctgtgtggccctggcagttcgttcaagtccggtaaattgatttgggcttctgatgctgctggttgtttaaaccaattagaatctagatcgtttatggggaaattggctggtcttcatactgttgttttcgttcctctgaagtctggagtggtggagcttggttcgtttgaaatggtgcctgaagagcagggtgttgtggaaatggtcaggacagcatttggggaatccagtcctggacaggcaaaggtgtttccaaagatttttgggcatgagttaagcctgggggatacaaaatctcagtctataactattagtttctccccaaaggtggaagatgatccgggtttcacttcagactcctatgaagttcaagcactaggggtgaaccatgcttatggaaattcttccaatgggactttaggtgacggtaatgaaggaacattgtttcctcaattgaatcaaatgatggctgggaattttaatgctcaagcaagggttccttgtctagatctcggtaatgaagactcatcatcaattcatgcagatgagcggaagcccaaaaaaagaggtaggaaacctgccaatgggagagaggagccgctgaaccatgttgaagctgagagacaaagacgtgagaagcttaatcagaggttttatgccttgagagctgttgtccctaatatatctaaaatggacaaggcatctttgcttggtgatgccattacctttatcactgatctgcagatgaagatcaaggtgttggaagctgagaagaacatgggtaacaataaggaccaaaaattgtcattgccagatatggattttcaggaaagagaggatgacacagttgtgacagtgagatgccccttagatattcaccctgtttctaatgttgttaaaacgttcagggagcatcaaattgtggctcaagactctaatgtttcaactgcagatgataaaataattcatacattctccataagaactgagggaggggaggctgctgctatacagttgaaagaaaagcttgaagcatccctatccaaaagttgattgtcagatcatatttatgtgtagcatctcaatgatattgtaaaccatgttagaaatactctgtcttgtaggttaagtggctaacataatattgttcttagtgcactttgtttttacagtagtgtactttgttagttgtaatctgttttaaaatatgttcaggtcatcgtaaatgaccttaattatgtacttaagttgattaataattgaatttgatgttgatggatgatataagttgaactatatttaatctatcatcaatctaagtatgaaaaatgtcaacattggaacttttttttttctggcttactcagctggccggggg

SEQ ID NO: 27770 - DNA, 1592 bp, Glycine max
  Clone ID: TF_GmC1376_1
acggctgcgagatgacgacagaagggggacccaacactagcctactagtgtggttttttcccttcatcgtcttcctcttgaaggtattgaagttgttttgttatgtgtttgccagagggagagagagagccatggcactagaggcagtggtatttccacaatcacaagacccttttggtggtagtggttacggatcagtgaataataaggacttctacaactgcaccttgttggctgctacttcacccaactcatggggggactatgagcaacacatcaacatcaacaaagaagaagaacaaggtggtgcttctatctccacttttcaaccagagagtaattacccttatggaaattggaccagctcctcctcatctatgttaccccacttcaacaatgaacttcaagaaaccactactactgaccccagtaacaccttagatagcttaaacactcgtcccaagaggcgcagagccaaaagcagaaagaacaaagaagaaattgagaaccaaagaatgactcacattgctgtggaacgcaatagaagaaagcagatgaatgagtatctttctgttcttcgctctcttatgccagactcttatatccaaaggggtgatcaagcttctataattggaggtgctattaactttgtcaaagagcttgagcagaggatgcattttcttggtgctcagaaagaaggagaggggaaatctgaggctggtggtgcaacaaacatgcccttttctgagttcttcacctttcctcagtattcaactagtggtggtggtggttgctctgataattctgcagccgtaggtgaagacgtgggtgaggttaagtgtggcattgctgacatagaagtgaccatggtggaaagccatgcaaatctcaaaataagatccaagaagcgccccaagcagctcttgaagttggtttctggtttgcataccatgcgcctcacaatcttgcacctaaatgttactaccaccggtgaagttgttctctactctcttagtgttaaggtagaagatgattgcaagttgggatcagttgatgatatagctgcagctgtgtaccagatgctagataaaattcagcaagaggcaatgttgaattaagatcaaaccttgaccaaatttgccttgccccacttggtttttaacctcatgtcaacaccttacttcatggtggatcattgtctctcgctatttttctctttcaagatgtacctaattattgcaacttctgttcacttcaccctttgttaatctactgatggtgccttgatgtgggctccttggaggaagttttttggtttattccttcttgtgtatgtctgtgtagctcacgagctccttttaatctctctctatctctctcttctctttttctctggggtagggggtggagaaggctgtgtattatattgctcgagacatattctagtgcttggtcaattttgcctacctagctttgaaattggtaggtcttgtctacctcaaccataagccaaagccattaatttgtcaagctgaaattgagaacatctcaaaaataaaattgaatgaaaatgagagccgaagatttttggc

SEQ ID NO: 27771 - DNA, 762 bp, Glycine max
  unsure (1)..(762): unsure at all n locations
  Clone ID: TF_GmC3897_2
ctgatcactaggtgcgttcttccttggctaactctgcgggaattcagactattgttttggtacctactgatttgggagtcgtggagttgggttctgtcagaatgttacccgagagttttgaactcttgcaggctgttaaatctgtgttctccacgccgattcccaaggttttggtgaacacaattcgcatcagacacattttagagagaaacttgctgttagaaaaatggaggataataggccttggaacaacaacaacgttagttttccgaatgtgcggagcaatggccttcatgtttcaagttgttggccagtgaattcgggtttgaggcagcctgctcctagggtggtggcggagctggctaatggtgtgagacaggatttgaggctgagcaatagctatgaacctcaaagacaggtgcaaatgcaaattgactttagcggaggcactagcaggccttctgatgtggaggcctcttgcaaggaggagcaaccaagtgttgccgatgaaaggaagcccaggaagcggngaaggaagcccgccaatggaagggaagagcccctcaatcatgtggaggccgagaggcaaaggcgcgagaagctcaaccagcgcttctatgcgttgagatctgtggtgcccaacatctncaagatggacaaggcctcattgttgggagacaccattgcttatatcaatgagctccaggctaaagtcaagatcatggaagccgaaagagagagatttgaaagcatttcaaatca

SEQ ID NO: 27772 - DNA, 417 bp, Glycine max
  Clone ID: TF_12488088
ggttaggatatcttctgatccacagactgtggctgccaggcaaagaagggagagaataagtgagaggattagggttttgcagaagattgtgcctggaggaagcaagatggacactgcatcaatgcttgatgaagctgcaaactacctcaagtttctcagatcacaagtcaaagcactagaaaatcttggtaacaagcttgacacaatgaattgtcctcctactaacatagccttctctttcaacccttcttttcccatacaaacacatttccccatgcaaaaccctagcagccacatccaatactccaagggttgaaaacttgacatgaatattatcatggaagataagatgtaaaaaggggtctgagaacccataacctctaattttattccatccagtgagtatgattaacgtat

SEQ ID NO: 27773 - DNA, 1491 bp, Glycine max
  Clone ID: TF_GmC693_1
aggaacttggcatttttcggggcacccacataaaaatattttgcatgtgtttgcctgagggagagagaggcatggcactagaagcagtagtgtatccccaaccacaggacccgtttggccatggaatcaaagacccttcttacaactacaacaacttgttagaaggtggtggaggcaattggggctatgcagatttcaaccttgaaaaagaagaccgaacttgtgtcccttttcttgcgaaccaaacagagaattatccttatggagaatggaactgttctccttctccaccatccatgttgcctcaattgaatattgcatcaaatcctcaatcttcagaaaccagcaacacacagaacaacttagatagttcagtttccacccctgctcgtcccaaaaggcgcaggaccaaaagcagaaagaataaggaagagattgagaaccagagaatgactcacattgctgtagagcgcaacagaaggaagcaaatgaacgagtatctctctgttcttcgctctctaatgcctgaatcttacgtccaaaggggtgatcaagcatctataattggtggtgctatcaactttgttaaggagcttgagcagaggctgcaatttcttggtgctcagaaagagaaagaagcgaaatctgatgtcctcttttctgagttcttctcctttccacagtactcaacaagtgccagtggtggctgtgacaattctacagccatgagtgagcaaaagagtgaggctcagtcgggcattgctgacatagaagtgacaatggttgagagccatgcaaatctcaaaataagatccaagaaacggccaaagcagctcttgaaaattgtctccagtttgcatggcatgcgtctcacaatcttgcacctaaatgttaccacaacaggggaaattgtcctctattctcttagcgttaaggtggaagaagattgcaagctaggatcagtggatgaaatagctgcagcggtgtaccaaattctggataggattcaacaagagacaatctcgaattaagatctgaagttgagctaatttggcccaatttttttaacctgatcaagaagaccttattatatttctttctctttttttcaagttgtacctaattattgaaacggctgtggatcctgttgttatattctactgaagcgccttgatcgatgtgggggtccttggaggcagtttttggttgattccttcttattgtctatctagctacctctattttttatccttctctctctttctctctttctgtactttgggtggagaaggttgtagtgtattgtattgtgcttgagacacattcaagtgctctcagtcaattctgcttaccttgctttaatagcggtaggccatctcaatctcaaacaaaagccaatttgtcaagcccaaaaacagaatatctcaaagtcactttgaatgaaaaaagatagccaaagattttaggagattcacacataaaacccaaccc

SEQ ID NO: 27774 - DNA, 663 bp, Glycine max
  unsure (1)..(663): unsure at all n locations
  Clone ID: TF_GmC693_2
ccacgcgtccgcatttttcatcttcaccttctttttttcagggtagccacataaaagtattgtgcatgtgtttgccagagggagaaagaggcatggcactagaagcagtagtatatccccaacctcaagacccgtttggctacggaatcaaagacccttcttacaactacaacaacttgttagaaggtggtggaggcaactggggctttgaaaaagaagagcaaggttttgtcacttttctggagaaccaaacagagaattatccttatggagaatggaactgttctccttctccaccatccatgttgcctcacttgaatgcatcaaatcctcagtcttcagaaaccagcaacatacataacaacttagatagttcaatttccacccctgctcgtcccaaaaggcgcagaaccaaaagcaggaagaataaggaagagattgagaaccagagaatgactcacattgctgtagagcgcaacagaaggaagcaaatgaacgagtatctctctgttcttcgctctctaatgcctgaatcttacgtccaaaggggtgatcaagcatctataattgggggtgctatcaactttgttaaggagctggagcagaggctgcaattncttgggtggtcagaaagagaaagaggagaaatctgatgtgcccttt

SEQ ID NO: 27775 - DNA, 731 bp, Glycine max
  Clone ID: TF_GmC25403_2
cccacgcgtccgcaccatcagtgacaatgagccttctgtcactaaaaaccttagccctcagtcctccatggtagtcgacaagcttgaaactggggagcaggtcactcagaaggtgaacattcctgtggacaagaaaaggagaactagaaatggttcttccttcaccagtaacccccaatccaaggatactgcaacagaagggaaaaacaagaaacaaaggaagaacaatggtgggttgaaagaagaggacaaggcaaaagaagagaagaaggatcagagaaagtgtcctgaagagcccccaacaggctatatccacgtcagagcaagaaggggtcaggcaacggatagccacagccttgctgaaagggtgagaagagagaagataagtgaaaggatgaaggtgttgcaacggcttgtgccaggctgtgataaggtgactggaaaggcccttatgttggatgaaataatcaattatgttcagtctttacagaatcaagttgagttcttgtcaatgaagcttgcttcggtgaatcccatgttttatgacttggcaacggatctagacaccctcttggttaggccagagaaactaaatagcatggcatcaccatcaccactaccatcaatgtcacattgcaacagccccaacacccaagccacaactttttgctgatacaaccaccatgacccccaccaacatcttccacactactagtgactatcttttggat

SEQ ID NO: 27776 - DNA, 1368 bp, Glycine max
  unsure (1)..(1368): unsure at all n locations
  Clone ID: TF_GmC6805_1
ctacgactaactccaatctccctatccatgtatccctcttcctcttcctcctcctcctcttcctctcagtccatgacccaagctggcctcactcgctacggttccgcccccggttctcttctcaccagcacggttgattctcttattggtggatcccgtcccagtccctacttttccggagagtcttctgagtctccctgcaaagagcaaagatctttccacaaccacccccccttcttcgcttcctccttgctccgccagaaaagctctcccgccggcttcctttcccatctctccaatcaccatggtgtgggtttcaccatcacccccgggtggtttatcaaattcaaattcaaattcaaattgttctctcttgaagtctcaactcagcttcacccacgaatctctttccaacactgttaatgttgatccctccagcaccaccttcggaatggatccctgggacaacaattccatcgccttttctgcaacttcaaccaagcgctccaaaaccaacaccaatgatcctgacattttacattccctgaattcggccttggaatcacagttcaatcttccacatacaagtctggaaatgtcaaccgtggacaagctattgcacattcctgaagattctgtcccttgtaaaatccgtgctaagcgaggttgtgctactcatccccgtagcattgccgagcgggagagaagaacaaggatcagtggcaagctcaagaaattacaggaccttgtacccaatatggataagcaaacaagctatgcagacatgctcgatttggccgttcaacacattaaaggtcttcaaactcaggttcagaagcttcacaaagaaatggagaattgcacttgcggatgcaaacaaagcaaataacttcttttttttacgagattctatagcaacgtgcatagaagtcaaggttttgatggcaaagattgaaaactgattttgtaccgatctacttaaatgaataatgaaggaactgaaactttgtaggttgtcaatgctacaattgtacagtgtatgttgtaatatggtagtctagaaaaatttcttcgttttcttcaagaattggctttcaaagtccaggttgattttctattcagattgtttattttcttgtttgggtaagtatggtacaatgaaagactaatttttggaatcagaaccagaatagaagtgagaatggggtgaattgaaatctattttgttttatttcaatctatttttatgttcggtgaattactgtggaagcttataaccaatgaaaatgtgtacatttttgcctgaaaaaaaaaaaaaaaaaaaaaaannnnnnnnnnnnnnnnnnnnnnnnnnnnnnnnnnnnnnnn

SEQ ID NO: 27777 - DNA, 961 bp, Glycine max
  Clone ID: TF_GmC191104_1
taaaaaagaaacgaaaagaaataaaacgatttattacatctcttaataataaagacaacagcataagttcgctttcgtcagaagcagaattgaacaaaatatcaaagctaactcctaaaactacagatttaactaacctatttgatctgggcctaaacagttcaaaggagaagaagaagcaatgcatttacaaactgcaagctacagcaactacggttggctcctctatcagggggaagcatttatcaagcattccaatcacatcataccatggaagccagcagaatccgagagcaccgctttaatttgctcagggaggacatcctggccttctctgcattgctcagctttgaacacatctaaagcaaagccattaaaacagctaataacagcctgctgtacatccaatccgaggttatccaaagccttcatggtagaaagcaaaagacctggtcggcgggtgcagaacatatgaatgttgacagttctcccttcccttactctaacctcaacctttgcagcttggtttttagggcttggcaaggtgccaggatacagttcctccttgacccgacagggaagggttggcagggtgggtgttaatggctgaaagcttgtagaagaagaaggtgtcagcgacgagccaggtggagttgactccagctcgtgatgaagatcattaatccgctgcagcaactccttcaagtagtcaattgcatccccaagtattgaagccctatccatcttgctaatcttggggacaacagacctgagcatgtacaacctatcattgagcttcttccggcggcgcctctccgccatgagattcttggcgggcagccccttcttcttccccttgttatctccaccattctcactcagcttcaacccattgctctcattctgctcatcagactcatagttcaacccggacccacgcgtccgcggacgcgtgggtcga

SEQ ID NO: 27778 - DNA, 1289 bp, Glycine max
  Clone ID: TF_GmC584477_1
ccctgaacaaacccacctcaattgcttttgcaattatttttccttttacctctctaatggcactgtccaaagaccaaagaattccacatgattcaagcttgagcagcaaggttcaaaactgtgttttcagtgagactagtgtggagattacctccatgactgttcatagggtcaatgagtaccacaaatctgtgttagaagaggaagatggctcacaaactactaatggtctcagcaatgattcagctgtaacacgttctcctcctttatgtggcagtcgcaaagattatgcttataagggcacaaactatcagcttgaagaagcagtatctctgattgatttcaaagggtatagcaatatcctgcaagctagtggatctttgcttagctttcagcagaacaagatggtccctctcaactgttacttgaaagataatggtcagaaagagtattgtgtttgggagaataatttgcatcaaggccacaaccattggaatcaaactagtccaagaagcactagagacatgcgcctggtagagaatctcaattgctttcaaacttctagtggctatagccccatagttaataatgcaaaagagaagcaacatggtcaaagttcatctgggtggctctactcagcaccaactatccctaatgatattagtagcctccacaagttaggagcacaagaatcagttttgcaaaagcgcccttcgatgggagagaacatgaaagctgccaagaagcagtgctcaactgagagcaaaacgccaaaacataagtcaagcccatccaaggatcctcaaagtgtggctgccaagaaccgaagagagaggataagcgagcggttaaagatactacaagaactggtgcctaatggctccaaggttgatttggttactatgctggagaaagcaattagttatgtaaagtttcttcaactgcaagtgaaggtgttggcaactgatgaattttggcctgtccaaggtggaaaacctcctgaaatttctcaagtaaaggaagtcatcgatgtcattctttcttcacaaagagagagaagttcatgctcaaagattcaagaagacatcaatcacgcgaatttgtctcaataccaaagaaattatgctgctgctattgctggcaagaacaaaagcgataaaatcataaactgtaatttgacttttctccaaattgacaatagcagaatgagttgttacccaagaagtagccatgatggtccatgcaacagcttgaaggttagagtaggatacttcttagctcgcttttga

SEQ ID NO: 27779 - DNA, 1424 bp, Glycine max
  Clone ID: TF_GmC21758_1
cccacgttttcacaattcccttccttgatacaaagccttccctgtttgcttttttcacaattcacttcttttccagagagttagggaagaggaatagagaaagagaaagagaaagagcgtgagagagagaaacagcacaaggatggagctttctcaacttggttttctggatgagctacttgctccaagaaaagacactacttggagtaatgctttgtcaactgggttgaatgagttactactccctagtggttggagctttgactcttttgatgagaaccaaggtttagctactttgaatccctcatttgctgcattttccactccactagaccacagatttgaatgcccttatggaagtgaagcagcatacccttttgttgatggcttcacattgcctgagcttgattcttcatacaccaggaatgatgagtcagcaccacttttgccacaagaggataacccatcattggaggatgaagagtttggctttctgggaagtgataaccagagcttggaacaagcaaaaattggctgcaaaattgaggaacaagtgacagagattccagtctttaacatgggcttgtgtggggagaaaaaacccaaatcaaagaaactagaagggcatccctcaaagaatctcatggcagaaagaaggagaagaaagcgtttgaatgaccgtctttccatgctaaggtcaatagtcccaaagattagcaagatggacaggacctccattcttggagacacaattgattacatgaaagagcttctagaaaggataggtaagttgcaagaagaagaaatagaggagggaacaaatcagataaacctcttaggcatttctaaggagctaaagcccaatgaagtaatggttagaaattcccccaagtttgatgttgagagaagagaccaggacacaaggattagcatctgctgtgccacaaagccaggattactactgtccacagtgaacaccttagaagcattaggccttgagattcaccagtgtgttataagcagcttcaatgatttttcaatgcaagcatcttgctcaggggcagcagagcagagaaattgtatgaaccaggaagagataaagcaagcactattcagaaatgcaggttatggtggtagatgtctctaggagaaagatggaaagctgaaataacaatttgctgatgttgaaaaacaagcaaagttttcctcttgtgtaattcaaggaattaggggtgttacgtttaatgagatttcccaataagatggctttgaatgatgctttgattcttatgtaagttacaactttaccctgtattttaacatactatggggtatgttcagttcaagcctcactttcccattgtgataaacatccatttttttagtaatgaagaagggttgttaccaaacccataagcggaatc

SEQ ID NO: 27780 - DNA, 1193 bp, Glycine max
  Clone ID: TF_GmC18720_1
aacacaacttccacattccgatggaggagtcatgggaaaattggcatcttcatatggaaaccggttgcgagaacgatttcttaggcaagtgtcacggcactgacgatgacgagttcttcagagacatccttcagcaaccaccacctgcggctttctcttccgaaagcgaaagcgatcactccttcctcgctgtccaaaacacttctagcatccccaacgacggtgccgttttgtctcctaggaattacctcgtcaaaagcagcagctccaactccttggtctctcaaaacgcttccaaacgacctcgtcgtttgtcctctcccaggacttacattctgtccttcgacaactcaaccatggttccggccacacccgaaacccgcccccgctcctccaataattcccctctgcctgccaaacgggccctggaaagcccaggcccagtagcccgaaggcccaaccaaggagctaagaagataagaacctcttctcagaccatcgatcacataatggccgagagacgacggaggcaggaactcacggagaggttcatagcactctcagccacgattcccggcttgaacaagacggacaaggcttctgtacttcgagcagcaattgattacgtgaaacaacttcaagaaagggtacaggaactggagaaacaagacaaaaaaaggagtacagagtcagtaatattcatcaagaaacccgacccaaatggaaacgatgaagacaccacctccactgaaacgaactgtagcatccttcctgagatggaagcaagggtgatggggaaggaggtgctcattgagatccactgtgagaaagaaaatggtgttgagctaaaaatattggaccaccttgaaaatcttcatctcagtgttaccggaagcagtgtcttgccatttggaaattctgctctctgcattaccatcacaactcagatgggtgacgggtaccaaatgactgtgaatgatctagtgaaaaaccttagacaattgttctcaaaatcacatgtgctaagcgacagcgatccgtactagtgtatcaaacaatgagttgtagtgtatggaaatcgaaagttttggatttattactctctttgattttggcttgttttcatgttgatcgtaacgttaataaacaaatactaaatgtctgacatgaatttatgcccggcatctaccctg

SEQ ID NO: 27781 - DNA, 1453 bp, Glycine max
  unsure (1)..(1453): unsure at all n locations
  Clone ID: TF_GmC5806_1
gtacgcccatgcaggttatccggatnccggnaaattcccggggtcgacccacgcgtccaacaacagcaacagcaataaaataggaagcaacaacagcaacagcagcagctatagaccctagggaaatgatacaggaagatcaaggacagtgttcttctcaagcgatcaataactaccaccaagcctatcaagagcagcttctccttcagcaacagatgcaacaacaacaacaaaacaatgatatctttggtggaggaggaggattgaacatgtaccctggtgctgaagtttctccaatcatgaatcatcatcatcaaccatggtctatgactatgccacatcatcatcaccatcatcaggttcatgacccttttcttgtccctccccaaccttcaccctatgcaagcttgttcaacagaaggggtccttctcttcatcagtttgcatatgatcatcatggttcatcttctgaccatcttaggatcatatctgaatcccttgttggaccggtggttcaacccggttcagcagtaccctttggcctccaaaccgagttggctaagatgactgctcaagaaatcatggaggctaaagcccttgcagcttccaagagtcacagtgaagctgaaaggagacgcagggagagaatcaataaccatcttgctaagctgcgcagcttgttgcctagcacaaccaaaacagataaagcatcattgctagcagaagtgatccagcatgtgaaggagctgaagcgtcaaacctctctgatagcagaaacgagtccggttccaacagaagctgatgagttaacagtagtggacgaagctgatgaagatggaaactcagtgatcaaagcctctttgtgctgcgaagataggtcagatctgttccctgaactcatcaagaccttgaaagcgttgaggctaagaacgcttaaggctgagataacaacgcttggtgggcgcgtcaagaacgtattgttcatcactggagaagaaacagactcatcaagcagtgaggaccatagccagcaacaacaacagtgctgcattagctcaatacaagaagcgcttaaggctgtgatggagaagagcgttggggatcatcatgagtctgcttctgcgaatattaagaggcaaaggaccaatataatatcaatgtcctaggaacggatcgaggtctttatgaattttatttaattaaaggcctatatatgcatgatcattattattattattactatctactaattaattagttgttatataagcatatatatatattttgattttgatttgcatattttttggggggtgtggtttggcttttacttttttttcttttcttgttaatggtgtgtgctggaaaatgttgttactttatatgtattctccatcaacatcatcatcgttataagaaatgaggaaatgagagtttggtggggttttttgtt

SEQ ID NO: 27782 - DNA, 786 bp, Glycine max
  Clone ID: TF_GmC5806_2
cgtcagctcggaattcggctcgaggcaaaatattcttatataaatagccttggagtttgtattatccttcaatagagttagtttcatatataaaacaggaagcaacaactgcaacagcagctatagaccctagggaaatgatacaggaagatcaaggacagtgttcttctcaagcgatcaataactaccaccaagcctatcaagagcagcttctccttcagcaacagatgcagcagcagcagcaacaacaacaacaaaacaatgatatctttggtggaggattgaacatgtaccctggtggtgaagtttctcaaatcatgcatcatcatcatcatcaaccatggtctatgactatgcctcatcaccatcatcatcatcatcaggttcatgacccttttcttgtccctccccaaacttcaccctatgcaagcttgttcaacagaaggggtccttctcttcagtttgcatatgatcatggttcatcttctgaccatcttaggatcatatctgaatcctttgttggaccggtggttcaacccggttcagcaccctttggcctccaaaccgagttggctaagatgactgctcaagaaatcatggaggctaaggcccttgcagcttccaagagtcacagtgaagctgaaaggagacgcagggagagaatcaataaccatcttgctaagctgcgcagcttgttgcctagcacaaccaaaacagataaagcatcattgcttgcagaagtgatccagcatgtgaaagagctgaagcgtcaaacctcactgatag

SEQ ID NO: 27783 - DNA, 2390 bp, Glycine max
  Clone ID: TF_GmC886_1
aaatatttttgcacggacgttgtccagtcaaagattacttgtgcttgataaggtgaaagtgcttgctctaggcaaaacctcatctcaatgctggatgaagcaatttcttacttgaagtcattgcagctacaagtgcagatgatgtccatgggctgtggaatgaatacatgacattgagcaaaacaagataaccatcattaacaatggatcgtgtgcttcaataatcacaatcactgtattccagatttcgatattcaaatggtccacgaacacgaataacctattctcgcgccttcagccttacttcgccatatgaaaggatgcatcccgcgagaattaataaaaagaataacgctatgcacgaaccgatatctacattccgaaaagtcggacaaagcgtaaacgttcgatgaagccatatcatacttgcgccgattgcagttacccgtgaagaagatgccaatggggtgtggatgtggagatgtgatgttaccttgatttcatgcagtaaaccgcaacaattggaatgggggttggaatgggtatgggtatggaaatgggaatgaacagacctgtaatgccgtttcccaatatgttacctggttcggctttgccagcggcaactgccgctgctactcatttgggaccaagtttttccatgcagcctttccacatgccccatgttcctgctcctgattcatctagaatgcaagcagcaaatcagtcagataataatatggtcacgtcagctggtccacctgatccaaatcagtcacgtatcccaaacttcactgatccttatcaacaatatcttggtccccaccagatggagttccaattaattcagaatcaggcaatgaaccaaccaaatgttagcaagccaagtaacaatgggggccctgcgaatccagaaaaccattagtcgggaggataaattattctttgatagttacaatgaagggatggctattgaagcggtgcgccaaccctcttccacacgtctcagctgacgcagctccgacggttagcggttccggctcggatactacagctgcacagttttagggtgttaagagaacgaactttttagctgttctcagtagcaagctaatcgatacacggctatcatgttaattattgcaacgaagttttctccctcttttatcatccttttttcccgttgaaaagttgctctcttcgagattctttaaagtgggatgcgatacgtcagacaaggctccaatgctggacgaagcaatttcgtacttgaagtcgttgcagtacgatgagcagatgttgtccatgggatgtggaatggtacctgtgatgtttcctggaatccagcagtacatgccagcaatgggaatgggggttggaatgggtatgggtatgggaatgggaatgaacagacctgtaatgccgtttcccaatatgttacctggttcggctttgccagcggcaactgcagctgctgctcatttgggaccaaggttttccatgcctcctttccacatgccccatgttcctgctcctgattcatctagaatgcaagcagcaaatcagtcagataataatatggtcacgtcagctggtccacctgatccaaatcagtcacgtatcccaaacttcactgatccttatcaacaatatcttggtccccaccagatgcagttccaattaattcagaatcaggcaatgaaccaaccaaatgttagcaagccaagtaacaatgggggccctgcgaatccagaaaaccattagtcgggttagattttccggctcctatactacagctgcaaagttttgtagtgttaagagaacgaactttttagctgttctcagtagcaagctaatcgatacacggctatcatgttaattattgcaacgaagttttctccctcttttatcatccttttttcccgttttaaaatttctcttttcgagattctttgatgtgggaagaggaactcgatagatggcacaatagatgaacgtgcattctacaccaaacgtggaggccacttacgtttagtccaattcctgcttcagattcttgttatgttcttcatttaccatcaattttctcctattaggcgttacagcagcctgtgaacctcatcgctgttatttatggagtgaaattgaagcagttcttgatctacatgcccagatggctctgttacaatgcacgatgtgcttagtcaattaaagaaaggaaattgaattattaaaaatttaaaatttatagtactacacatagcagaatttgtacaatagactgtgggattaagagattaccataaaagttatagctatttgtatggcgggtgcgcctcagggaccttgcaatctcttaatttaaagttaaaataatgatgtattggtataag

SEQ ID NO: 27784 - DNA, 1300 bp, Glycine max
  unsure (1)..(1300): unsure at all n locations
  Clone ID: TF_GmC256128_1
ntgccatggggctcctgtcccgggtcccgggtcgaccatgctcggcggccgccctttttttttttttttgaatgaggccaaacccgttattcaatagaatagcaaaacacgttatacaagttgcaaattcctatgaacatagatatgaaggtaattaggtaaagtaaaccaagaaagccacctaaatcataacaagttactaattaaccccaataagaaaggagtataaatattctgctattaattgtttctcgtcacttgctttggagctaatatacacatttctcacaaagaattagtatggacattcttgtaattgtagctcaacactctcataacagaactagctagctcagttcttggaaccagaagtaggaggttggtgcagctgctgatacattgcagcaagtctactgtaggcatccatggtcatgggctgcgattggcatccaaaaattgtggacaaagggtcaggcatcacggaagccggagtcccttgaaggcggtcgcctccaccagcagcggcagcaacagcggcatcccacgaggctgccatgggcatgaaggcagaagggtggaggactggagggatgccagggatgtgagcacggttcatggagttcatatccatccccattcccatacccatccccatacccatccctaatcccatgcccattggagacatcatcgacatttgaagctgttgctgcatggtcaatggcagcatcatcgatgacatgttgattctatttatcatctgcaactgtgcttgcaactgcttcaaatattctatcacctcatccaacattgaagctttatcactcttgctggaatttgggaccaacttttgcaatgtcttcattctttggtttatcttatccctccttttcctttcagattggttgtgtatagccgcagctctgctccttttagtggacaccgatgattttccgtttgctctctttttcttcccttcatcctggtcttctcccactggtttactgtgggaaacagaatcgtggtcgtctacggtggtggtcttggtgcagtgcttagcggagctggtgttttcgagcgagttgatggaggtggaagtggaacccacgccaaactccctgtcgcacgtgtctagggtcacgtgcttgctatccctcccaaacgtggcactcccactcacgctctgatccctcccagtcgcctcatgccccttcgcccccttcccccgcagcatgaccccacacgcgtggagcaccccacatgcacgtgccgncggggaccgactncatgccctgcttgc

SEQ ID NO: 27785 - DNA, 2428 bp, Glycine max
  Clone ID: TF_GmC993_1
ctcttttcctttcccatttgcttagctttttcatttaccagataataataaatttcccttttcacaccctccccttctcaaattgatcactccattccaccctataatataatccattcttaaccaactttttttttcggcctgcgtaacaaaagaatcatcattcttttttaacccactttagccctcaccaatatgcttgtccaggctttatcatttcgatctgatttaagccaatctccaattagggtatgtgggagaaaatcagtaaaaccatgaagcttctctaagatcatcaccctcgtgtgcattatgatcaccggtaaagaactaaggcctgatgattgtataaactatgtcaactgagctgaacgccaattccaccttcaagaccatcaagtcatgtgatattaacaccgagcaggattttagtatggagaatcgaatcttaagtgatatactccaatctcatgaagccttcaattacaacatgtcccggaaggattttgtcctaccggaactcgatggattcggctcgagcattggtgctggctctgatgagattgagatctcacctcattctcagcctttggttggtgcatcttcctacatcaattgcaataacaacagcaccaacacatcatgttatagtacccctttgagttcttctccaaaggtgaacatgaacaagatccccacaatggtgaagcacttggtgaaagagggcatgcccctaagtttggggacatcaacgtcctcgaattcaaccgtgacggaattctcagctgatcctggctttgctgagagggctgcaaagctttcttgctttggaagtcggagtttcaagttgcaggaacacgcaattgagtctcaacaatgctgaattggggctgatctcttctccattggtggaaaatgggaagaagcagctccctagagtctcaagtagtccatcactcaaagtgcttggatctcaaatgggtactcaggagaacaagaattctccattgcaagacctaatggaagtggccaattctcaagaggagtccgcaatctctgaacaaacaccaaatggagacactggggagaaaccttccccttatgtgaattctaggaaaagaaaaggtccatccaaaggaaaagccaaagaaacttcaacctctaccaacccccctatggctgctgaagctagcgatgactctaatgcaaagcgcagcaagcctaacgaaggtgaggggaatgaaaatggccacaaaaaggcagaggaagccttaaaaggaggtaatataaaaaatgcaaatgatttctgtattctctggtgcaaattcttattattattctggcaccaactgtacgatatattgctaattaaaagaggtcaagccactgatagtcatagtcttgcagaaagagttcggagggagaaaatcagtgaaagaatgaagcttctccaagatcttgtcccaggttgcaacaaggtcacgggtaaagcactaatgcttgatgaaattataaactatgttcagtcattgcagcgccaagttgagtttctgtctatgaagttggcttctgttaacaccaggctggattttagtattgagagtctaatctcaaaagatatatttcaatcaaataattctttggcacacccaatattcctgatagattcctcagcgccacccttttatgggcaacaccctcagccaaacccagcagtccacaataacattcctaatggaactatgacccacaactcagtggacccattagatactggtatgtggattcctgggtttggcatgcatttaccacacctaaatgattttaatgaaggtggctttcagtatccaaaaccattctctgaagatgacctccacaccattattcagatgggatttggccaaaatgcaaataggataacaccaatacaatctcagagtttcaacggctcaaatcaagtacccctatgaaaatcaagctctgatcaccattcattacgcctgaattgaagcttggaggaataggaagactactgctgtacacaacaagaagggatttaatttgaacgaccccttgaattattaagccattgttatcactaggtctaatagaaccttcttttgtccttatgtatgttagccattttcttttcttaccctttccatgagtttaatttttaatcatcaggggcagttcttttcaaatttttttacaacttcttcactgtaaaatctttaggaccgattctgatttctcttggtgcaaattcttatttttacggcaccaattgtaagatatagtgcaaattaaaggagtttttctactacccagccattatgattatccctcctcactttgtctattattgtacgctttatataattcatacatcacatcaacccacaaagatttttcgtgggactttatt

SEQ ID NO: 27786 - DNA, 766 bp, Glycine max
  Clone ID: TF_GmC1795_3
tccggttttgaaaaagttcaagcggctgaaaaaaggcaggagggatattgaggaggagccctctgggctgtctgatgaggaggagcttgttggaagtggtaaagctgggcgaactgctgaggagaagcttaaacgcagtttatttggtgatgatgaaggagctccacttgaagacattgctgaagaggaggagcaaggagaagaggaagaggatgctgacattgaagaagagcttgaaaaccgtggccgggagcaagagaagcttcagtccgagctcaaaaaattgcagaagttgaaggagtttaaacctaccatgaatttgcctgtgttgaaagataatgaagaaaagaaggataagaagaagaaggggtgctctgagaagaaaaggccttctccaccttacattttgtggatgaaagaccaatggaatgagataaaatcatttgggataattaaatttttcttattttctctcttttatttgttggttttagttaaattcaatggtttttatgtattgatggcttggtgcagatcaagaaagcgaactcagaggcagaatttaaggaaatttctaccatgctgggttctaaatggaagactgttactgcagaagagaagaagccttatgaggagatataccatgccgagaaagaagcttatttgcaaatgattgcaaaggaaaaacgtgagactgaggcaatgaggttgttggaagacgagcagaagcagaagactgccatggagttgctcgaacagtacatgc

SEQ ID NO: 27787 - DNA, 304 bp, Glycine max
  Clone ID: TF_22522754
caaacctataagaccacccaatgctttctttgtgttccctgaagaggtaaagaagagctttaatgctgagaatactaatgcgaaggccgcatcaaatgatgctaaacctggatgatagaaatgtaaatcctagtccagtgctgaaaaagctccatatgaaatcattgctgcgaaaaggaaatctgactctgaaaaacttatccaagcttatgataacaagtatgctagctcctcaaatgatgaagaatcatacgagtccaaatctgaagtgaatgatgaccatgatgccagtggagacgatgag

SEQ ID NO: 27788 - DNA, 517 bp, Glycine max
  Clone ID: TF_LIB3028-039-Q1-B1-C3
cgctatcctattccgcgttctctcatccatcatgaaatgaggaaagtccaagaccgaatctaagagagccgatgccaaacttgctgtgaataagaacggcgccgccaccaagactaggaaacccgccggaaaggggaaggcagcgaaagatcctaacaagccaaagaggcctccaagtgctttcttcgttttcatggaggaattcaggaaggtgttcaacaaggaacgtcccgacaacaaagcagtgtctgctgtgggcaaaggtggctgggcaagatgggagacgatgtctggaggctggaaaagcgccttatgtgggaaagtctgagaggagggaagtggagtgcgagaagaacatgagagcttataacaagaaacaggcggaaggtcctactggtggggatgaagaaaaatcggagaagtctgtatctgaggtgaatggataggatggttacgaggaagggcattgggaggaggaggatgacgaataaagaatgggctgatgataatagcattt

SEQ ID NO: 27789 - DNA, 380 bp, Glycine max
  Clone ID: TF_jC-gmXLIB3563P058bb03a1
ctcatcttttttttttctctctcacggctcaataccctatctccctaccctatttaggtctctctaatacataatgaaaggaggaaagaacaataccgaatctaagagagcctatgccgaacttgctgaggataagaagggcgccgccaccaatactacgaaatcggccggataagcgaacgcagctaaagatcctaacaagccctataggcctccaagtgctttcttcgttttcatggaggaattcaggaaggcgttcaactaggaacatcccggctacaaagcaaagtctgctgagggcaaatctgctggagcaaaatgaaagacgatgtccgatgcttgaaaagcaccttatgtgcgcgaagcctatgagaaggaaa

SEQ ID NO: 27790 - DNA, 1474 bp, Glycine max
  Clone ID: TF_GmC11_3
atctctcccactctcgcgttccttcttcgtcgcctcgacttcttcgttgcgacactgagagagctgagggagctggcggcgctttgacttcttcacagtgtcactctgtctctctttttcttctcacactcacgcctcacacagttcctaaatccctagccagtacaacctcactcactttctctctttgtctctctttctctcagattcctacattgtctgcgcactggcaccaaacaaccataagatctgcaccgtcgctgaaatcggcctcaacgacgcatgccgtcgggaatcagcaactttgtgtcgtttaggttgaagcgcaagggcgctggtgctggaaggaagcaatcgaagaaagctgctaaggatcctaacaagccaaagagacctccaagcgctttcttcgttttcatgtacggattttcgtttgcttttgataccgaatctgttttcgtttcgtttcgttttgatttttttttttgtgttctggcgattgaagtttttgtgattgtttttttaggtccgagttcagagagcagtttaagaaggagcatcctaacaacaaatccgtcgctgttgtgagtgatttcgccttactttcactgttcgcgtgaaaatttgacgctatttttttgttcttaatagaatttcactgtgaacatattttaggtcggtaaagctggtggtgacaaatggaaatcgctgtctgatgctgtgagtattaagattttgagaattcttttttcattattagtttttgcgtatggttctatatgatttaatttattgaccatatctacttatttgtaacctagtttgcgttcatttaatgtttcaggaaaaggcccccttcgttgccacggccgaaaagaagaaacaagagtatgagaaaactattttggcttacaataagaaattggtgaatactttttaccctatactacttactcttattttatagtataatgtaatgtaatgcaataattgattgagcttgttattttgatgtgttaggaggggaagaattcagaggaagacgagtctgacaagtcaaagtctgaagtcaatgacgatgaggaagatgaggtagatggagattaacctgttattatgatttgtgtcttgtttaactagtttgttcctttgtataactaattgtataattaatgtgttgtttgctgtttattctgtaggaggaggaggatgatgatgacgacgagtgaagatggtgatacaagatgaagcgtaggaggatgtgggaaaagaaaattgttttgcatagtagttgttgggtttagaatttcataggatggttcccaacccacatccctttatgataattagtttctgaatttttattttgtcctcccttactagggttagattagcgcacaatcgtaattagggttcagtatcatgatcatgtacttaaaagtcaatgctatgatacgtttcaattctattctcg

SEQ ID NO: 27791 - DNA, 1081 bp, Glycine max
  Clone ID: TF_GmC40409_2
ggtgagtctagtcaatttctttttaaactctgcgatgctaaatttagcggtgtcactcacctgaatttctcttttttgtgatctttggggcctttatcaatgccacatctctttctttctctcttgatctcattttgtgatctttggggcctttatcaatgccacacctaaatttagcaatgtcactcacctgaaattaagtgtgtattctttcttttgcgaattttttttcagagttgatttgacgtaacccaaaatcgtgtttaatgttttgaggcaatttctttgtttgctacatcaatggggtttctttaaacaatagttttggaattttcgttttaaattgtttgcctattggctacattgtttggttttacattgtctggttcttctttattcaagaacgcatcatcttgtacaagatttgcacgaactcagagcgagagcaacaggaggaattgtctactttccgcaaccagatatgttctgaagggtaatccctatgacctggaatgcaactcacttagcaagtcttgcttcagttaaaaacggatagtatatctttttcctaatctggtattcttgctagagttaaaaacagatagcatatcttttgattatgtttccgttaatgtaagaaatcgatcaagcacaaatggaacaattacacaagaaaattgaggatgacttagaggtctcaagattggcaatgcatctggaaagaagtggatatcaatgactaatgaggagaaggttaaatactatgatatagcctcagaaaaacgtatagaatttgatagagcaatggcaaaatttaacaataaaatggaaagtgggggagtttgacgaaattggtgggtaaagcctccttatttttctgtattcattttttcttatgattctgccgtcattttctctgggttgcatattgcaagtgtttgtattgcttcaaatgctgggaagcttagggtggctctttgagaatactctatttcttttgatggagttttgcatccattgagaaattggaatttaacatttaattgttcaaaagtggagggaaaatgggtaaatagatgat

SEQ ID NO: 27792 - DNA, 414 bp, Glycine max
  Clone ID: TF_LIB3242-472-P1-J1-E9
aattcggctcgagggtcggcaaagctggtggtgaaaaatggaaatcgctatctgatgctgtgagaattatgattttgagaaatattttaatgataattttttgtgtgtggttgtatatgatttaatttaacgaatcatgtctactttttctgtaacctagtttgcgttaatttaatgtttcaggaaaaggcccctttcgttgctactgctgagaagaagaaacaggagtatgagaaaactatttcggcttacaataagcaattggtgaatactttttaccctatgtacttttttacttcttactcatattgtatataactgtttataatgtattgaacttgttattttgatgtgttaggagggaaagaattcagaggaagactagtttgacaagttaaagtctgaagttaatga

SEQ ID NO: 27793 - DNA, 1016 bp, Glycine max
  unsure (1)..(1016): unsure at all n locations
  Clone ID: TF_GmC11_4
cgcaaggccatctctcccactctcgcgttccttcttcgtcgcctcgacttcttcgttgcgacactgagagagctgagggagctggcggcgctttgacttcttcacagtgtcactctgtctctctttttcttctcacactcacgcctcacacagttcctaaatccctagccagtacaacctcactcactttctctctttgtctctctttctctcagattcctacattgtctgcgcactggcaccaaacaaccataagatctgcaccgtcgctgaaatcggcctcaacgacgcatgccgtcgggaatcagcaactttgtggttgaagcgcaagggcactggtgctgctggaaggaaacaatcgaagaaagctgctaaggttcctaacaagcgaaagagacctccaagcgcttttttcattttcatgtccgagttcagagagcagttcaagaaggagcatcctaatttattgatgatatccacatttttgtaacctagtttgcattaatttaatgtttcatgaaaaagtcccttcgttgctatggccaaaaagaagaaaccagagtnntagaaaactattttggcttacnnatagaaatggnaggggaagaatccagaggaatacgagtctgacaagtcaaagtttgaagtccatgatgatgaggcgattgaagattgctaagcatgagcagcaggaggatggtgatgacgacgagtgaagatggtgatacaagatcaagcgtagtaggatgtgggaaaagaaaattgttttgcatagtagttgttgggtttagaatttcataggatggttcccaacccacatccctttatgataattagtttctgaatttttattttgtcctcccttactagggttagattagcgcacaatcgtaattagggttcagtatcatgatcatgtccttaaaagtcaatgctatgatacgtttcaattctattctaaaaaaaaaaaaaaaaaaaaagaccgctatcgggcgctctagcggacgcacgcgtgc

SEQ ID NO: 27794 - DNA, 287 bp, Glycine max
  Clone ID: TF_uC-gmroLIB3259P245c07b1
gagtattttgtaagaaggagcatcctaacaacaaagccggggctggggtcggtaaagctggtggagacaaatggcaatcgctggctgatgctgaaaaggcccccttcgctgccacggccgaaaagaagaaacaagagtatgagaaaactatcttggcttacaataagaaatgggaggggacgaatccagaggaagacgagtctgacaaggcaaagtctgaagtcaacgacgatgaggaagatgaggacgaggaggatgatgatgacgacgagcgaagacggtgatac

SEQ ID NO: 27795 - DNA, 404 bp, Glycine max
  Clone ID: TF_jC-gmXLIB3564P090af01b1
tacggctgagagaagacgacggaagggggccatagaatgatcacccatgctcatgtttctctctaatctgtccactccatactactaactaccgaccctgttcctctctcgttccgtcatgaatggatgacagtccatgaccgaatctaaaagagccgatcccaaacttcgctgagaataaaatgggagccggcaccatggctaagaaacccgccggccatgcgaaggcggcgaaggaccctaacaagccatagaggcctcccagtgctttcttcgtttccatggaggactgcaggagggtattcaccatagaacatcctgaaaacatagcactgcctgctgagagcatagctgctggagcaaaatggaagaccatgtctgacgctgaaagagcaccttatgtg

SEQ ID NO: 27796 - DNA, 681 bp, Glycine max
  Clone ID: TF_GmC2181_16
tacggctgcgagaagacgacagaagggggctagtggtactgtcttagctttgattctctggtctctgttttgttctgtttcgcgtattgtcttcatacaggaacttgaacaatgaagaatgcaaagggcaagggagcagcaagggcctcaaaagaatcactgaagcccgttgatgaccgaaaggttggaaagcggaaggcttccggtaagcctgggagaagtagtgcaccaaagaaggagaagaaggccaagaaagaccccaacaagcctaaaagaccacccagtgctttctttgtgttcctgtttgtatcttctttactctttccttcatatctctccctcagaaaaatgatatgacttattttccttctctgtgatagtgaggagttcaggaagacctttaaggctgagaatcctaatgtgaaggctgtatcagttgttgggaaagctggaggagagaaatggaaatccttgtccagtgctgtaagctttgcaattgtgataaataatggctcattttgttatcttttaaattatttgactcttcactgtttttttagttgttttcaatataaatttattttgaagtagatatagtttctcatttgtatgcaaatgttgcttcaatttgaattccagtaatatcaatatatatgtaccaaatgaactcattctattgaa

SEQ ID NO: 27797 - DNA, 483 bp, Glycine max
  Clone ID: TF_uC-gmropic112g01b1
ttgtgctcaatatctccccgcatttgtgcctagccttattattatcattgtcgatattcattccccttatctttctctcttctctctccccgcccaaaccctaactccctaccctattccgctttctctcatccatcatgaaaggaggaaagtccaagaccgaatctaagagagccgatgccaaacttgctgtgaataagaagggcgccgccaccaagactaggaaacccgccggaaaggggaaggcagcgaaagatcctaacaagccaaagaggcctccaagtgctttcttcgttttcatggaggaattcaggaaggtgttcaacaaggaacatcccgacaacaaagcagtgtctgctgtaagtgtatctgttgttaaaatgagtggtgatcacatcatataaatggatctcggcagttacatgaatttaactgaacatttcagtgggcaaagctgctggagcaaatggaagacgatgtctg

SEQ ID NO: 27798 - DNA, 462 bp, Glycine max
  unsure (1)..(462): unsure at all n locations
  Clone ID: TF_LIB4281-020-R1-K1-D4
ccacgcgtccgaaacttgctgagaataaaaaggtcgctctgacactcaatactggtaaacccgccgcaaaggggaaagtagcgaaagatacctaacatagtctcataagagtcctccaagatgctttcttagttttcatggaggaatttaagaaggcgttcaacaaggaacatcccgacaacaaagcattgtctgctgttttcaagagctgatggatcaaagatggaagacgatgtctgatgctgaaaaagcaccttatgtggcaaagtctgagaaaaggaaagtggagtacgagaagaacatgaaagcttataacaagaaacatgcggaaggtcctactgatggggatgaaacaagagttngaaaagtctgtatctgagagagaatgatgaggatgatgacagaagaatgcatagtcgaggaggaggatgacgattacagaatgcactgatgataataaca

SEQ ID NO: 27799 - DNA, 1227 bp, Glycine max
  Clone ID: TF_GmC2181_49
cttcgcttgcctaaccttggatcctcggtccttggtttggtccggttccgcgtttggccttcttccgggaccttgaccaatgaagaatgcaaagggcaagggagcagcaagggcctcaaaagaatcactgaagcccgttgatgaccgctgttacaggaaataatgtagtgatggaacatatatctctgttgttttcagaaaggttggaaagcggaaggcttccggtaagcctgggagaagtagtgcaccaaagaaggagaagaaggccaagaaagaccccaacaagcctaaaagaccacccagtgctttctttgtgttccttgaggagttcaggaagacctttaaggctgagaatcctaatgtgaaggctgtatcagttgttgggaatgcagcattagggtttttcatctgcttcaatggggaagggaacagggagttttggtaagagaaggaacaagactcacactctctgtgtgaggtgtggccgccgcagcttccatctccagaagagtcgttgcgccgcttgtgctttccccgccgcacgcactaggaaatataactggagcgtcaaggcaatccgcagaaagaccaccggaactggcaggatgaggtacttgcgtaacgtgcctcgccgattcaagagtggcttcagagaaggtaccgaagctgcacctaggaagaagggagcagctaccactgcataaacctgtcaaagatcgttgtttgctgggtacggacttacaagaatagattgcttttttgtgcttatggcaagtattttggaacaattatttttagagtctgattgctactttgtccttcatttaatttgtagttgctttatatttcaacaagatcataagacttattgattattcagtcggctatgttacatttatagtttgtggtttaagcagttttcaattagtgaatactggatagaatgaaagacatccctacctggctatcccacaatactattctaggcatttgttatgaaatttgccatagtcataacgagagagctttaatttgttatgggaagttagtttaggtaaacctggtttgcttccgttgtgactgcataaacggttttcttcacttgtttcacaatgtgtatcctaaaaccaattcttctgatatattcctcaagtcaaaggcagtttctacgtttcttttatcatgtatgtaactttcatagtaaactgatttgtttggatgtctatg

SEQ ID NO: 27800 - DNA, 350 bp, Glycine max
  Clone ID: TF_LIB3040-049-Q1-E1-C1
gattatcatagtagatattcattccccttatctttctctcttctctctccccgcccaaaccctaactccctatcctattccgctttctctcatccatcatgaaacgaggaaagtccaagatctgaatctaacagagccgatgccaaacctgccgtgaataagaagggcgccgccatcacgactaggaaacccgccggaaaggggaatgcatcgaaagattctaacaagccaaagacgcctccaagtgctttcttcgttttcatggaggaaatcatgaacgtgttcaacaaggaacatcccgacagcaaaacagtgtctgctgttggcaaaactgctggagcaaaatggaa

SEQ ID NO: 27801 - DNA, 467 bp, Glycine max
  Clone ID: TF_LIB3242-438-P1-J1-G8
ggctgcgagaagacgacagaagggggattttagttttagtattttagtttgggtgaaattgcaggaccctgtgtagtgtgtagtctgcagacaaacatggcgaaaaaggtaaaagggtctcactctgcttcttctgcctctgcatcttcccgcaaactagtgctgaggattaaatcaaacgagggaatcaagagatcagtgcggcagactaattcaagaaagaaacccaaagcaaagcaaaagaagaacaaacaaatgtttgatgctatgaaacccaagaaacctccgacagctttcttctacttcttgtaatgtcatctcaaaagcagatgggattcattctatttagtgcatttttacttttcaagggaggattttcgtaaagaatttcaagagcagaatccagatgtaaagtcaatgcgtgatattggcaaggcatgtggagagaagtggaaaacagtgactta

SEQ ID NO: 27802 - DNA, 305 bp, Glycine max
  Clone ID: TF_LIB3242-696-P1-K1-F7
acgcccacgcgtccggaggcctccaagtgctttctttcttttcatgggggaattcaggggggtgttcaacaaaaaacatcctgaaaaccaaacagtgtcttctttgggcaaaacttcttgaaccaaatggaaaaccattttcttattcttaaaaagcaccttatgtggcaaagtctgagaaaaggaaagtggagtacgaaaagaacaatgagagcctataacaagaaacaagccgaaggtcctacttgtggggatgaaaaagaatctgagaagtctttatcttaagtgaatgattaaaattatta

SEQ ID NO: 27803 - DNA, 333 bp, Glycine max
  Clone ID: TF_LIB3040-034-Q1-E1-A2
gacaacacaacgcaacacaacgcgcactctcgcttttctctctgatcacagctaccctatcgttcttcgcggtttcgccgattctcgccatggcgaaagccatatccgacgccgaaggcgccgatagacggttgaaacgcaaaggcgctggtgctggaaggaagcaatcgacgaaagctgctaaggattctaacaagccagagagacctccaagcactttcttcggtttcatgtccgaattcatagagcagtttaagatggagcatccgaacaacacagccgtcgctgttgtcggtaaagctggttggtagatatggaaatcgctgtctgatg

SEQ ID NO: 27804 - DNA, 630 bp, Glycine max
  Clone ID: TF_LIB4164-047-Q1-K1-D2
cacgcgtccgcgcgcactctctctttttctctctgttttttgttctctcttcgcttaaaccctatcgttcttctcgttttcgccgattctcgccatgccgaaagctaaatccgacgccaaagccgccgatagcaggttgaagcggaagggcgctggtgctgggaggaagcaatcgaggaaagctgctaaggaccctaacaagccgaagagacctccaagcgctttcttcgttttcatgtccgagttcagagagcagttcaagaaggagcatcctaacaacaaatccgtcgctgttgtcggcaaagctggtggtgaaaaatggaaatcgctatctgatgctgtgagaattatgattttgagaaatattttaatgataattttttgtgtgtggttgtatatgatttaatttaacgaatcatgtctactttttctgtaacctagtttgcgttaatttaatgtttcaggaaaaggcccctttcgttgctactgctgagaagaagaaacaggagtatgagaaaactatttcggcttacaataagcaattggagggaaagaattcagaggaagacgagtctgacaagtcaaagtctgaagtcaatgatgacgaggaagatgaggtagaattgatct

SEQ ID NO: 27805 - DNA, 652 bp, Glycine max
  Clone ID: TF_LIB4203-002-R1-N1-C5
caaagtcatttccctttattaaattgttttcacagaccagaaatacaaaataaaagtagaaataggcccctattaggagctacaggcctgacttggcatgacccctgctgcagcaacttgaacaggacaggaagcagcttttactacagtcagaaagtaggaaagtaggctgaggacttgggtccttcaatgcactgcgagtagaagacaacacactcctaccgagtctctctccagattgcaaggagccttccttgcaaagcagcagaggttaggtgcttccctcaaagcctcagggcagtggaagccaccaagagcagttactcagatggcacagaatccaaggactatgtgagagactggagctgtgacgaggtgggaattccctcctagcatcctcagccttgcggtcccactcctccttcttctctttggacattcccttccagatctcccctgccttcttggaaagatctgtgatactgatgccaggatgatccgacttgatcttctcgcggcttgcattaagccacagcatgtacgcagacataggcctctttggggcgtttggatctttacccttctttgcctctgaagacttcctgcggctctttcgatccttggccatcttagcccttttgagctgttcccg

SEQ ID NO: 27806 - DNA, 1391 bp, Glycine max
  Clone ID: TF_GmC302_1
gcagtatataaaggattttttattttatataacctagtgagttgtgtgaatctatagatacataaattgagctaagggaaggtgtttgaatgcttacatacatagattaaggattttaggaccaaagagggagtcatgaatgtgacaaacaaaccaaacccatatggttccaccaatgggtttcagtctctgcttcaacaaaatgggtgggaacagggatcatctagactcagacccactaagctttaccctgcaccaacggctcgctaccaggacattgttcgtgatgcaaacctcttctggggaacgcttcaagcttttcacaaaacacttggcaccaaatataagatttctactgtgggaggaacgccacttgatctacatcgtcttttaggtgatgttacatcgtgagtgggaggaagtgagtctgaccttcaatgtcaaagataccatatgattctgatcatctatggtgcgcaaatcctatctattgatgcttttacactatgagcaagtgtattattttgggattatcactttgagcaagtgtattattttgggaggcaaggcattcctcccacaacacctgatcttatgattagaggccaatcatgccaaccctatagctccacaaccattccagaagttgctgctgtgaatgattcacctgttcagagttctccagtacgggcacatgatgatatggtttctggaacaattgatgcgaaatttgatgttggatatgtagttacagtgactctaggttctgagcagctgcaaggtgtcctgtttcatgttcctgataacgtgtcccagagttctcatgccgaaggcacatctagttcacagaatcttggtgatgacacgtctaatttacagagtcgaaagagagcaaaatatgcaccacgtgatccatttcggccaaagtcaaacaggagcggttacaactttttctttgctgaaaattatgccaggctgaagccctcgtatcatgggcaagagagagcaattagtaagaggattgggtttctgtggaacaatctgtcagaagcagaaagacaggtttatcaagagaaagggataagagataaggaaagatacaggactgaactgatggagtacaaatccaataattcaactccaaatgctcaataggctgttttatgtaatccttagactgtcatttcatatgcttcatctgttgttcttttcatgcctttgctatagttaattttcttatccattctacagagaaacttagaagagtagctttgtgacaattctggtgtaaattatgctgaatggttttaataaacatcttgtagcggttaattcattgtagttactcttgaaattaagggtccttcattcaatttaaacatcttatttgt

SEQ ID NO: 27807 - DNA, 423 bp, Glycine max
  Clone ID: TF_LIB3087-001-Q1-K1-E10
cggacgcgtgggcggacgcgtgggcggacgcgtgggcggacgcgtgggcggacgcgtgggcgattctcgccatgccgaaagccaaatccgacgccaaagccgccgatagccggttgaagcgcaagggcgctggtgctggaaggaagcaatcgaagaaagctgctaaggatcctaacaagccaaagagacctccaagcgctttcttcgttttcatgtccgagttcagagagcagtttaagaaggagcatcctaacaacaaatccgtcgctgttgtcggtaaagctggtggtgacaaatggaaatcgctgtctgatgcttttgcgttcatttaatgtttcaggaaaaggcccccttcgttgccacggccgaaaagaagaaacaagagtatgagaaaactattttggcttacaataagaaattgga

SEQ ID NO: 27808 - DNA, 582 bp, Glycine max
  Clone ID: TF_jC-gmst02400047f11a1
ggctcgagcttcccactatctggctctcttctctctccccgcccaaaccctaactccgtaccctattccgctttctctcatccatcatgaaaggaggaaagtccaagaccgaatctaagagagccgatgccaaacttgctgtgaataagaagggcgccgtcaccaagactaggaaacccgccggaaaggggaaggcagcgaaagatcctaacaagccaaagaggcctccaagtgctttcttcgttttcatggaggaattcaggaaggtgttcaacaaggaacatcccgacaacaaagcagtgtctgctgtgggcaaagctgctggagcaaaatggaagacgatgtctgatgctgaaaaagcaccttatgtggcaaagtctgagaacaggaaagtggagtacgagaagaacatgagagcttataacaagaaacaggcggaaagtcctactggtggtgatgaagaagaatctgagaagtctgtatctgatgtgaatgatgaggatgatgacgacgaatgcagtggccaggaggaggataccattgaagaatggactgtgatattgcatttagtaggtctgatga

SEQ ID NO: 27809 - DNA, 567 bp, Glycine max
  Clone ID: TF_LIB4128-120-Q1-K1-F9
cccacgcgtccgatgggaacagagacatacgctcaggaaaagcgcacggatcaatgacatggcaataaatttaaattcccgcctaaacccctgaccttcccttgatttcatttcgtttgcaattgaatttcaatttccctaggggcttaatatctccccgcatttgtgcctagcctcattattatcatagtagatattcattccccttatctttctctcttctctctccccgcccaaaccctaactccctaccctattccgctttctctcatccatcatgaaaggaggaaagtccaagaccgaatctaagagagccgatgccaaacttgctgtgaataagaagggcgccgccaccaagactaggaaacccgccggaaaggggaaggcagcgaaagatcctaacaagccaaagaggcctccaagtgctttcttcgttttcatggaggaattcaggaaggtgttcaacaaggaacatcccgacaacaaagcagtgtctgctgtgggcaaagctgctggagcaaaatggaagacgatgtctgatgctgaaaaagcaccttatgtggcaaa

SEQ ID NO: 27810 - DNA, 1151 bp, Glycine max
  Clone ID: TF_GmC43_4
gtttatcgtgaggagaatacggagtcgtacgctctttataagcgcacggatcaatgacatggcaagtgaatttaaattcccgcctaaaccccacgcgttccctggatttcatttcgtttgcaattgaatttcaatttccctaggggcttaatatctccccgcatttgtgcctagcctcattattatcatagtagatattcattccccttatctttctctcttctctctccccgcccaaaccctaactccctaccctattccgctttctctcatccatcatgaaaggaggaaagtccaagaccgaatctaagagagccgatgccaaacttgctgtgaataagaagggcgccgccaccaagactaggaaacccgccggaaaggggaaggcagcgaaagatcctaacaagccaaagaggcctccaagtgctttcttcgttttcatgtaattataatatattgttatctctacgattcatttgacttccgatgcgctctcttatctttcctccgaataattttatcgtcaaaacttttatccttgtccaattggaggaattcaggaaggtgttcaacaaggaacatcccgacaacaaagcagtgtctgctgtgggcaaagctgctggagcaaaatggaagacgatgtctgatgctgaaaaagcaccttatgtggcaaagtctgagaaaaggaaagtggagtacgagaagaacatgagagcttataacaagaaacaggcggaaggtcctactggtggggatgaagaagaatctgagaagtctgtatctgaggtgaatgatgaggatgatgacgaggaaggcagtggcgaggaggaggatgacgattagagaatggactgatgataatagcatttatgtaggttctgatgattttgatcatccgtgtaggtggtctggtcatttccttataaacatatttctctttccaaaaaatatttccctgctcctccttccgtaaattgctcgtctttccaaaacgtgaatagtttaaagaagggagttctctttatttgtatttctaaatccaactgtttagttaagggatggttatctcttgtagagcttttagtttgatttagagttttcttgttgaaatctggttaagtttgtatcaatataattgacttatcatcccc

SEQ ID NO: 27811 - DNA, 296 bp, Glycine max
  Clone ID: TF_700559324H1
gttcaaggaccccaatgcccccaagaggcctccttcggccttcttcttgttctgttctgagtaccgcccaaaaatcaaaggcgagcatcctggcttatccattggtgatgttgcgaagaaactaggagagatgtggaacaacactgctgcggatgacaagcagccctatgaaaagaaggccgccaagctgaaggagaagtatgagaaggatattgctgcctacagagctaaaggaaaacctgatgcagcgaaaaagggggtggtcaaggctgagaagagcaaaaaaaaaaaaaagg

SEQ ID NO: 27812 - DNA, 681 bp, Glycine max
  Clone ID: TF_LIB5068-041-A1-XP1-A7
tttcagaagtgagagtattatcattcattctcatctttctctcttctctctccacccaaaccctaactcccgaccctgttcccctctcgtatccgtcatgaaaggaggaaagtccaagaccgaatctaagagagccgatcccaaacttgctgtgaataagaagggagccgccaccaaggctaggaaacccgccggcaaggggaaggcagcgaaagaccctaacaagccaaagaggcctccaagtgctttcttcgttttcatggaggagttcaggaaggtattcaacaaagaacatcctgaaaacaaagcagtgtctgctgtgggcaaagctgttgtttttaaatggaacaccatgtctgatgctgaaaaagcaccttatgtggcaaagtctgagaaaaggaaagtggagtacgagaagaacatgagagcctataacaagaaacaggcggaaggtcctactgccggggatgaagaagaatctgagaagcctgcatctgacgtgcatgatgaacatgatgatgaggaaggcagcggcgaggaaacagatgaccactaaagaatggactgatacttgcatttatgtaggcccctgatgattttgaacatctgttgcaagcgcgatggcactttcctcgctaacacatttcctggctcacaaaaaaatatttcacctgctccccc

SEQ ID NO: 27813 - DNA, 514 bp, Glycine max
  Clone ID: TF_uC-gmflLIB3275P091a02b1
cggatgcgtgtgcttatctgtctgtcttctctctcacccgcccaaaccctaactccctaccctattgcggtctctctcatccatcatgaaaggaggaaagtccaagaccgaatctaagagagccgatgccaaacttgctgtgaataagaagggcgccgccaccaagactaggaaacccgccggaaaggggaaggcagcgaaagatcctaacaagccaaagaggcctccaagtgctatcttcgttttcatggaggaattcaggaaggtgtgcaacaaggaacatcccgacaacaaagcagtgtctgctgtgggcaaagctgctggggcaaaatggaagacgatgtctgatgctgaaaaagcaccttatgtggcaaagtccgagaaaaggagagtggagtacgagaagaacatgagagcttataacaagaaacaggcggaaggtcctactggtggggatgaaagaagatctgagaagtctgtctctgaggggaatgatgaggatgatgccgaggaa

SEQ ID NO: 27814 - DNA, 1382 bp, Glycine max
  Clone ID: TF_GmC1739_1
ggtccggattccccgtcgacccagcgtccgcaaattttgcagaagttgaaggagtggaaacctaccatgaatttgcctgtgttgaaagataatgaagaaaagaaggataagaagaagaaggggtgctctgagaagaaaaggccttctccaccttacattttgtggatgaaagaccaatggaatgagatcaagaaagcgaactcagaggcagaatttaaggaaatttctaccatgctgggttctaaatggaagactgttactgcagaagagaagaagccttatgaggagatataccatgccgagaaagaagcttatttgcaaatgattgcaaaggaaaaacgtgagactgaggcaatgaggttgttggaagacgagcagaagcagaagactgccatggagttgcttgaacagtacatgcaattcaaacaagaggcagaaaaagatggcaagaagaacaagaaagagaaggatccattgaaaccaaagcaccccatgtcagcttatttcttgttcactaatgataggcgagcagctcttgctgccgagaacaagaatttcttggaggttccaaaaatcacatccgaagagtggaaaaacatgacagaagaacaaaaaagaccctatgaagagatggcaaagaaaaataaggagcaatatgccctagaaatggaggcttataaacagaagaaagatgaggaggctgcccatttcatgaaggaagaggaggagcagatgaaacttcaaaaacaagaagcattgcaactgcttaagaagaaggagaaaactgaaaatataatcaagaaaacaaaacagaaccgccagaagaagaaacagaacaaggatgacaagaattctgatccaaacaggcctaagaagcctgcatcctcattcatcttattcagcaaagaagcaaggaaaactttacaggaggagcgaccaggaatcagcacctcaacccttaatgcacttgtttcattgaagtggaaggaactgagcgaggaagatagacaattctggaatggccaagcatcaaaagcaatggatgcatacaagaaggaattggaggaatacaacaaatcccttgctgcaactgcatgccaggagcagaaaaccgaataataattaattgaaaaggaagaaaaaaaccccttgtgcgcatgttcaaaattatattgaatatgctatcttcaaaatttagtcctcattaatggctttcatgtagttgtaattttttacgcaaattctcttcatgcagtttttattaatcttgaatttggccattttttttaaaaaaaaaaaaaaaaaaaaaactaaaaaaaaaaaaaaaaaaaaaaaaaaaaaaaaaaaaaaaaaaaaaaaaaaaaaaaaaaaaaaaaaaaaaa

SEQ ID NO: 27815 - DNA, 477 bp, Glycine max
  Clone ID: TF_uC-gmflminsoy075f12b1
atccccgcatttgcgcctagcctgattattatcatagttgatattcgttcgccttatctttctctcttctgtctccccgcccagaccctaactgcctaccctattgcgctgtctctcatccatcatgaaaggaggaaagtccaagaccgaatctaagagagccgatgccaaacttgctgtgaataagaagggcgccgccaccaagactaggaaacccgccggaaaggggaaggcagcgaaagatcctaacaagccaaagaggcctccaagtgctttcttcgttttcatggaggaattcaggaaggtggtcaacaaggaacatccggacaacaaagcagtgtgtgctgtgggcaaagctgctggagcaaaatggaagacgatgtctgatgctgaaaaagcagcttatgtggcaaagactgagaaaaggaaagtggagtccgagaagaacatgagagcttataacaagaaacaggcgga

SEQ ID NO: 27816 - DNA, 1534 bp, Glycine max
  Clone ID: TF_GmC43_1
cggaggcatacgcttaggaataacgcagccatcgcaaaataagcgcacggatcaatgacatggcaataaatttaaattcccgcctaaacccctgacctcccctggatttcatttcgtttgcaattgaatttcaatttccctaggggcttaatatctcccctcacttgtgcctagccttatgtcatagtattatcattcattctcatctttctctcttctctctccacccaaaccctaactcccgaccctgttcccctctcgtatccgtcatgaaaggaggaaagtccaagaccgaatctaagagagccgatcccaaacttgctgtgaataagaagggagccgccaccaaggctaggaaacccgccggcaaggggaaggcagcgaaagaccctaacaagccaaagaggcctccaagtgctttcttcgttttcatggaggagttcaggaaggtattcaacaaagaacatcctgaaaacaaagcagtgtctgctgtgggcaaagctgctggagcaaaatggaagaccatgtctgatgctgaaaaagcaccttatgtggcaaagtctgagaaaaggaaagtggagtacgagaagaacatgagagcctataacaagaaacaggcggaaggtcctactggtggggatgaagaagaatctgagaagtctgtatctgaggtgaatgatgaagatgatgatgaggaaggcagtggcgaggaagaggatgacgattagagaatggactgataattgcatttatgtaggttctgatgattttgatcatctgttgtaggtggtctggtcatttcctgataaacatatttcttgcttccaaaaaatatttccctgctccctccgtaaattggttgtctttccaaaacgtgaatagtttaaagaagggagttctttatttgtacttctaaatccaactgtttagttaaggggtgtttatctcttgtagagcttttagtttgatttagagttttcttgttgaaatctggttaagtttgtatcaatataattggcttatcattcgctttctgctgtaaatatgatatttatgttttgttagagaggaagaggtgtgtggagggtggatgaaggagggtgcggtctgggaagaaggcgagcgaggagggggatgacgattagagaatggactgatgataatagcatttatgtaggttctgatgattttgatcatccgtgtaggtggtctggtcatttccttataaacatatttctctttccaaaaaatatttccctgctcctccttccgtaaattgctcgtctttccaaaacgtgaatagtttaaagaagggagttctctttatttgtatttctaaatccaactgtttagttaagggatggttatctcttgtagagcttttagtttgatttagagttttcttgttgaaatctggttaagtttgtatcaatataattgacttatcatcccctttctgctgtatatatgcgatttatgttttttagttcctgaaaaaaaaaaaaaaaaaaaaaaaaaaaaaaaaaaaaaaaaa

SEQ ID NO: 27817 - DNA, 705 bp, Glycine max
  Clone ID: TF_GmC43_10
cccacgcgtccgcccacgcgttcgcccacgcgtccgcccacgcgtccgctcttctctctccacccaaaccctaactcccgaccctgttcccctctcgtatccgtcatgaaaggaggaaagtccaagaccgaatctaagagagccgatcccaaacttgctgtgaataagaagggagccgccaccaaggctaggaaacccgccggcaaggggaaggcagcgaaagaccctaacaagccaaagaggcctccaagtgctttcttcgttttcatggaggagttcaggaaggtattcaacaaagaacatcctgaaaacaaagcagtgtctgctgtgggcaaagctgctggagcaaaatggaagaccatgtctgatgctgaaaaagcaccttatgtggcaaagtctgagaaaaggaaagtggagtacgagaagaacatgagagcctataacaagaaacaggcggaaggccctactggtggggatgaagaagaatctgagaagtctgtatctgaggtgaatgatgaagatgatgatgaggaaggcagtggcgaggaagaggatgacgattacagaatggactgataattgcatttatgtaggctctgatgattttgatcatctgttgaaggtgggctggtcatttcctgataaacatattttcttgcttccaaaaaatatttccctgctcccttccgcaaattggttggcttt

SEQ ID NO: 27818 - DNA, 717 bp, Glycine max
  unsure (1)..(717): unsure at all n locations
  Clone ID: TF_GmC43_8
cgtttttctgcaattctcttcgttttcaagcgattttcttcgtttttctacgaattcacgccgtaaaactatcctgattgtgtgattgcagtatccgtcatgaaaggaggaaagtccaagaccgaatctaagagagccgatcccaaacttgctgtgaataagaagggagccgccaccaaggctaggaaacccgccggcaaggggaaggcagcgaaagaccctaacaagccaaagaggcctccaagtgctttcttcgttttcatggaggagttcaggaaggtattcaacaaagaacatcctgaaaacaaagcagtgtctgctgtgggcaaagctgctggagcaaaatggaagaccatgtctgatgctgaaaaagcaccttatgtggcaaagtctgagaaaaggaaagtggagtacgagaagaacatgagagcctataacaagaaacaggcggaaggtcctactggtggggatgaagaagaatctgagaagtctgtatctgaggtgaatgatgaagatgatgatgaggaaggcagtggcgaggaagaggatgacgattagagaatggactgataattgcatttatgtaggttctgatgattntgatcatctgttgtaggtggtctggtcatttcctgataaacatatttcttgcttccaaaaaatatttccctgctccctccgtaaattggttgtctttccaaaacgtgaatagtttaa

SEQ ID NO: 27819 - DNA, 551 bp, Glycine max
  Clone ID: TF_LIB3242-426-P1-J1-E4
cctgacttgtgcctagccttatgtcatagtattatcattcattctcatctttctctcttctctctccacccaaaccctggctcccgaccctgttcccctcgcgtatccgtcatgaaaggaggaaagtctcaagaccgaatctaagagagccgatcccaaacttgctgtgaataagaagggagccgccaccaaggctaggaaacccgccggcaaggggaaggcagcgaaagaccctaacaagccaaagaggcctccaagtgctttcttcgttttcatggaggagttcaggaaggtattcaacaaagaacatcctgaaaacaaagcagtgtctgctgtgggcaaagctgctggagcaaaatggaagaccatgtctgatgctgaaaaagcaccttatgtggcaaagtctgagaaaaggaaagtggagtacgagaagaacatgagagcctataacaggaaacaggcggaaggtcctactggtggggatgaagaagaatctgagaagtctgtatctgaggtgaatgatgaagatgatgatgaggaaggcagtggct

SEQ ID NO: 27820 - DNA, 654 bp, Glycine max
  Clone ID: TF_GmC2181_11
cacgaggagaaagaccccaacaagcctaaaagaccaccgagtgctttcttcgtgttcctgtttgtatcttctttgctctttcctttatatctctcccttggaaaaatggtatgacttatttcgttctctgtgatagtgaggagttcaggaagacctttaaggctgagaatcctctcgtgaaggctgtatcagttgttggaaaagctggaggagagaaatggaaatccctgtccagtgctgagaaagctccatatgaagccaaggctgcaaaaaggaaagctgagtatgaaaaacttatcaaagcttatgagaaaaagcaggcaagctctgcagatgatgatgaatcagacaagtccaaatctgaagtgaatgatgaagatgatgccagtggagaggaggaccaccaagaggacgaggatgatgaggaggaagaggacgatgaagatgatgactgagattgatgtccaaaaccttggttatgatattttgtttatgagggaggctattatatattctgactgtgcatactaggctactttttatgtttgtgctggtagaaaagaatgtcttctttgttggtacgatatattgccaactacttgagcttccctcacttagctatcgtacctgaatcactttttgtgcattgtagcc

SEQ ID NO: 27821 - DNA, 1176 bp, Glycine max
  Clone ID: TF_GmC43_6
attgaatttcaatttccctaggggcttaatatctccccgcatttgtgcctagcctcattattatcatagtagatattcattccccttatctttctctcttctctctccccgcccaaaccctaactccctaccctattccgctttctctcatccatcatgaaaggaggaaagtccaagaccgaatctaagagagccgatgccaaacttgctgtgaataagaagggcgccgccaccaagactaggaaacccgccggaaaggggaaggcagcgaaagatcctaacaagccaaagaggcctccaagtgctttcttcgttttcatgtaattataatatattgttatctctacgattcatttgacttccgatgcgctctcttatctttcctccgaataattttatcgtcaaaacttttatccttgtccaattgtaagtccacgcgttctttacctgttgttgtttgtttacctcgattgctttattgttaaaattatgttttttgagtatgctagatctagcttatgcttcgtgaaacttgatattactacacgccccgttgtttttatgattgtattgtggttgttttctgaaatttgtgttgtaattaaagggaggaattcaggaaggtgttcaacaaggaacatcccgacaacaaagcagtgtctgctgtgggcaaagctgctggagcaaaatggaagacgatgtctgatgctgaaaaagcaccttatgtggcaaagtctgagaaaaggaaagtggagtacgagaagaacatgagagcttataacaagaaacaggcggaaggtcctactggtggggatgaagaagaatctgagaagtctgtatctgaggtgaatgatgaggatgatgacgaggaaggcagtggcgaggaggaggatgacgattagagaatggactgatgataatagcatttatgtaggttctgatgattttgatcatccgtgtaggtggtctggtcatttccttataaacatatttctctttccaaaaaatatttccctgctcctccttccgtaaattgctcgtctttccaaaacgtgaatagtttaaagaagggagttctctttatttgtatttctaaatccaactgtttagttaagggatggttatctcttgtagagcttttagtttgatttagagttttcttgttgaaatctggtc

SEQ ID NO: 27822 - DNA, 574 bp, Glycine max
  Clone ID: TF_10843327
cacgaggcctcacttgtgcctagccttatgtcatagtattatcattcattctcatctttctctcttctctctccacccaaaccctaactcccgaccctgttcccctctcgtatccgtcatgaaaggaggaaagtccaagaccgaatctaagagagccgatcccaaacttgctgtgaataagaaaggagccgccaccaaggctaggaaacccgccggcaaggggaaggcagcgaaagaccctaacaagccaaagaggcctccaagtgctttcttcgttttcatggaggagttcaggaaggtattcaacaaagaacatcctgaaaacaaagcagtgtctgctgtgggcacagctgctggagcacaatggaagaccatgtctgatgctgaaaaagcaccttatgtggcagagtcttgagaaaggagagttgagtacgacgagaacatgagagcctatgacaagaaacaggcggaatgtgctacttggtgggatgatgaagaatctgaaaattctgtatctgatgtgaatgataaacatgatgataaagcatgcacctgctatgtagaggatgacgag

SEQ ID NO: 27823 - DNA, 961 bp, Glycine max
  Clone ID: TF_GmC1795_1
tacggctgcgaaagacgacagaaggggacacactgactcactgttctaattcatttctgaaatagaattccgttattctctctctctctctcttgtttcatcgatgggtggcacagttgttgctgaagtacccacaaagaggggaaggggcagaagggccctgaaggagaaaaccccatcaacgaacgatgctaacatcatcatagccacaccaatttcgccatcatccgaaaaggcggcacaagttgttccctcaaagaaaaaacaagattcaaagaagcagcaatctttcgaaaaagaattgctggagatgcaggaaatgctgcagcagatgcgcctcgagaaggagaagaccgaagagctcttgaaggtcaaggacgaggctctcaagctgaaggaagaagagcttgaaaaccgtggccgggagcaagagaagcttcagaccgagctcaaaaaattgcagaagttgaaggagtttaaacctaccatgaatttgcctgtgttgaaagataatgaagaaaagaaggataagaagaagaaggggtgctctgagaagaaacggccttctccaccttacattttgtggatgaaagaccaatggaatgagatcaagaaagcgaacccagaggctgaatttaaggaaatttcaaccatgctaggtgctaaatggaagactgttagtgcagaagagaagaagccttatgaggggatataccatgcggagaaagaagcttatttgcaggtgattgcaaaggaaaaacgtgaaactgaggcaatgaggttgttggaagacgagcagaagcagaggactgcgatggaattgcttgaacagtacatgcaattcaaacaagaggcaggaaaagatggccagaagaaccagaaagagaagaaacaacaggccgccaacgaccccttgtcgcctttgttcgcgttcgaaaaacgtgagactgaggcaatgagg

SEQ ID NO: 27824 - DNA, 2551 bp, Glycine max
  Clone ID: TF_GmC2151_1
gtttgtttgtttgtttgtttttttttcttctttctgttcttgttgggctgttattcccttttcggctcattgcagcattctacactgaacggcgtgtttggatggaagcctaaaaattgcgtcaattgagaaagctattactaatcacttggacgtgggacattcacgttcgcgcttcttttttctcttggcattgcgttaacgttgcgtttgtgtgtgcaattaatatcacacaacaaaaccttgttcgttcttctctgaactctctcattagtgtgagccgagagtcatgacggacggtcatctcttcaacaacatcaccctcggaggccgtggaggcaccaatccagggcagataaaaatatatcctggaggaattatatggaagagacagggtggtggtaaattaattgaagttgataaatctgacataatgggggtgacatggatgaaggtgcccaggagtaaccaacttggtgttcaaatcaaagatgggttgtactataagttcacgggatttcgtgaccaggatgttgtaagtttgaccaattttttccaaaacacctgtggaatatcagtagaagagaagcagctttctgttagcggacgtaattggggagaagttgatctaaatggaaatatgctggctttcacggttggttcaaagcaagcttttgaagtgtctttagcagatgtctctcaaacgcagcttcaagggaagaatgatgtgatcttggagtttcatgtggatgacacaactggagcaaatgagaaagattcactaatggagataagtttccatataccaaattccaacacccagtttgttggtgatgaaaatcgtccccctgctcaggttttccgtgacaaaattatgtctatggctgatgttggcgctggaggtgaagatgctattgttacatttgagggtattgcgatccttacaccaagaggacgatacagtgttgagttacacatgtcattcttgcggcttcaaggacaggctaatgatttcaaaatccaatatagcagtgtggttcgcctatttttacttcctaagtctaatcaaccacatacctttgtcattattagtcttgatccccctattcgaaagggacaaactttgtaccctcatattgtgatgcagtttgaaactgattatgttgttgaaagtgaattggcaataaatgaagatctttataacacaaagtacaaggacaagttggatctgtcttataaggggcttattcatgaagtgttcaccacaatattacgtggtttgtctggtgccaaagtgaccaagccaggaaaatttaggagttgtcaagatggctatgcagtgaaatcatctttgaaagctgaagatggaattctgtatccccttgagaagagcttcttctttctacctaaacctcccactcttattcttcatgaagagattgactatgtggaatttgagcgacatgctgctggtgggtccaatatgcattattttgaccttcttatcagactaaaatctgaacaagagcatctcttccgtaatattcagagaaatgagtaccacaatttgtatgaatttatcagttcaaagggcttgaaaattttgaacttaggagatgcacaacctactgttggtataaagaaggttcttgagaatgatgatgatgatgctgttgatccacatcttgaacgcataaaaaatgaagctggtggagatgaaagtgatgaggaggattctgattttgttgctgacaaggatgatgaaggttctcctactgatgattctggggcagacgattctgatgccactgatagtggtgatgagaaagagaagcctgccaaaaaggaatcaaagaaggatctgccttctaaggcatctacttctaaaaagaaatcaaaagatgatgaagatggaaagaagagaaaacagaagaagagaaaggacccaaatgcacccaagagggcaatgtctggtttcatgttcttttctaaattggaaagagagaatctaaagaaaactaatcctggaatttcatttacggatgtgtcaagagtacttggagagaaatggaaaaagttgtcagtggaagagaaggaaccatacgaggcaaaggcacgtgaagataaaaaacgttacaaggatgagattagtggctacaagaatccgcaacccatgaatattgattcaggaaatgaatccgacagtgcctaagctccgtatatttcttactggagtggtgatgacatctactctcatgctccgtaagttggcacatttatgctcttggaaatggcttgataacttgtgaacatgctcaagagttttgtgctctgttggtttgcatggctatagggaaggcagggacggtagagcttgatgtgttgagtaggttcctatgcttaattgaattagtggtctttgtgaattgtgacccaattttcgctaaatgacagtgcctctttttagagtttatgaccggcagatgtaggatttgtaacaatttttttgcttcaactctttgcacgaataggatttaaaatattagatcaa

SEQ ID NO: 27825 - DNA, 354 bp, Glycine max
  Clone ID: TF_LIB3108-006-Q1-K1-F10
cgttcacgcactctacaccgcacgcatctggacgcttcccctctccaccgagaccctaagcctaagttctcgcgatgaagggagtcaagccgaggaatcgcaccgtcaagcctgatgacaagctgggggctaagcggaagggcgccgacaaggtgagcaggcaggtgaagcgtgccaaggctggcaaggaccccaacgcgccgaagcgtcctccgaccgcgttcttcatcttcatggatgatttccgcaaggagttcaaggagaagaacccgaacaacaaatctgtggacactgtgagcaaagctgggcgtgacaagtggaaatcgatgtctgatgctgagaaagcaccctacc

SEQ ID NO: 27826 - DNA, 462 bp, Glycine max
  Clone ID: TF_LIB3242-726-P1-J1-G4
tggatcctctagagcggccgcttttttttttttttttttttttttttttttctgaagcaaaaaattgttacaaatcctacatcagttgggcataaacttgtgtcaatttacgaagcatatgagtagatgccatcaccagtaagaaatatacggctcatggcttacattagcttgctgcataagtatttataaaactgcaagattttttttcacagccttaggcactgtcagattcatttcctgaatcaatattcatgggttgtggattcttgtagccactaatctcatccatgtaacgttttttatcttcacgcgccttggcctcgtatgggtccttctcttccgcagacaactttttccatttctctccaagtactcttcccacatccgtaaatgaaattccaggattagttttctttagattctctctttccaatttagaaaagaacatgaaaccggaca

SEQ ID NO: 27827 - DNA, 414 bp, Glycine max
  Clone ID: TF_LIB3065-016-Q1-N1-B7
ctccccgcccaaaccctaactacctaccctattcggctttctcgcatccatcatgaaaggaggaaagttcaagaccgaatctaagagagcccatgccaaacttgctgtgaataagaagggcgccgtcaccaagactaggaaaccccccggaaaggggaaggcatcgaaagatcctaacaagccaaagaggcctccaagtgctttcttcgttttcatggaggaattcaggaaggtgttcaacacggaacattcctacaacaaagcagcgtctgctgtgggcaaagctgctggagcataatggaagacgatgtctgatgctgaaaaagcaccttatgtggcaaagtctgagaaaaggaaagtggagtacgagaagaacatgatagcttataacacgaaacatgcggaaggtcctac

SEQ ID NO: 27828 - DNA, 1031 bp, Glycine max
  Clone ID: TF_GmC1637_1
tacggttgggagaagctcgagccgaatgaggacacaagacgataacaaatggcatcatctcagtcgaggaagagagttgacgccgtcgattctcgcgctgcttccgttctcgttcgcgccaaagatggcagtgcttttgctcgttgcgacgattgcaagaagaatgtgccggttgcactcatcgacatgcacagttgcagccttgaagctaaaattaaaatgaacctagacgctcaagttgtggaacaggctgctgaagctaagaagccggagaggaagaagcccaaatctaaagagcctatggcaaaaaaaagctaaagttgggaaggggaagaaagtcaaggatcctaacatgcctaagcgtcctcccacagctttctttgtcttcttggatgattttagaaaatctttcaaagaagctaatcctgattctaaggatgttaaaagggttggtaaagaggctggtgaaaagtggaggtctatgactgatgaagagaagaagccatatcttgacaaagttgctgagcttaaggaagagtacgagaaggctatggaaagctatgaagctggtcaagatgaagaagatcaaactgtgtctgataaggaaacttctgataaggaagctgctgcaaaagaagttgcaatagaagttgaagaggagctaactgacgaggactaatggttgcattatggcactccttgaacttgatagctattattctaagggccacataattacttaacgactagggttgtaaattttggaacatgttttagttggagttaaaaactgttgaaatccatgcgcaatatcttttcattttttgtaatgctctcttgtgatgttcgtgaatggtagtcacattgttttctacaagaggcttgttggtctcttttaggattgattattgcttgcatatgtttgagcctttgaggcaattggtaaatagtctgatggctacagcgatattcattggattgacatgtgcgttgcattgaataggagttgcttagctttgttggcttgattc

SEQ ID NO: 27829 - DNA, 604 bp, Glycine max
  Clone ID: TF_uC-gmroLIB3258016f05a1
cgaagagcaacactcgtgtagatttacagagcatgagtagatgccatcaccagtaagaaatatactggaggggcatggcttacattagcttgatgcatgtcatacaacaattatctataaaacagcaggattcttttcaacatacaaacagccttaggaactatctgattcatttcctgaatcaatattcatgtgttgcggattcttctagccgctaatctcatccttgtaacgctttttatcttcacgtgcttttgcctcatatggttccttctcttccgctgacaactttttccatttctctccaagtactcttcccgcatccgtaaatgaaattccaggattagtcttctttagattctctctttccaatttagaaaagaacatgaaaccagacattgccctcttgggtgcatttgggtcttttttcttcttctgttttttcttctttccatcttcatcatcttttgatttctttttagaagtagatgccttaaaaggcagaaccttctttgattcctttttggcaggcttttttttctcatcaccactatcactgccatcagaaacatttgccccaaagtcattcggtgggagaaccttc

SEQ ID NO: 27830 - DNA, 778 bp, Glycine max
  Clone ID: TF_GmC9778_5
gccacataaggtgctttttcagcatcagacatggtcttccattttgctccagcagctttgcccacagcagacactgctttgttttcaggatgttctttgttgaataccttcctgaactcctccatgaaaacgaagaaagcacttggaggcctctttggctttgcgatttgatgtatctagaggaattcagccccagtatttcaagagtgcatttgtaggatacactgttggcttggtccttacaattgttgtgatgaactggtttcaggctgcacagcctgctcttttgtatattgtaccttctgtaattgggtttttggctgctcattgcttatggaatggtgatgtcaaacagttgttggagttcgatgagtcaaagactgccaattcacctcaagagagtgatgacgacaagtctagcaaaaaggttgaataagttgaagcgtgcccaataccaatactttcgagtcacagaaaaccgttacttttaaagctaacttattcagcagcacacctatgtaactgattttgattttaaaaaaatgtattacttatttttcaaattggcattttgcttttactgcctgactgcccgcccaatctgggtttccatagcaaacttttcaagaattttcttctcttttctctcgagcgcactcgtcaatgcaattattcgctgcctattttgaagtttgtttttcattttcagcggtgttccctttttaaaaaaagaaaaatttccccccccgtgtaccatgggtatgtggggctttttttt

SEQ ID NO: 27831 - DNA, 365 bp, Glycine max
  Clone ID: TF_LIB3108-030-Q1-K1-H7
acggccgatgccaaacttgctgtgaataagaagggcgccgtcaccaagactaggaaacccgccggaaaggggaaggcagcgaaagatcctaacacgccaaagaggcctccaagtgctatcttcgatctcatggaggaattcaggaaggtgttcaacattgaacatccagacaacaaagcagtgtctgctgtgggcaaagctgctggagcaaaatggtagacgatgtttgatgctgaaacagcaccttatgtggcaaagtctgagaaaaggaaagtggagtacgagaagaacatgagagcttataacaggaaccatgcgtaaggtacaactggtgaagatgaagaagaatctgacacgtttgcatc

SEQ ID NO: 27832 - DNA, 388 bp, Glycine max
  Clone ID: TF_8285483
gaaaggaggaaagaccaagaccgaatctaatagagccaatcccaagcttgctgtgaataaaagaggaaccgccaccaaggctaggaaacccgccggcaaggggaaggcagcgaaagaccctagcaagccaaagaggcctgcgagtgctgtcttcgatttcatagaggagttcaggaaggtgttcagcaaagaacatcctgaaaacaaagcagtgtgtgctgtgggcaaatctgctagaacaaaatggaagaccatgtctgatgctgaaaaagcaccttatgtggcagagtctgagaaaaggaaagtagagttcgagaagagcataagagcctatatcaagaaacaggcggaaggtcctactggtggagatgaagaagattctgagaag

SEQ ID NO: 27833 - DNA, 1551 bp, Glycine max
  Clone ID: TF_GmC2151_2
tatgtctatggctgatgttggtgctggaggtgaagatgccattgttacatttgagggtattgctatccttacgccaagaggacgatacagtgttgagttacacatgtcattcttgcggcttcaaggacaggctaatgatttcaaaatccaatatagcagtgtggttcgcctatttttacttcctaagtctaatcaaccacatacctttgtcattattagtcttgatccccctattcgaaagggacaaactttgtaccctcatattgtgatgcagtttgaaactgattatgttgttgaaagtgaattggcaataaatgaagatctttataacacaaagttcaaggacaagttggagctgtcttataagggtcttattcatgaagtgttcaccacaatattacgtggtttgtctggtgccaaagtgaccaagcccggaaaatttaggagttgtcaagatggttatgcagtgaaatcatctttgaaagctgaagatggaattctgtatccccttgagaagagcttcttctttctacctaaacctcccactcttattcttcatgaagagattgactatgtggaatttgagcggcatgctgctggtggctccaatatgcattattttgaccttcttatcagactaaaatctgaacaagagcatctcttcctaatattcagagaaatgagtaccacaatttgtatgaatttatcagttcaaagggcttgaaaattatgaacttaggagatgcccaacctactgttggtataaagaaggttcttgagaatgatgatgatgatgctgttgatccacatcttgagcgcataaaaaaatgaagctggtgaagatgaaagtgatgaggaggattctgattttgttgctgacaaggatgatgaaggttctcctactgatgattctggggcagacgattctgatgccactgatagtggtgatgagaaagagaagcctgccaaaaaggaatcaaagaaggatctgccttctaaggcatctacttctaaaaagaaatcaaaagatgatgaagatggaaagaagaaaaaacagaagaagaaaaaggacccaaatgcacccaaaagggcaatgtccggtttcatgttcttttctaaattggaaagagagaatctaaagaaaactaatcctggaatttcatttacggatgtgggaagagtacttggagagaaatggaaaaagttgtctgcggaagagaaggaaccatacgaggccaaggcgcgtgaagataaaaaacgttacatggatgagattagtggctacaagaatccacaacccatgaatattgattcaggaaatgaatctgacagtgcctaaggctgtgaaaaaaaatcttgcagttttataaatacttatgcagcaagctaatgtaagccatgagccgtatatttcttactggtgatggcatctactcatatgcttcgtaaattgacacaagtttatggccaactgatgtaggatttgtaacaattttttgcttcaactgttgcacgaatatgatttaaaatattggacggccgtttagagga

SEQ ID NO: 27834 - DNA, 429 bp, Glycine max
  Clone ID: TF_13477705
ctcgtatccgtcatgaaaggaggaaagtccaagaccgaatctaagagagccgatcccaagtaagtttcactcgcttttgatccaaccatgaattgtttgtttctcttacgattcgacgcttcttactgtgaaataatcaaaaaagctaaggttcacgaatttccagatctgagatctgagatctctgtttggtacggcgattatttcagatgtgtgcgttttactatattgtggttttttattctatttattttgctatgaatttcagacttgctgtgaataagaagggagccgccaccaaggctaggaaacccgccggcaaggggaaggcagcgaaagaccctaacaagccaaagaggcctccaagtgctttcttcgttttcatggaggagttcaggaaggtattcaacaaagaacatcctgaaaaca

SEQ ID NO: 27835 - DNA, 377 bp, Glycine max
  Clone ID: TF_LIB3039-016-Q1-E1-A3
aggggataagtaagtattcatctcaatcctcaacctttccctcttctctctcaaccaataccctacctcccgaccctgttcccctctcgtatcggtcattgaaagaggaaagtctaagaccgaatctaagagagccgatcccaaacttgctgtgaataagaagggagccgccatcaaagctaggatacccgccggcaaggggaaggcagcgaaagaccctaacaagccaaagaggcctccaagtgctttcttcgttttcatggaggagttcaggaaggtattcatcaaagaacatcctgaaaacaatgcagtgtctgctgtgggcaaagctgctggagcaaaatggaagaccatgtctgatgctgaaaaagcacctt

SEQ ID NO: 27836 - DNA, 478 bp, Glycine max
  unsure (1)..(478): unsure at all n locations
  Clone ID: TF_LIB3242-344-Q1-J1-E3
attccccttatctttttctcttctctctccccgcccaaaccctaactccctaccctattccgctttcttttatttattatgaaaggaggaaagtccaagaccgaatctaagagagttgatgccaaatttgttgtgaataagaagggtgccgttactaagactaggaaatttgccggaaaggggaaggcagcgaaagatcctaacaagccaaagaggcctccaagtgttttttttgttttcatggaggaattcaggaaggtgttcaacaaggaacatcccgacaacaaagcagtgtttgttgtgggcaaagctgctggagcaaaatggaagacgatgtctgatgctgaaaaagcaccttatgtggcaaagtctgagaaaaggaaagtggagtatgagaagaacatgagagtttataacaagaaacaggcggaaggtcttactggtggngatgaagaagaatttgagaagtctgtatctg

SEQ ID NO: 27837 - DNA, 370 bp, Glycine max
  unsure (1)..(370): unsure at all n locations
  Clone ID: TF_LIB3106-038-Q1-K1-C6
atctttctctcttctctctccacccaaaccctaactaccgaccctgttcccctctcgtgtccgtcatgaaaggaggaacgtccaagaccgaatctaagagagccgatcccaaacttgctgtgaataagaagggagccgccaccaaggctaggaaacccgccggcaaggggaaggcagcgaaagaccctaacaagccaaagaggcctccaagtgctttcttcgttttcatggaggagttcangaatgtattcaacaaagaacatcctgaaaacanagcagtgtctgctgtgggcaaagctgctggagcacaatggaagaccatgtctgatgctgaaaaaacaccttatgtggcacagtctgagaaaaggaa

SEQ ID NO: 27838 - DNA, 457 bp, Glycine max
  Clone ID: TF_LIB3242-707-P1-K1-B4
cttcccctggctgaagacaccagacgggggtgatagtattataattcattaccatctttcggtgtggtctgtccacccaaacgcctaactctcaacaccttgtcccctttggtatacgtcatgaatggcggaaagcccaacgcctaatctaaaacagccgaacccgaacttgctgtgaataacaaaggagcctacacctacgctaagcaactcgacgaaaaggggaaggcaccctaagacgctaacaagcccaacaggccttcaagtgctttctacggtttcatggacgagttcaggaaggtattcaacaaacaacatcctgaacacaaatcactgtctgcttggtcaaagctgctaagagcaaaactggacaccatgtctgatgctgaaaaagcaccttatgtggcgaagtgtgtgaacaggaaagtggtgtaccagatgaacatgacagcctata

SEQ ID NO: 27839 - DNA, 421 bp, Glycine max
  Clone ID: TF_LIB3242-762-P1-J1-A1
atccattctcatctttctctcttgtctctccacccaaaccctatctcccgaccctgttcccctatagtatccgtcatgaaaggaggaaagtccaagaccgaatctaagagagccgatcccaaacttgctgtgaataacaagggagccgccaccaaggctaggaaacccgccggcaaggggaaggctgtgaaagaccctaacaagccaaagaggcctccaagtgctttcttcgttttcatggaggagttcaggaaggtattcaacaaagaacattctgcaaacaaagcagtgtctgttgtgggcaaagctgctggagcaaaatggaagaccatgtctgatgctgaaaaagcaccttatgtggcaaactctgagaaaaggaaagtggtgtaccagaagaacatgagagcctataacaagaaac

SEQ ID NO: 27840 - DNA, 616 bp, Glycine max
  Clone ID: TF_GmC2181_34
ctattgggtcgtaccctcttctttagtttccaacagcctctctctctgcttttgctagtggtactgtctcttagctttgattctctgttctctgttttgttctgtttcgcgtacaggaacttaaacaatgaagactgcaaagggcaagggagcagcgaggccctcaaaagaatcactgaagcctgttgatgaccgaaaggttggaaagcggaaggcttctggtaagcctgagaaaagcagagcaccaaagaaggagaagaaggccaagaaagaccccaacaagcctaaaagaccaccgagtgctttcttcgtgttccttgaggagttcaggaagacctttaaggctgagaatcctctcgtgaaggctgtatcagttgttggaaaagctggaggagagaaatggaaatccctgtccagtgctgagaaagctccatatgaagccaaggctgcaaaaaggaaagctgagtatgaaaaacttatcaaagcttatgagaaaaagcaggcaagctctgcagatgatgatgaatcagacaagtccaaatctgaagtgaatgatgaagatgatgccagtggagaggaggaccaccaagaggacgaggatgatgaggagggagag

SEQ ID NO: 27841 - DNA, 975 bp, Glycine max
  Clone ID: TF_GmC2181_40
cggtgaaagccaattatcgggttgagtcgtgtggaggcaaggtaccaaagtctccaaaagtcaacaggtagatccggttgctttgatccgtttcgctctctattgggtcgtaccctcttctttagtttccaacagcctctctctctgcttttgctagtgattgtcttctgacaggaacttaaacaatgaagactgcaaagggcaagggagcagcgaggccctcaaaagaatcactgaagcctgttgatgaccgaaaggttggaaagcggaaggcttctggtaagcctgagaaaagcagagcaccaaagaaggagaagaaggccaagaaagaccccaacaagcctaaaagaccaccgagtgctttcttcgtgttccttgaggagttcaggaagacctttaaggctgagaatcctctcgtgaaggctgtatcagttgttggaaaagctggaggagagaaatggaaatccctgtccagtgctgagaaagctccatatgaagccaaggctgcaaaaaggaaagctgagtatgaaaaacttatcaaagcttatgagaaaaagcaggcaagctctgcagatgatgatgaatcagacaagtccaaatctgaagtgaatgatgaagatgatgccagtggagaggaggaccaccaagaggacgaggatgatgaggaggaagaggacgatgaagatgatgactgagattgatgtccaaaaccttggttatgatattttgtttatgagggaggctattatatattctgactgtgcatactaggctactttttatgtttgtgctggtagaaaagaatgtcttctttgttggtacgatatattgccaactacttgagcttccctcacttagctatcgtacctgaatcactttttgtgcattgtagccttaaatgggttgctttaagtaatataatttctttctgatcaatgcattggcaaaattataatttttagtaaaaaaaaaaaa

SEQ ID NO: 27842 - DNA, 358 bp, Glycine max
  Clone ID: TF_16347117
gaaaggaggaaagtccaagaccgaatctaagagagccgatgccaaacttgctgtgaataagaagggcgccgccaccaagactaggaaacccgccggaaaggggaaggcagtgaaagatcctaacaagccaaagaggcctccaagggctttcttcgttttcatggaggaattcaggaaggtgttcaacaaggaacatcccgacaacaaagcagtgtctgctgtggccaaagctgctggagcaaaatggaagaccatgtctgatgctgaaaaagcgccttatgtgggacactctcgaaaaaggaaagtggagcaccagaagaacctgagagcttactacatgaaacaggccggaaggccc

SEQ ID NO: 27843 - DNA, 454 bp, Glycine max
  Clone ID: TF_10232396
gaaaggaggaaagtccaaaacctaatctaagagagccgatgccccacttgctgttaattagatgggctccgacaccaagactaggaaacccgccagaaaggggaaagcagcgaaagatcctaacaagccaaagatgcctccaagtgctttcttcgttttcatggaggaattcaagaaggtgtccaacaaggaacatcccgacaacaaacctgtgtctgctgtgggcaaatctgctggggcaaaatggaagactatgtctgatgctgaaaaagcaccttatgtggcagagtctgagaaaaggaaagtggattacgagaagaacatgagagcttataacaagaaacaagcggaaggtcctactggcggggatgaagaagaatctgagaagtctgtatctgaagtgaatgatgatgatgatgacgatgaatgcattggcgaggatgacgatgacgat

SEQ ID NO: 27844 - DNA, 408 bp, Glycine max
  Clone ID: TF_LIB3242-711-P1-K1-H1
aacggttgcaagaagacaacagaaggggacaacacaacgcgtgagaacgcgcactatgtcttggctcatctaaacacaaaaaccctatcggtattcgtggtttcggcgattctcgacatgccgaaagccaaatacgacgccaaagccgtcgataagccggatgaagcgcaagggcgctggtgctggaaggaagcaatcgaagaaagctgctaaagatcctaacaagccaaagagacctccaagcgctttctttgatttcatgtccgagttcagagagcagtataagaaggagcatactaacaacaaattcagcggtgttgtcagtaaagctggtggagacaaatggaaatggctgtctgaagctgaaaaggccctatttgttgccacggtcgaaagaagaaacaagag

SEQ ID NO: 27845 - DNA, 1303 bp, Glycine max
  Clone ID: TF_GmC11_1
gttttctctacactgcccttcctcgcaacccttcttatccccgcgctcgcgcgacaaaacctcacaacacaacacaacgcgcactctctctttttctctctgtttttcggctcctaggctgccccgccccacgcgtccgcccacgcgtccgcacggctgcgagaagacgacagaaggggacaacacaacgcaacacaacgcgcactctctcttttctctcttaacacaaaaaccctatcgttcttcgcggtttcgccgattctcgccatgccgaaagccaaatccgacgccaaagccgccgatagccggttgaagcgcaagggcgctggtgctggaaggaagcaatcgaagaaagctgctaaggatcctaacaagccaaagagacctccaagcgctttcttcgttttcatgtccgagttcagagagcagtttaagaaggagcatcctaacaacaaatccgtcgctgttgtcggtaaagctggtggtgacaaatggaaatcgctgtctgatgctgaaaaggcccccttcgttgccacggccgaaaagaagaaacaagagtatgagaaaactattttggcttacaataagaaattggaggggaagaattcagaggaagacgagtctgacaagtcaaagtctgaagtcaatgacgatgaggaagatgaggaggaggaggatgatgatgacgacgagtgaagatggtgatacaagatgaagcgtaggaggatgtgggaaaagaaaattgttttgcatagtagttgttgggtttagaatttcataggatggttcccaacccacatccctttatgataattagtttctgaatttttattttgtcctcccttactagggttagattagcgcacaatcgtaattagggttcagtatcatgatcatgtacttaaaagtcaatgctatgatacgtttcaattctattctcgaagaaattccacagccactagcgattaatatcatgatcctgtacttaaagtcaatgttatgatacgtttctattctattctcgaaaaaaaaaaataaaaaaaagagtagttgttgggtttagaatttcataggatggttcccaacccacatccctttatgataattagtttctgaatttttattttgtcctcccttactagggttagattagcgcacaatccgtaattagggttcagtatcatcatgatcatgtacttaaaagtcaatgctatgatacgtttccattctattctcgaagagaagaaaaaaaaaaaaaaaaaaaaaaaaacggccgctgtataggatccaagcttatgtacgc

SEQ ID NO: 27846 - DNA, 884 bp, Glycine max
  Clone ID: TF_GmC11_2
tggatcccctggctcgcgcgctcagacaagacaacacaacacaacgcgcactctctctttttctctctgttttttgttctctcttcgcttaaaccctatcgttcttctcgttttcgccgattctcgccatgccgaaagctaaatccgacgccaaagccgccgatagcaggttgaagcggaagggcgctggtgctgggaggaagcaatcgaggaaagctgctaaggaccctaacaagccgaagagacctccaagcgctttcttcgttttcatgtccgagttcagagagcagttcaagaaggagcatcctaacaacaaatccgtcgctgttgtcggcaaagctggtggtgaaaaatggaaatcgctatctgatgctgaaaaggcccctttcgttgctactgctgagaagaagaaacaggagtatgagaaaactatttcggcttacaataagcaattggagggaaagaattcagaggaagacgagtctgacaagtcaaagtctgaagtcaatgatgacgaggaagatgaggaggaggatgatgatgacgacgagtgaagatggtgatacaagatgaagcgtaggaggatgtgggaaaagaaaattgttttgcatagtagttgttgggtttagaatttcataggatggttcccaacccacatccctttatgataattagtttctgaatttttattttgtcctcccttactagggttagattagcgcacaatcgtaattagggttcagtatcatgatcatgtacttaaaagtcaatgctatgatacgtttcaattctattctcgaagaaattccacagcctctttcaactttcccttttaaaaaaaaaaaaaaaaaaaaaaaaagcgaccgccctacaggatgcagcta

SEQ ID NO: 27847 - DNA, 448 bp, Glycine max
  Clone ID: TF_10844802
gaaaagaggaaagttcaataccgactctaatagagcctatcccaaacttgctgtgaataataagggagccggcaccaaggctaggatacccgccggcaacgggaaggcagttaaagaccctaacaagccaaataggcctgccagtgctatctttgttctcatggaggagttcaggaatgtattcaacaaataacatcctgaaaacaaagcactgtctgctgtgggcaaagctgctggagcaaaatggaagaccatgtctgatgctgaaaaagcaccttatgtggcatagtctgagaaaaggaaagtggagtacgagaagaacatgagagcctataacaagaaacaggcggaatgtcctactggtggggatgaagaataatctgagaagtctgtatctgatgtgaatgatgaacatgatgatgagcaaagcgatggcgaggaagaagat

SEQ ID NO: 27848 - DNA, 725 bp, Glycine max
  Clone ID: TF_GmC34041_1
cccacgcgtccgacgacggaaaggggacgacagaagtgggtagtgtgtagtcaccaaacaaacatggcgaaaaaggcaaaagggtctcactctgcctcttctgcctctgcatcttcttcgtccgacaaactagtgctgaggattaaatcaaatgaggggaccaagagatcagtgcggcaaactaattcaagaaagaaacttaaagcaaagcaaaagaagaacaaacaaaagtttgatgctatgaaacccaggaaacctcctacagctttcttctacttcttggaggattttcgtaaagaatttcaagagcagaatccagatgtaaagtcaatgcgtgatattggcaaggcatgtggagagaagtggaaaacaatgacttatgaggagaaggtacaatactatgatatagcaacaaaaaaacgtgaagaatttgatagcgcaatggcagaatttaacaagaaaatggaaaatggcgagtttgacgaaactgatgatgaatcagagtttgatgagtaaagccacccttatttttcttactaggttggatctgtattaactgaaactacttggactaacagttgtacattcagttatcatcagcttttttctgtccttgctgatacttataatttctgtgtgtcatatgttaaatatatttgttgtatttagatgtttaatatggcaatttgggttctgtcaaaaaaaaaagaggcaatttgggccat

SEQ ID NO: 27849 - DNA, 931 bp, Glycine max
  unsure (1)..(931): unsure at all n locations
  Clone ID: TF_GmC1637_2
ttcttcccacgcgtccgcccacgcgtccgggcacgcttacttccacgcgtgcgttctgctgccagaagacgacagaagggggagtgagtgagggcattgttgtttaggtacagaaaaatggcatcatctcagtcgaagaagagagttgacgctgtcgattctcgcgctgcttccgttctccttcgcgccaaagatggaagtgcttttgctcgatgcgacgactgcaagaagaatgtgccggttgcactcatcgacatgcacagttgcagccttgaagctaaaattaaaatgaacctagatgctcaagttgtggaacaggctgctgaagctaagaagccagagaggaagaagcccaaatccaaagagcctatggcaaaaaaggctaaagttgagaaggtgaagaaagtcaaagatcctaacatgcctaagcgtcctcccacagccttctttgccttcttggatgattttagaaaatctttcaaggaagctaatcctgattctaaggatgttaaaagggttggtaaagaggctggtgagaagtggaggtctatgactgatgaaaagaagaagccttatttggataaagttgctgaacttaaggcagagtatgagaaggctatggaaagctatgaagctggtcaagatgaagaagatcaagctgggtctgacaaggaagctgctgcaaaagaagttgaagaagagctaactgacgaggagtaatggtggcattttggcactccttaaacccgatgactactattttaagggccacatattgcttagacagactagggttgtaaattttggaacatgttctagttggagttaaatgccgttaaaatccgtgcgcaatatttttttttttttgtaatgtacatgaatggtagtcactttgttttccaaaaaaaaaaaaaaaaaaattnntttttaa

SEQ ID NO: 27850 - DNA, 913 bp, Glycine max
  Clone ID: TF_GmC2181_47
gtggtactgtcttagctttgattctctgttctctgttttgttctgtttcgcgtgtaagttcccctgttcctcttttcctctttctaagattgtcttcatacaggaacttgaacaatgaagaatgcaaagggcaagggagcagcaagggcctcaaaagaatcactgaagcccgttgatgaccgaaaggttggaaagcggaaggcttccggtaagcctgggagaagtagtgcaccaaagaaggagaagaaggccaagaaagaccccaacaagcctaaaagaccacccagtgctttctttgtgttccttgaggagttcaggaagacctttaaggctgagaatcctaatgtgaaggctgtatcagttgttgggaaagctggaggagagaaatggaaatccttgtccagtgctgagaaagctccatatgaagccaaggctgcgaaaaggaaagctgagtatgaaaaacttatcaaagcttatgataaaaagcaggcaagctccgcagatgatgaagaatcagacaagtccaaatctgaagtgaatgatgaagatgatgccagtggagaggaggaggaagaggatgatgaggaggaagaggacgatgaagatgatgactgagattgatgtccaaaaccttggttatgatgttttgtttgtgaaggaggctattatatattctgattgtgcatactaggctacttttttatatttgtgctggtagaaaagaatttcttcttttgttggcatgatatactctaccaactacttgagcttccctcacttagctatcgtacctgaatcactctttgtgcattgtagccttacatgggttgctttaagtaatataatttctttctgatcaatgcattgttataattatagttattagtataaatggaattatcattttctgatc

SEQ ID NO: 27851 - DNA, 334 bp, Glycine max
  Clone ID: TF_LIB3040-017-Q1-E1-G12
gatgtgatagtattatcattcattcgcatcggtctcacttctctctccacctataccctaactcacgacactgtacccctctcgaatccgtcatgacacgaggaaagtccaagaccgaatctaagacagcagattgcaaacttgctgtgaataataagggagccgcgaacaatgctaagaaactcgccggcaacgggaatgcagcgaaagatgctaacaagcgaaagaggcctccaagtgcattcttcgttttcatggaggaattcacgaatgtattcaacaaagaacatcctgaaaacaaatcagtgtctgctgttggcaaaactgctggagc

SEQ ID NO: 27852 - DNA, 378 bp, Glycine max
  Clone ID: TF_11689089
accctaactatcgaccctgttcccctctcgaatccgcattgaatggaggaaagccctagaccgattttaagagaaccgatcctaaactagctgcgaatatgagcggagcctccaccaatgctaggaaacccgccggcaaggggaaggcagcgaaagaccctaacaagccaaagaagccttcaaatgctttcttcgttttcatggaggagttcaggaaggtattcaacaaagaacatcctgaaaacaaagcagtgtctgctgtgggcaaagctgctggagcaaaatggaagaccatgtctgatgctgaaaaagcaccttatgtggcaaagtctgagaaaggaaagtggagtacgagaagaacatgacagcctataacaa

SEQ ID NO: 27853 - DNA, 408 bp, Glycine max
  Clone ID: TF_uC-gmflLIB3275P072h03b1
ttgcccttaggttttggaaacccgccggcaaggggaaggcagcgaaagaccctaacaagccaaagaggcctccaagtgctttctacgatttcatggaggagttcaggaaggtattcaacaaagaacattctgaaaacaaagcagggtcagctgggggcaaagctgctggagcaaaatggaagaccatgtctgatgctgaaaaagcaccttatgtggcaaagtctgagaaaaggaaagtggagtacgagaagaacatgagagcctataacaagaaacaggcggaaggtcctactggaggggatgaagaaaaacctgagaagcctgtatctgaggtgaatgatgaagacgatgatgaagaaggcagtggcgaggaagaggatgaccaatagagaatggactgacaattgc

SEQ ID NO: 27854 - DNA, 587 bp, Glycine max
  Clone ID: TF_LIB4391-014-R1-K1-E6
ttctcatctttctctcttctctctccacccaaaccctaactcccgaccctgttcccctctcgtatccgtcatgaaaggaggaaagtccaagaccgaatctaagagagccgatcccaaacttgctgtgaataagaagggagccgccaccaaggctaggaaacccgccggcaaggggaaggcagcgaaagaccctaacaagccaaagaggcctccaagtgctttcttcgttttcatggaggagttcaggaaggtattcaacaaagaacatcctgaaaacaaagcagtgtctgctgtgggcaaagctgctggagcaaaatggaagaccatgtctgatgctgaaaaagcaccttatgtggcaaaagtctgagaaaagggaagtggagtacgagaagaacatgagagcctataacaagaaacaggcgggaaggtcctactggtggggatgaaagaagaatctgagaagtctgtatctgaggtgaatgatgaagatgatgatgaaggaagccagtggcgaagaaaaagatgacgattaaaagaaggactggtaattgcatttatgtagggtctgatgattttgatcactctgt

SEQ ID NO: 27855 - DNA, 409 bp, Glycine max
  Clone ID: TF_4260356
gaaagggggaaagttcaagaccgaatctaagagagccgatgccaaacttgctgtgaataagaagggcgccgccaccaagactaggaaacccgccggaaaggggaaggcagcgaaagatcctaacaagccaaagaggccttcaagtgctttctttgtttttatggaggaattcaggaaggtgttcaacaaggaacatcccgacaacaaagcagtgtctgctgtgggcaaagctgctggagcaaaatggaagaccatgtctgatgctgaaaaagcaccttatgtggcaaagtctgagaaaaggaaagtggagtacgagaagaacattagagcttataacaagaaacaggcggaaggtcctactggtggggatgaataagaatcttagaagtctgtattttacgtgaatgat

SEQ ID NO: 27856 - DNA, 388 bp, Glycine max
  Clone ID: TF_7146626
gaaaggaggaaagtccaagaccgaatctaagagagccgatgccaaacttgctgtgaataagaagggcgccgccaccaagactaggaaacccgccggaaaggggaaggcagctaaagatcctatcgagccaaagaggcctccaagagcattcttcgttatcatggaggaattcaggaaggtgtgcaacaaggaacatcccgacaacaaagcagagtctgctgtgggcaaagctgctggagcaaaatggaagacgatgtctgatgctgaaaaagcaccttatgtggcaaagtctgagacgacgagagtggagtacgagaagatcatgatagctcataacaagaaacaggcggaacgtcctactagtggggatgaagaagaatctgagaag

SEQ ID NO: 27857 - DNA, 423 bp, Glycine max
  Clone ID: TF_20075468
cataaaaaaaagtatccaactgaaaatgtccaagtaacagaaattacaaaaaaatgttctgaaaaatggaaaacaatgtctgatgatgagaaaagacgtttttacgagctagcacaaaaagatgcagaaagatatcaagctgaagtagctgcatatggcggtgatgatgtaactaaaaagcgtaaaataactaaaaaagatccaaatgcaccaaaacgtgctttatctgcatttttctttttttcaaatgaagaacgaccggaagtacaacgtcagcatccagaatggaaagttggacaggtagcacaagagctaggaaagttttggaaaaatctgcctgatgaagagaaggcgatttatgaaaacaaggcaactgaggaccaagaacgatatgcacaggaaatgaaaacctaccgaggcgaa

SEQ ID NO: 27858 - DNA, 652 bp, Glycine max
  Clone ID: TF_7147175
gcaccaggccaaacttgctgtgaataagaagggcgccgccaccaagactaggaaacccgccggaaaggggaaggcagcgaaagatcctaacaagccaaagaggcctccaagtgctttcttcgttttcatggaggaattcaggaaggtgttcaacaaggaacatcccgacaacaaagcagtgtctgctgtgggcaaagctgctggagcaaaatggaagacgatgtctgatgctgaaaaagcaccttatgtggcaaagtctgagaaaaggaaagtggagtacgagaagaacatgagagcttataacaagaaacaggcggaaggtcctactggtggggatgaagaagaatctgagaagtctgtatctgaggtgaatgatgaggatgatgacgaggaaggcagtggcgaagaggaagatgacgattagagaatggactgatgatgatagcatttatgtaggttctgatgattgtgatcatccgtggtagtgggctgggtatgtccttataacatatttctcttggccgaaaaaattgccctgctcttcttgcataagtgggcgcggtttcaaaccggaaatgttaaaaaaaggaagtcgtctttatttgtttgctagaacgactgttaggttaaggatgggattgtctgttgaact

SEQ ID NO: 27859 - DNA, 1136 bp, Glycine max
  Clone ID: TF_GmC43_2
cccacatcgtgcgaagagaacagagacatacgctcaggaaaagcgcacggatcaatgacatggcaataaatttaaattcccgcctaaacccctgaccttcccgggatttcatttcgtttgcaattgaatttcaatttcccttccgcccacgcgtccgtacggctgcgagaagacgacagagattatcatagtagatattcattccccttatctttctctcttctctctccccgcccaaaccctaactccctaccctattccgctttctctcatccatcatgaaaggaggaaagtccaagaccgaatctaagagagccgatgccaaacttgctgtgaataagaagggcgccgccaccaagactaggaaacccgccggaaaggggaaggcagcgaaagatcctaacaagccaaagaggcctccaagtgctttcttcgttttcatggaggaattcaggaaggtgttcaacaaggaacatcccgacaacaaagcagtgtctgctgtgggcaaagctgctggagcaaaatggaagacgatgtctgatgctgaaaaagcaccttatgtggcaaagtctgagaaaaggaaagtggagtacgagaagaacatgagagcttataacaagaaacaggcggaaggtcctactggtggggatgaagaagaatctgagaagtctgtatctgaggtgaatgatgaggatgatgacgaggaaggcagtggcgaggaggaggatgacgattagagaatggactgatgataatagcatttatgtaggttctgatgattttgatcatccgtgtaggtggtctggtcatttccttataaacatatttctctttccaaaaaatatttccctgctcctccttccgtaaattgctcgtctttccaaaacgtgaatagtttaaagaagggagttctctttatttgtatttctaaatccaactgtttagttaagggatggttatctcttgtagagcttttagtttgatttagagttttcttgttgaaatctggttaagtttgtatcaatataattgacttatcatcccctttctgctgtatatatgcgatttatgttttttagttcctgaaaaaaaaaaaaaaaaaaaaaaaaaaaaaagcggccgctctagaggatcca

SEQ ID NO: 27860 - DNA, 896 bp, Glycine max
  unsure (1)..(896): unsure at all n locations
  Clone ID: TF_GmC43_7
ggctcgagttgcaattgaatttcaatttccctaggggcttaatatctccccgcatttgtgcctagcctcattattatcatagtagatattcattccccttatctttctctcttctctctccccgcccaaaccctaactccctaccctattccgctttctctgtacgtatttcccctcaattttcttcgtctttccggaattctcttcgttttccggctattttcttcagttttctacgaattcctgacctaaaaactaacctgattgtgtgattgcagcatccatcatgaaaggaggaaagtccaagaccgaatctaagagagccgatgccaaacttgctgtgaataagaagggcgccgccaccaagactaggaaacccgccggaaaggggaaggcagcgaaagatcctaacaagccaaagaggcctccaagtgctttcttcgttttcatggaggaattcaggaaggtgttcaacaaggaacatcccgacaacaaagcagtgtctgctgtgggcaaagctgctggagcaaaatggaagacgatgtctgatgctgaaaaagcaccttatgtggcaaagtctgagaaaaggaaagtggagtacgagaagaacatgagagcttataacaagaaacaggcggaaggtcctactggtggggatgaagaagaatctgagaagtctgtatctgaggtgaatgatgaggatgatgacgaggaaggcagtggcgaggaggaggatgacgattagagaatggactgatgataatagcatttatgtaggttctgatgattttgatcatcccgtgtanngtggtctggtcatttccttataaacatatttctctttccaaaaaatatttccctgctcctcccttcgtaaattgctcgtctttccaaac

SEQ ID NO: 27861 - DNA, 2000 bp, Glycine max
  Clone ID: TF_GmC1089_1
ggctcgagcaacaacccccaacacggagccattaccggtttcgactgcgccctctttctctttttttccccctttctttctatctcttcttctcttcactcaccctccgtacaacacatcatgtgagcgtttcgctggtttctaccctctcgtagctgtccatgctcccaaattctgcaaattgcaaccctcttttattatcacagtccctagtccaagtactcatatgccttatttcttgtacttgtcccccaacacaaaacatcacacaagtgctgatggtggtgtggcccttcttattatttcatcttacaacaaccactcattaccaatccctcaactattttagggttcagaaacccttagggttttcttgttcctcatagtggattgagtagtacctcttggtttgtttgttggagcctctcgttcagctgggttaattagctgagtgagagagttttttgcttcccaatttcaaaaatttaatggaggaatacactaataacaatcacttgagtgaaaacacaggtcctagtccaagtactccaaggccaaatttcttgtactcttcagctagtggtggaaaccataatcatcagcatcagcatcatagccatcaccaccaccatcaccaccagtttccaatcaacacctttcatcttcaatcgggtggatcagatcattgctttcagtctgatcaagtttcaccacacccttctgtcaaatccgaagccagcacttctcagcttcacgctccgattttccactaccctttaatgagaggaaatcttcacaacactatgcatcatcatcatcctcagcaacaacaaggagggagcccaactagctccactggtgaagttgaagccataaaagctaaaatcattgctcaccctcagtactctaatcttttagaagcctacatgtttaatttgtagataggagctccacccgaagtggtggcgcgtatggctgcggctaagcaagagtttgaggcacggcaaagatcttcagttggttcaagggaaacttcaaaagaccctgaacttgaccaattcatggaagcatactatgacatgcttgtgaagtatagagaggaattaacaaggcctattcaagaggctatggatttcatgcgaaggatagaaactcagctaaatatgctttgcaatggacccgtgcggatcttctctgatgataaatgtgaaggtgccggttcatcagaagaggatcaagacaacagtggaggagaaacagaacttcccgagattgatccccgagcagaagaccgtgaactcaaaaaccacttgctgaagaagtacagtggttacttaagtagccttaagcaagaactctccaagaagaaaaagaaagggaaacttcccaaagatgctaggcaaaagctacttaactggtgggaattacattacaaatggccatatccttcggaatcagagaaggtggcattggctgaatcaactggtttggaccaaaagcaaataaataactggttcataaaccagaggaagaggcattggaaaccatctgaagacatgcaatttatggtgatggatggcctgcatccgcagagtgcaactctctatatggatggtcactacatggcagatggtcactaccgtctaggaccatgacaaaagacaaggccaccttataaattattattatatatatttttaattgtaatttaaatgcaaggtatgtgtttcttattaacaaagagattgtgcccaaactggataacagtcaacgctctagctactagtttcaatattatcaagcatataccgtgaacattaattggttgtgcttgtgcagtgtgagtacttgagtagtttgccacagtgatgttgtacgttttattaaacaatgacggttgcttattatattttcataattagtagtattggtagagataatatttattcataagatgtgttacgtacatttggattttaatttctaagatgtgctaacct

SEQ ID NO: 27862 - DNA, 417 bp, Glycine max
  Clone ID: TF_LIB3242-137-Q1-J1-H8
catcatttgaaaaccttggtttttttgcttcaggcttccaactgctgtatccactgcctgagccaccatcttctatgctgttttctttgccatccttgtcttcccttccaccatcttgagatgtcaccaccaaatcacttagcttctgcaactgtttcaaaaaaaaaaaaaataacacagttaagggtcacaagctttaatttgttgagcatcattagcaacacaaataagtagtattgttaaaagaaccaaaaactaattacctctaattgcaaagagtccttctctttctttagggactcaaaccttgatgctaaattgtcatattcatctttgagttttctgtactcttgctctatgcgctttgatttccaccttgcccttctgttttggaaccatatggcaacttggcgaggc

SEQ ID NO: 27863 - DNA, 2081 bp, Glycine max
  Clone ID: TF_GmC1144_1
cgcgggccttagcgagaagacgacagaaggggatggtcagtagtaggtaacttgttttctcttcctcgatttgatcgatcgttccttctctctcttgtgtttatgccaggaatgacagcgtatcagtggcagtgcaggaaacgagagggagagttttcattgggaaggtaaaagcctttgtttgtagcagtgccttacatgaaccctcgccccccttctcttgttcgctaccactaactcatcgttttctcagtgtgccccgcgtgcgttctgctgtgtcctctcactcacaggtgtaaccgtgtaaccactagaatcatacttagtggcatggaaagaaagaaagaaagattaacctaaaaaccctgtgcaggctttcccagaaaagccaagtgagaaaaccaaaccctctattaccacttactacttacttcatgtaactgactatagccaccactatcactatttaggattttctgtaaaaagcctgatactcttttaccataaaacccgggagagccctcataataaaattgagagagagaataagagaattgtgtgtcgtgtttgtttttgtttggtttgttgtaaggttagctagtgagtattctacacaagggtggtggtagggcaaaaaggataagacagtgaatgtgtgtgtgtgtgtgtgtgtgtgtgtgttgttgacaagcaaaagctatggagggtggtagtagtagctctaatggcacttcttatctgttggcttttggagaaaacaacagtggtgggctatgcccaatgacgatgatgcctttggtgacttcccatcacgctggtcatcatccaataaatcctagtaataataataatgtaaacacaaactgtctcttcattcccaactgcagtaacagtactggaactccttctatcatgctccacattaatcacaacaacaacaaaactgaagatgatgataacaacaacaacagtggtgtagggtactatttcttggaacttgtccaccaccaacatcacgagggaaacaacaccaacagaggacgctcatcctctgcttcctcttctgctgccaaggccaagatcatgtctcaacctcactatcaccgtctcttggcagcttacgtcaattgtcagaaggttggggccccgcctgaagtggtggcaaggttagaagaagcatgtgcttctgcagcgacaatggctggtggtgatgcagcagctggatcaagctgcataggtgaagatccagctttggatcagttcatggaggcttactgtgagatgctcacaaagtatgagcaagaactctccaaacccttaaaggaagccatgctcttccttcaaaggatcgagtgccagttcaaaaatcttacaatttcttcctccgactttgctagcaatgagggtggtgataggaatggatcgtctgaagaggatgttgatctacacaacatgatagatccccaggcagaggacagggatttaaagggtcagcttttgcgcaagtatagcggatacttgggcagtctgaagcaagaattcatgaagaagaggaagaaaggaaagctacctaaagaagcaaggcaacaattacttgaatggtggaacagacattacaaatggccttacccatccgaatcccagaagctggctcttgcagagtcgacaggtctggatcagaagcaaatcaacaactggtttattaatcaaaggaaacggcactggaagccttcagaggacatgcagtttgtggtgatggatccaagccatccacactattacatggataatgttctaggcaatccatttcccatggatctttcccatcccatgctctagaaaattatccctcgtttgtgggctgctgataatagattcataaactcgtgctgtcacttattaaaaccttacaattattaatattaattaatatgcattctaagaaatcctagattgctatactataatatagtacgcaggtgtatcccttgctagctttttagacggtcctttgtgtggatcatctagttgaaggagttatgaataaataaaattccataaatttaaagtttttaaaaacc

SEQ ID NO: 27864 - DNA, 730 bp, Glycine max
  unsure (1)..(730): unsure at all n locations
  Clone ID: TF_LIB4390-053-R1-K1-H4
gtttaagtagaataattatttgtcaatcatatcacaacatgtttatccttttacttactatataatccttttagtatccaattaatgttatcataaattgaatcgattcatatgatgatcagctagcaatgagggtggtgataggaatggatcgtctgaagaggatgttgatctacacaacatgatagatccccaggcagaggacagggatttaaagggtcagcttttgcgcaagtatagcggatacttgggcagtctgaagcaagaattcataaagaagaggaagaaaggaaagctacctaaagaagcaaggcaacaattacttgaatggtggaacagacattacaaatggccttacccatccgaatcccagaagctggctcttgcagagtcgacaggtctggatcagaagcaaatcaacaactggtttattaatcaaaggaaacggcactggaagccttcagaggacatgcagtttgtggtgatggatccaagccatccacactattacatggataatgttctaggcaatccatttcccatggatctttcccatcccatgctctagaaaattatccctcgtttgtgggctgctgataatagattcatanactcgtgctgtcacttattanaaccttaccantatttatattaattaatatgcattctaagaaatcctagattgctatactantatatagtacgcaaggtgtatcccttgctagctttt

SEQ ID NO: 27865 - DNA, 1351 bp, Glycine max
  Clone ID: TF_GmC1144_2
ctcgagccgaatcggctcgagtggagaaaacagtggtgggctatgcccaatgacgatgatgcctttggtaacttcccatcatgcaacaaatcctagtaatcctagtaataatactaataataatgaaaacacaaactgtctcttcattcccaactgcagtaacagttctggaactccttctatcatgctccacaacaacaacactgatgatgataacaacaaaaccagcactaacactgggttagggtactatttcatggagagtgaccaccatcaccgcaacaacaacaacaatggaagctcctcctcctcttcctcttctgctgtcaaggccaagatcatggctcatcctcactatcaccgtctcttggcagcttacgtcaattgtcagaaggttggagccccaccggaagtggtggcaaggttagaagaagcatgtgcttctgcagtgacaatggctggtgatgcagcagcagcagctggatcaagctgcataggtgaagatccagctttggatcagttcatggaggcttactgtgagatgctcaccaagtatgagcaagaactctccaaacccttaaaggaagccatgctcttccttcaaaggattgagtgccagttcaaaaatcttacaatttcttccaccgactttgcttgcaacgagggtgctgagaggaatggatcatctgaagaggatgttgatctacacaacatgatagatccccaggcagaggacagggaattaaagggtcagcttttgcgcaagtacagcggatacctgggcagtctgaagcaagaattcatgaagaagaggaagaaaggaaagctacctaaagaagcaaggcaacaattacttgaatggtggagcagacattacaaatggccttacccatccgagtcacagaagctggcccttgcagagtcgacaggtctggatcagaagcaaatcaacaactggtttattaatcaaaggaaacggcactggaagccttcagaggacatgcagtttgtggtgatggatccaagccatccacactattacatggataatgttctgggcaatccatttcccatggatctctcccatccaatgctctagaaaagtatccatcctttgtgggctgataatagattcataagctcgtgctgtcacttattaaaaccttaagcaattattaattaatatgctttctagtgctcatataagcattctaagaaatcctagattgctatatactatatttatagtacgcaggtgtatcctgctagcttaaagagacggtcctttgtgtggatcatctagttcaaggagttatgaataaataaaattccataaatttaaagctaaaaa

SEQ ID NO: 27866 - DNA, 898 bp, Glycine max
  Clone ID: TF_GmC1144_3
aattcggctcgagctcttggcagcctacgtcaattgtcaaaaggttggggctccgcctgaagtggtgggaaggttagaagaagcatgtgcatctgctgcagtgataatggcaggtggaacagccagcataggcgaggatccagcgctggatcagttcatggaggcttactgtgagatgctgatcaagtacgagcaagagctctccaaacccttcaaggaagccatgctctttcttcagaggatcgagtgccagttcaaatctctcactatttcttcttctttggacactactgcgtgtaatgaagctattgataggaatgggccatctgaagatgttgatgttcagaccaacataatagatccgcaggcagaggaccaagaactgaaaggtcaactcttacgcaagtaccgtggatacctaggcagtttgaaacaggaattcaccaagaagagaaaaaagggcaagctgcccaaagaagcaaggcaacaattacttgaatggtggagcagacactacaaatggccttacccatctgaatctcagaagctggctcttgcagagtcaacaggcctggatcagaagcaaattaacaactggtttatcaatcaaaggaagaggcactggaagccttcagaggacatgcaatttgtggtggtggatccaagccatccacactactacatggaaaatgttctgggcaatccctttcccatggatctctcccacccaatgctctaaaaaataacgttttggtgcttgtgtgctcttaaagtatatgtattgtgtctaaatgcaaggcattcatataataataagtatgttactctgattagtaacgatatttacacagtaaaagatgtctcaaatgctaattattgatatttacacattaaaaga

SEQ ID NO: 27867 - DNA, 761 bp, Glycine max
  Clone ID: TF_GmC1293_2
gttgataaacatatcctagcccgccaaaccggtctctccagaagtcaggtttcgaattggttcattaacgcgagggtgaggctatggaagccaatggtggaggaaatgtatttggaagaagagaaggagcatcaaaacgacgtagcatcgtcggagggaggaggcatcaatattctcggggatcagaagccaacacaggctcgactcgttcgaattgactcagagtgcatgtcgtctatcgtcaacaacccagatgacaaaaacgacacaaagagcggcaaaaccatccaaaacgacaaccaaatggacgcattcgggtcggtggagcttgacttttggtcctacacgcaccagtactcctccggacacagtggcggcgtgtcgttgacgctggggttacagcagcacggtgaaagcggggtgagtttagcattcccgccagcggcaacacagagctccatgttttacccacgggatcagattgaagattgccaaacagttcagtactctcttgtggatggcaaaggacaaaacatgccttataggaatctcatggggacacacttgcttcatgatcatttggtatgataatatatatagaatcaaataaaaatagtctcaattcaatatcatggaggacgtggatttaggtgtcacgtaagtaagtacatacattatggtagtcaacttaattaaagtagaaagttttgttttgtttttaattaatcagcacatatatatagtacatagttatataaaaa

SEQ ID NO: 27868 - DNA, 791 bp, Glycine max
  Clone ID: TF_GmC262110_1
ctccccctaaaatgaatttacaatgactttacagtcttgttggcttaataattatgagaccacttaatcacaaacttagtagcaccatcgaaggccaatatttcaatcactttcctttttcctaatttccgatgattgattacagcaacaacagaaatatggttagtataatataatatcaccgaatcaaatgatgtccaagcaaggggagtagattgaaaacattttcagcatgcaaaatcatgcaacaattgccctcctccaataacatcttttccaaaatgtcgattttgggattcaaaactactaagaacatagccctcaggctgaagggcaacgccaaaacgttgagctgcactcattccaaagggctcaaacaacccaataccgtgatgattttggtgaagaccaagtgtgagagacaccccattattgctcactccaacacccatgacttgctgattgcctgtgttggtctgattcagctgctcctgactcctcacttgcttgttagcaagttcatttctagggtgtttataaggggcatcatgaaacttctccatggaggtggatggattctcaaaaacaacagagttgtgatctgaaggtaaatgatcacttaggtttttcttacttctttcttcccaatgtgacctcttttgaccttgttgtgattctagcatatgtatttcctccaccattggtttccaaagccttactcttgcattaataaaccaattagacacctggttgcgagatagaccggtttgtttagccaacattaactcgtc

SEQ ID NO: 27869 - DNA, 1085 bp, Glycine max
  Clone ID: TF_GmC1478_1
cgctttctctttctctcctcatcctcttattctaccatggccttcccacctcctcacggtttcacgtttaacactactcatgaagaagatcaccaccacctccctccaacctctctcaaccccttcccctctttgccaccccaacactttcaagggggtgcatctttcatgttgaagcggtccatgtcgttttccggcattgagaacaagtgcgatgaagtactacatggagacgatgagttatccgatgatgggatcttcccttgtgggggtttcacgtttaacacgactcatgaagaagagcacggccactaccctccaaccgatctgggcgccttgcttgctttgccaccccaactccttcaagggggtgctttggggttgcagccaagacaagttgccatatggtttcagaatagaaggggccagatggaaaaccaagcatttggagaaggaatatgaagtcctcaagaaacagtttgaagcagtcaaggccgataatgatgttcttaaggttgagaaccagaaactacaggcagagttacaagctgtaaaaagtagggattggtgtgaagctggaatgatgagccataagaaagaaactgagggttcatggagcaatggaagtgataacagtttagagattaatctagatcactcaagaacactaggtttgaatagtcccatatcttctcagaaaggctgaaacctatgactacccaattcgttaaaccccaccagcataacacaactccttcaagatgatggcttgtgcaacatgtttcacaacattgatgcacaacagaacttttggccctggcctgatcagcagcaccagcgtttccattgaccctatataaatgattttgggtattaatgatatgatatgagcagaaattatacaatacaatcttttttcttcagttttttttttctttcaatttatttaggtgcagtagattgctgtataaagtttgaacaaattaaatctatttgagtcatgaggagtcggtggactttgagcagtgcaatttctttccttgtattgcagaatatataaaataatatttacgttaggctgaagt

SEQ ID NO: 27870 - DNA, 1645 bp, Glycine max
  Clone ID: TF_GmC309_2
ggctcgagcaacaatgtcttgaactcacaatacctcaaggcagcacaggagttgcttgatgaaatagtaaatgtccgaaaggctttgaagcaaactggtttggaaaagcaacagagtttccgtgatattggtttagatggctccaaagattcagatggaaaatctaccagccaatccgtgcagatatcttcaggccccaatggttctgctgcaaactcttcatgtgagctatcacctgcagaacggcagaatttgttggacaagaagacaaagcttttgtcaatgctggatgaggtggataaaagatacagacagtactgccaccaaatgcagattgtggtgtcatcttttgatatggttgctggatgtggagcagctgaaccatacactgcacttgccttgcgcacaatatcgcgccactttcggtgtttgcgcgatgccattagcggccaaattcaagtgactcaaaggaacctcggagaacaagagggaatacctcgtctccgctatgttgatcagcagcttcggcaacaaaaggcccttcagcaacttggtgtaatgagacaagcttggaggcctcagaggggacttcctgaaacctctgtttcagtactccgtgcatggctctttgagcatttccttcatccttatcctaaggattcagagaaaattatgctagcaaggcaaactggcttaacaagaaaccaggtggcaaactggttcattaatgcaagggtgcgtctatggaagccaatggttgaggaaatgtacaaagaagaatttggtgattctgagatgagcagcaatctattatcatcagagaaaacactcaaagctccaagagatgatgttcaagcttctgacaataaaagggaagagtcccaggacaacttaataaacgttgatgatagtgttcagcatcatgggttgaagttagatcatgcctcggaattggacagagggatccaaagcagtgatcatggagaaaatgccatggatcctagaattggaaaattgcaaggtgaccaaaggttcaacatgaacaacagcaataacaatagtccttattatggtgatggctgcataatggcttctactcctgccacatatgatttaccagagttaggtaacattgccgtcgatggccacgtgtcgcttgcattggaattgaggaactgtgaaagtcaaggatttggtgtgtcaaatgatgacatgcataaacgacataagaaaacattggcttcttccccagagactgatttgctagattaccatttcacagacccaggaaagcaacaaaacaagtttggcaatcctcacctattgcacgagtttgttgtgtgaagaagggttggagaaaattctaaagttttcaagggaactaaggaaatgtgtaccaccaaagtagtagatagatagacaaaagcctatgttgttgttgttaacttggttgctcattcttgttgtccacagatcataaaaagcgatgtaaatcatgaaccgtacaaaaaatatacacgtaggtatgtgtagatatattctcttgtaatatcgtggatggatgattggttgtatcatgtgcaggcaatttttgtaaggacaaggaacttatcttgtgcatcatgatgtataagggaatcttgtc

SEQ ID NO: 27871 - DNA, 752 bp, Glycine max
  unsure (1)..(752): unsure at all n locations
  Clone ID: TF_GmC320602_1
tttttaaaaaaaaaagactgaaaaagcctttcatttcacaatttcaccaccaagaagtttggtgcattctaaccgatcgacaaaaaggatcattcatgataattctttcaacccaaagtaagaaaacaaaacagattgaatgaaagataaaagaaaagcctaaattatatacaaacgatatataaataggggaaactgaatcctttgtctttatcctctatgatatatcataatatcatgttatatatatgatatgtaattaaaaaacccgccaaaaaaaatgtcttctgatgccaaatcatgaagaggctatttgatgggcttgggcttggacctggccattagggaagggcaatattctgggcttgcttagagacaattccactgggatttgagaagaagcattgttgttaactatagaagtttggttggttgtggtggaatttgtggctaccctttcacaagaggggcacatggtgagagtggtggctggaagctgcatgtaaaaaggttgagaagattttagggctctgagttcttgaagttccttttgcaacctcctattctcttctgttagggtctcacagcatctcttcaaatactcacaatccacttctgtttgcttcaactttgtcctggcccttctgttctgaaaccaaacctccacttgacgannncngagattcaactgtttagcnnnagcaagtttttgcnnnnnattgagagtggtgtgttctttgaaactttcttcg

SEQ ID NO: 27872 - DNA, 1003 bp, Glycine max
  Clone ID: TF_LIB3094-027-Q1-K1-C10-F3A
attaatttgtttattgttttgtgcgtgaatatgttgttgtgttgtttgcagaagcaaaagttggtactggcgaaacagttgggtcttttagcgagacaagtggaggtgtggtttcataacataagggcaaggtgggtttattttttcaacatttttgttgtgtgatctttaatagttttactgtaattaatttttatgactaatttttttttttcttttgtttttctgttttttttttttattgtttttttttaatttttctttttgaaatctttttgtttttttttgtatttttttatttctgatcgtttgtttttttttttttcgtttttttttcgcatttttctttttttttttttttgtttttcgtttttttacatttttttgtttatttgtttaatttgtttatttttttggggggttgtgttttttattttttttcctttggtttttttttttttgttttagtttgtttctgttgtgtttcatgttttgttttgttagacttttttgtttttttttattgtttttttttttttattttattttttagtttatagtatgtttagtttagttgattaatgaggagtttttttttgtattttttatgtataggtgtttttattttttttctgggacagttttgttacgttttgatgttttttttggtttttaggattttttttttcgtgctttatttaaagttttgtttttgttttttttttttttttatttgtttttgtgtatattttttgtgtgtttttgttttttttagctgtatttttttttgttctttcttttttcgtttttttacttttgtcttttttttttggttgttttgtatgtgtttattttttcttttcgttttttttttagcgggttttttttttttcggtttctttttcttgtcttgtgtattttttttgttttttttctatattctctttttcttgttattttgcgtctttgtctttttctcccttttttcttttttttttttttt

SEQ ID NO: 27873 - DNA, 1774 bp, Glycine max
  Clone ID: TF_GmC1350_1
gagctaagagggtggtgagtttcacattcacatagatacatacatcttattttttcattgggaaggaaaactctgagttaagttgcagagacacacgttaaccctgtgtgaagcctctgtgtctccacctgcattattcaacacacagtaacagcactggtagtagtagtagtagtgtttgtttgagagagagagagagagagacaacaagcaacactgttgatgcacagaaggaagaagatagactacacaatcccaagggaggactgatctgaatctgaatctgattcccaccatttactttttacaggctatagagccaagagcccaaaaatccctattgttctgactgactatccatttaagttctttggagttttctacaaataaagaactgagccttatttccgggagtactctctggacaattatatgcagtgtgctctttttgagaaaacagtaaggtggggactagcaactaggaacaactgatccaagccaaagagggtttggagggaacagttgcagtgagctttctgagatggacatgatgaacatggaaactaataataggaagtttctttctctgcctctcagtaacaacaacaacaactctggtaatgcccaaatgcgcagtagtagcgataatagaagggtacctgtcactagcaatagcaatatcgctcaggaacatcactacagccaccacaaccccaccgacacttgcagtgtgagggataaaatcatggcacaccctttttttcctcgtctcttgtcctcttaccttaattgcctcaaggttggagcacctcctgaagtggtggctagcttagaggagtcatgtgccaaatgtgagtccttcaatgcatcatcaggaaggacaggtggttcaataggtgaagatccagctctggaccagttcatggaggcctactgtgagatgctcattaagtatgagcaagagctcactaaacccttcaaagaagccatgcttttcttctcaagaattgagtgtcaactcaaagccctagcagtttcatcagattttggtcaaagtgaaacatcttcgcagaatgaggttgatgttcatgaaaacaacctagattctcaagctgaagatcgtgaactcaaagtccagcttttgcgcaagtatagtggatatctagggagcctcaagaaggaatttttgaagaagaaaaagaatggaaagttgccaaaggaagctcggcaacagctacttgattggtggaacaggcattataaatggccatacccttcggaatctcaaaagcaggcacttgcagaatccacaggcctagatctgaaacaaatcaacaactggttcatcaatcagagaaaacgtcattggaagccttctgaggatatgcaatttgccgtgatggatgcaactaactactacatggaaaatgttatgtgcaagccatttccaatggatggcatgcctatgcttctttaactcaatcctctactagaatattcaaaagcttagccgagaaaaccctatctattttaagttgcctaggtcgccaggttgctatatataatgtgtcattgatgaatgttttactttaaattgtagaaagcaggatgaaaattctctgttatccctgaactgcaatctatgtaagtgagcgtgaatctaactatatgctctattatctacactgtttgtggagatcactagagatgttgtgtatgtgttgtttcctaatttaatgaaaataatttgttttccatatggaaaaaaacacac

SEQ ID NO: 27874 - DNA, 743 bp, Glycine max
  Clone ID: TF_GmC419_152
aattcggctcgagggattatcttataggataataccaaattagaatgaaaattatcctgtgagaagtgaaattgtgattgtgaattgaatgaaggatgctcgaatttgagttattgatatggcttttgagtcgcactatgttttgttgctctgttccttcaaagaacaattgcagcagcatgtccgggtccatgcaatggaagcagtaatggcttgttgggatatagagcaatcattgcagagtctaacaggagtttcacctggagaaggtacaggggcaacaatgtctgatgatgaagatgaccaagtagatagtgatgccaatctctttgatagtagtttcgatggggcagatggcatggggtttggccctcttgttcctacagagagcgagaggtccctcatggagcgagtaagacaagaattaaagcatgaactgaaacagggttataaggagaaaattgtagatataagagaggaaatcttgcgcaagagaagagctgggaaacttcctggtgacacaacttctgttcttaaagcttggtggcaatcacattccaagtcgccttaccctaccgaggaggataaggcaaggttggtgcaggaaactggattgcaattaaagcagattaataattggtttatcaatcaaaggaagaggaattggcacagcaatccttcaacttcaactgtcttgaagagcaaacgcaaaaggtattcccatcaaaactagtaatttgtaa

SEQ ID NO: 27875 - DNA, 1467 bp, Glycine max
  unsure (1)..(1467): unsure at all n locations
  Clone ID: TF_GmC1549_1
nttccttttcctccttctcttaactatgcttgatgaggtttacaggaggtacaggcaatactatcagcagatgcaagcggtagtaacttcatttgagtatgtttctggcctgagcaatgcagctccctatgcaagtttggctataaaagctatgtccaaacattttagatgcttgaagaatgcaattactgatcagattcagtttgccaataaagctcattttcatatcagcaacaggaaagatgaatctccaaggtttggcaacagtgatagaggcccatatggccaaaggcctgggtttcttgagcaccaacctgtttggcggcctcaaagaggactccccgagcgcgctgtgactgtcctcagagcatggttgtttgagcactttctgcacccttatcccactgatactgacaagctaatgttggctaaacaaactggtctatctcgtagccaggtgtctaattggttcattaatgccagagtaaggctctggaagccaatggtggaagaaatacatatgctagaaacacggcaagctccaaagaatctgcagaaggaagaacattgcacgaacaagccaagtgatcatttgccttctgataactccattgtttctgagaatccatctacttccacagataaatttcaggaagctccttacaagcgtgccataaacgagcttcctaacataccagtcaggactcaggaacagctgaatcttccctgcacaagcaatcagccagggggtgttggagtgagcatgggtggcagtgcaagcaatagtgtgtcactcacactaggcctctatcaaaaccatggtattggtttggctgaacctttccccttgaatgcagcgcagcgatttggtgttgctcttgaaaccaacaatgaaggctacgttatgagtgattatgagtcacaaaataggcattttggaagagatgtcattggaggacaactgttgcatgactttgtaggctgaaggtcttcaatgtcaaataacaacaactttgcctggagttttaatttgattggggtgatataatactaaccatgtttctgttgtgcttccatgaattatctaaaagttagaagagggattggaatgttgcactttgtggtggtgatgctggcaatgatgaatgaaccttccagttatgggggattaactggtgtttttttattgagctcacttgtatggaggttgtaaaggggtgggattaatactgtgtcataatagatgtgtgatccaattcacccttgtgttgttgttgacctcaattgcttggagtaaatccaaatgttctggctatttaagctgtttgtaagttttttacattttataaaatattattgtcatccaaaccaggtaaatggatttcaatttgtaatacttgaaatcttgttcgacatgattgtactagtcatcatcatattagtaatatcttcgtgtctttatgctgc

SEQ ID NO: 27876 - DNA, 950 bp, Glycine max
  Clone ID: TF_GmC1814_1
aagaaaactctttcaggatttacctaagatcagtagtgggttgtctcaactaagcttgtttgatagagacagtagacagagtagaatgtctctccaacaacttggggtgatccgaagccaacgccaagtttggagacccatcagagggttgcctgaaacctctgtggctattcttcgttcttggctcttcgagcactttctccacccttatcctaatgattctgaaaagttaatgctggcatctcagacaggtttaactaaaaaccaagtctcaaattggttcataaatgcacgagtacggctatggaaaccaatgatagaagaaatgtacaaagaggagtttggagagttttctgaagactccaacccggctggtaacaactacttgacgagggaagataccacggattgtgtagaggattgaatcaaaagctccagtgaacaaaaaacttattgtttgacaaacatgggcctttaaatgcttgcctttttcctccaaaatcgagagataaacattatgtaacatgacaagatgatgagccaatatgttcgggtgaaattcaagatttgtttttttgaatgctgaaaattcaagatttggaaaatcatgacttatgatgttccttagattaagtgaccagcttgtaacacatcgtgaggcttgttatgtcaggtttgctattaataccaatttacaggattaaaagcaaacctgacataacaagccttagattaagtgaccagcttgtaacacatcgtgaggcttgttatgtcaggtttgctattaataccaatttacaggattaaaaaaaaactgtgggctgtgaatgagatcatgagaagatcgcattatcagaaattcacaatttgttttacaaccctatcctgtaacacttgcgtatgagcatgacatttgttatcttgtaataaatgagatagccaatttcatg

SEQ ID NO: 27877 - DNA, 2468 bp, Glycine max
  Clone ID: TF_GmC444_1
ctctctctctctttcctcccttccttccgtctcaacttcattttcctttcaaatagtaacggtagaggaatctcaccctctccttcctctcctctttctctcttcttccttctctttctctcatattaacctttaaattatcaaatcttaatataaaactaaaaaagtaaacccataaaataataaagcacacttaaaccacccttttgtacatgatctacatttttacttagctattagaagatgatgctgtgaaatctgttagcatagtctttaacctagccttcaacaaaataactttgtggcaacgatactcaatactttcttcatcctttaattattttcaaataaaaataaatgaattgaattgaatcaccactgtcaaaagtatactacaatctaaaagctaaaactagcgaataaggcccaagtactatatatgtacaagaacaaattaatcccaaataacttaaaaaaatatataaaaaaacactagaataatttttttggatctatggatcaagtattgagggatttcaatcttgggtatggtcaaattgaaacggggacttcttggatggatgagagactggtaacctcgtcatcgacgaagaaccttgctgagaaatccggaaaagccagggagattgagatcgaaatcgcgggtggcttcctgtgtgagtggaccccactccctcagaggcggttacgaacgctgttaccgccttcgtagtgacaacgtttgtgtcctcccaaggccttgtcctgtcgaaaacgtccatgtggcagatggagcactcgtgggtccctaccaccaccgttcgacgccgaactcgtcggtcacggcggaggaggtcgggtggttttcgtaaggcgagtcttccggtggactggccttgtgtcctccgagtgcttggtaagacgaagaaggctttgttgcaaaccgaacatttgtagctcagtttgggcggcgggatagcggcgcagaattgttgtcggcagacagcgggtttggcggtggagacactgccggcgccgccgcgagcgagcatgatgagacaaagagcgaggtactcttcctcggtgcatgaagggtgttgcagttgttgctccgtgcggctacgcttagaacgctttcctttcgtccacggtgtctctaagtaactgagactggtttcttcaaagggactaaacgatggagtggctgtggtgggtgattgaagagcttccaaagccatttgaagtgtaagcacttgtgaaatctgtaatagagtgtgaaagggaattagagaagtgcttgtgcttgtgcttgtgcttatgcttgttgcgctttgtgaatctgtaatagggtgtgataggaaataagagaagtgcttgttgtggttgcttttggtgaacttgagtttggcaacaggaggatatgggagtgagttagaaagttttatattgcaatgtactttttccatttacaaatgaaaatgcagcttgcaagagcacttggcttgcaaccaagacaaattgctatatggttccagaatagaagggccaggtggaagaccaagcagttggagaaagactatgatgttctcaaaagacaatatgaagctatcaaggcagataatgatgcacttcaatttcagaaccaaaaacttcagactgagatattggcactgaaaagcagagaaccaactgaatccatcaacctcaacaaagaaactgagggatccagcagcaatagaagtgagaacagctcagagattaagttggatatctcaagaacaccagctattgatagtcctctatccactcagcagaacaacaacaacagaacactctttccatcttctgctagaccaacaggagtggctcagcttttccaaaccactccaaggccagagattcagtgccaaaagattgatcacatggtcaaagaagagagcctaagcaacatgttttgtggcattgatgatcaatctggcctttggccttggttggagcagcaacatttcaattgatcatcatgcaaaaggagagagtgtgagagtgaggagagagtttcatattgcaatgtagtttttccttttccggatgaaaatgaaatcatcaagagggtatctgtgtcaattgattaccatacataatgagttataattaaattaaaaacccatgttttgataaacttgatgtataaaataggatatgtaagtaaatttttctggtggaacttgaaaatttttatataaaaagaataatagattagtcctttttctttttcaaaaagtgaagtaaaaaaaagtttcttaatgtagttttcccttttccggatgaaaatgaaatcatcagggtatctgtgtcaattgatccataatgttataattaaattaaaaacccatgttttgatattaaatatggtaatcaattgacacagacacctctagatgatttccatatttaatgagttataattt

SEQ ID NO: 27878 - DNA, 1145 bp, Glycine max
  Clone ID: TF_GmC969_1
aattcggcaccagacaaaggtggcttccagaaagctctgttgtaattcttcgcgcttggctttttgagcattttcttcatccctatccaaaggattctgataagatcatgctagcaaaacagacaggtttgaccagaagtcaggtgtcaaattggtttataaatgctcgagtgcgtctatggaaacctatgattgaagagatgtacaagcaagataattgtattgctggcatggactcaaattcttcatctgaaaatgtgtccaaggtaacaaaaagttatgtcaagacctccaatgatgtgggtgatgattcgcagcactgtcaaagtccaattgtggccgatacaaatcacagtggtggacaagctaaggacctcagacatgatcaggctcttgatacagaaatgatggcatccattggattagctagtcccataacctccatttatggggctgaaactgaacataggcgaaatttggatgattgtggtctcttctctaatgacacagttgttcagtctgatggagctactaataagaggtttgtgtcagttggtccaacatgccaaatgccagagtctgagaggttcaagtcaggaagtggagtgtctctaacattgggtttgcagcattgtgaaggaggtaattttttgcctggtaagacccatctcagtttggtttccatgagggaggacgacatctccaaagcgaccgcagcttcaacagttggagtagagacaacagaacttgagtgcattggtgctggaaaccaacaacaaaggttaaattcacctcatatgctacatgattttgaagtatgatgataatctcttgcaatcattccgtgggaaggaaaagagtggtgagtgctgatgttgggaccattttacagacagtgaatcatagaaggaactcagtggtccctcaaaggatgataggactgacaaaacagttgtatgatatcatgaaatttattgggaagatctatcttatggttaatgtgtagaaggaaacatgtatatttaggtctattttgctgtgaagaaatcaagaaacgtgagaatggtaaataataaatggattggctgattattgtattaatgcttggaattgaatatattaaacatgaaacttgcacactggac

SEQ ID NO: 27879 - DNA, 1822 bp, Glycine max
  Clone ID: TF_GmC2043_2
ctcgagccggttcgagctgtggaggaggggagaataataataataatgatggaggcaaacaaggagttgaactcagcacagcacagagacaagagcttcagatgaagaagtcaaaacttgtgaccatgctagatgaggtggagcaaagggaccgacagtatcaccaccaaatgcaagttgtgataacatcatttgagcaagcagcgggtgttggagctgcaaagtcttacacagcccttgcgttaaagacaatctcaaagcaatttcggtgtctcaaagatgcaatctcttcacaaatcaagacaactagcaagaccttaggtgaagataattgcctgggagttaaggtagagggttcgaggctaaggtatgttgatcatcaacagagacaacaacgtgcattacagcttggaatgatccaacacaacgcttggaggccccaaagaggcttgcctgaacgtgctgtctctgtccttcgtgcttggctttttgaacatttcttgcacccctatcctaaggactccgataaggttatgcttgcaaaacaaactgggcttactcggagccaggtatctaactggtttataaatgcccgagttcggctatggaagccaatggtagaagaaatgtacttggaagaggtaaaacaagagccaaacaatagctcccaggataacaacaacacaaaaggatcaaatgaatcaagcaaggagttatggtcagaagctaatgctgctgcacaagaatcaggtgcaatgagatttgatcagattaacattctccaatcaaaggcagaaagcttcaagaacaaccaaaccacttccccaacagagatctccaattccaactcactccaatctggtttccatcttgctgacatgcaaagtccaaacaagccaaaaagcacttctgagatgcatcagaattctccaggtagcattctttcagtggacatggaaatgaagcctcatcatcatggagaaacaaataatatcactagagaaggccagaacaacaacacaacaacaaagtttggcattgaaagccatggtgggggttttggagcatttcccaatatggaagacattggaaggtttcatcatcatgtcacagagcaacttgctcctaggttccatggaaatggtgtttctctcactcttggacttccacacagtactgagaataacctttccctctcaggaacaacccaacatggattcctctcacagaacatgcacttgggaatgagaaacagtgaaaatgatgagttttgtggtgcaatcaacactaccccaccttcttctcactcaggtatcagttatgagagcattgacattcaaaacagaaagaggtttgctgcgcagttgttgcgggatttcgtggcttaaaagaattgataattaactagctagctaggataattaatcaatgaagaacaccccacgaaagaattgaattattttcttctttttctgatgttgcaatatattatatatccacaaaacacaatgcagttcagagtgttacgacacactaacttagcagaagaatagcaacaggaggggaaaaaaaaagaaataaaagaaatggagaagtttatggtaacttgctccatgtataaagatggaaactggttcaagattatgaacttgcagggaattcagatttacatgttctgaattagtttaatttaaggattcaagttgagttggggaaggtatattgtatatggtattgaaaagtagctaggtacaatacaaggaattgaatggtttgtttggataggtaatgtattatatattggatttggagttatatgcct

SEQ ID NO: 27880 - DNA, 2474 bp, Glycine max
  Clone ID: TF_GmC309_1
atttgtcgtgggcacatacctcaaaaaactcaacctcaatttatggattcttgtctatcacttctgctctgaaacccactcttattgaattttagtcccttgttactgcttctatctcttactttcagaatagcaggggatttgttataaaagcgatgtgcagctgattccattgtgaagaagagagcagaaagaaataagcttataataatgtatcccaaccaagccttttctttagggtcctatgcggagatgatgtctgggacttctctttttcctcatgactacagtgaaactgtaggaggaggacaaaacgaggttaagtttatcacagcaatgggtgagacagtgactatgcactctattaatggccattccaatgctgcaagtggtgatccatcatgcaactctttctgggggaagattcccaggtcaaggacacaaaaatggcagatagtgagcaaacacatcggctgaattgtatctctcagtctcgggacactcaagccgtgtaatgcatgaatatgtcagggttagtagcaatatcacgacactggtctcttaccactaatgaatgaatatccaaatctaaagggaaccatgtctctgaaaaatgatgacgtcaacaacctacataaagaatttaaaagtgctgaatgcatggcatctgttgtcctccttgagggctttcatgacatggtaaaaaagggaatgtttttaacaacccccatggaccccctcaatgtgtcttaaagaagacccctctgatctaccacgttactcatacagtattttgaactcattatacctgaacacggcacaaaaaatgctagatgaaatatgtactgtccgaaaagcattgaagaattcggctaaaggaaaaacaagagaacactggattagatggctctaaagattctgatggaaaatctaccagtcaatctatgcaaatgtcttcaggccctaatggttccactgctaatgcttctagtgaactatcatccgcagagcggcagaacttgttggacaagaaaacaaagcttttgtccatgttggatgaggtagataaaagatacagacagtactgccatcagatgcagattgtggtgtcatcttttgacatggttgctggctgtggagcagcagaaccatataccacacttgccttaagaacaatttctcgccactttcggtgtttgcgtgatgccatcagtggccaaattcaggtgacccaaagaagccttggggagcaagaaggaataccccgtctccgctatgtggatcagcaacttagacaacaaaaggcacttcagcaacttggtgtaatgagacaagcttggaggcctcagaggggtcttcctgaaagctctgtttcaatactccgtgcttggctctttgaacattttcttcatccttaccccaaggattctgagaaaattatgctggctaggcaaacaggcttgaccagaaaccaggtggccaattggttcatcaatgcaagggtgcgtctctggaagccaatggttgaggaaatgtacaaagaggagtttggagactccgagatgaactgcaacctttcatctgagaacaacacggtcaaatgtaaaaaagatgatcttgttcaagagtctgataacattaacaacaataataaatgggaagagacacaggacaatttagtaactgttgacagtgtccaagtccaacctcaagcagaactggatagaggggtcaatgtagaaaatgtggtgatggattctggaactgggaaattgcagggtgatcaaaaccaacaaaggcttggcatgaacaacaacaacaacttttattctatctcaaccaaccagaatgatggaggcctaatgggttgttctactcatgccacatatgatttatcagagttgggtaactttactgtgggtagccacgtttcccttgcattggagttgaggaactgtgaaagtgatgggtttgccatgtctgatgatgccatacgcaaacgacgtaatcaagcattggcctcttccccggagactgatttgctagattatcatttcacggattcaggaaagcaacaacacaggtttggcaatccccatttgctgcatgagtttgtcgtatgaaatctagcaaaaaaatatttgatgattttaatggatctctggagaggtgtacctcaacaaagctgaaagagaaaaaagcctatgctgtgctgctgctgctgctgctgatttgctactttttttcttcctcattcttgttgcccattgttcgtaaaaaagtgatgtaaatcacgaaaccgtacaaaatatacaggtagatatgtgtagatatattcgcttgtaatattttacagatgattggttgtatgtatgtgcaggcaatttttgtaaggataaataaagaaaatttctcgtgcattatgttgaataataaggaatcttgtcaaaaacgtaaaaggagtactaccatct

SEQ ID NO: 27881 - DNA, 1892 bp, Glycine max
  Clone ID: TF_GmC2043_1
aattcggctcgagctcgagccggttcgagctgtggaggaggggagaataataataataatgatggaggcaaacaaggagttgaactcagcacagcacagagacaagagcttcagatgaagaagtcaaaacttgtgaccatgctagatgaggtggagcaaaggtaccgacagtatcaccaccaaatgcaagttgtgataacatcatttgagcaagcagcgggtgttggagctgcaaagtcttacacagcccttgcgttaaagacaatctcaaagcaatttcggtgtctcaaagatgcaatctcttcacaaataaagaccacgagcaaaaccttaggtgaagatgattgcttgggagttaaggtagaaggttcgaggcttaggtatgttgatcatcaactgagacaacaacgtgcattacaacagcttggaatgcggacgcgtgggcggacgcgtgggcaaagaggcttgcctgaacgtgctgtttctgttcttcgagcttggctttttgaacatttcttgcacccttatcctaaggactccgataaggttatgcttgcaaaacaaactggacttactcggagccaggtgtctaactggtttataaatgcccgagttcggctatggaagccaatggtagaagaaatgtacttggaagaggtaaaacaagaaccaaacaatagctctcaggataacaccacaaaaagatcaaaagaatcaagcaaggagttatggtcagaagctaatgctactgcacaggaatctggtgcaatgagacttgatcacatcaacattctccaatcaaaagcagaaagcttcaacaacaacaacaacaaccaaaccacttccccaacagagatctctaataattcccataattcactccaatcagctggtttccatcttgctgacatgcaaagcccaaacaagccaattagaagcacttctgaaatgcagaactctccaggtagcattctttcagtggacatggaaatgaagcctcgtcatcatggagagacaaataataatactattattactagagaaggcaacaacaacacaacaaagtttggcattgaaagccatggtggtggtggtggtggttttggagcatttcccaatatggaagacattggaaggttccatcatcatcatcatcatgtcactgatcagcaatcactggctcctaggtttcatggaaatggtgtttctctcactcttggacttccacacagcactgagaataataataacctttccctctcaggaactactcatcaacatggattcctctcacagaacatgcacttgggaatgagatcaacaaccaataatgcgaataatgagttttgtggtgccatcaacactactccaccttctaattctcactcaggcaccagttatgagagcattgacattattcaaaacagaaagagatttgctgcgcagttgttgcgggatttcgtggcctaaaagaattgataattaactagctagcaagggtaattaatcaatgaagataccccatgaaggaattgttttttattttattttttatgttgcaatatatccacaaaacacaatgcagttcagagtgttaacttagcagaaaaatagcaacaggagagaacaaaaaggaaaaagaaaagaaatggacaagaatgtgtgataacttgctccatgtataaagatggaaactggtttaagattatgaacttgcagaaattcagatttacatgttctgaagtagtttaattcgaggattcaagttgagttggggaaggtgtatttttatatatggtattggaaagtacagctagctaggtacatacaaagatttgaatgatttgtttggataggtaatatatatattggatttcaagttatgccttaaa

SEQ ID NO: 27882 - DNA, 2442 bp, Glycine max
  unsure (1)..(2442): unsure at all n locations
  Clone ID: TF_GmC3921_3
ggctcgagcagcagcagatccggcgggacaaggtaaggttcgaggcggcgccattggtagggatagaggaggaggaaccagtgtacgagaccgccggaatgttgtcggagatgttcaattttccgcccgcgacggaattgctggagcagcagcacgccacggcgacgttccgggcggcgaggcaagccggagagtggtacggaaacagacagcaacagcaacagatttcaggcattaatgctgactcagcagcagccatgcaactttttctgatgaaccctcaaacgaggtctccttctcctcctcaaacccacgctactccttcttcaacgcttcacatgctgcttccaaatccttcttcaaattcttccctccaaggatttactggttcggccgcgggagggtcttttggtcaattcacatgggttcctgagagtgctcatcaacaaggaggcgtggtggaagggcaaggtctttcgttatcgttgtcttcttcgctggaagcagcaaaagccgaggaactgaggatgggggatagtggttttctatattacaatcatcaacaaggtggaggtggaggaggtggttcttcttcttcttccgcggatcagtttcagtacaagaataataacaataaccatcaccaagcattgcatttgcaaggggcgatgggacacgacaacaaccaccagggacatgttgggtttgggtcatcctcggtaggtgtagttaatgttctaagaaattcaaagtatgcgatggctgcacaagagttgctggaagagttttgcagtgtagggaggggtcagtttaagaagagcaagttcaataggcagaattcaaaccctaattcaaatgccggtggtggtgcttcgccttcatcaaaagatgctcctcctcctcctcctttgtcagccgctgataggattgagcatcagagaaggaaggtcaaactactatctatgcttgacgaggtggacaggagatacaaccactactgcgagcaaatgcaaatggtagtgaactcatttgacctgatgatgggatttggggcggcagggccatacacagcactggcgcagaaagcaatgtctcggcatttccggtgtctgaaggaggcgataacagcgcagctgaagcaaagttgtgaagtacttggagacaaagatggggcgggaagctcaggaggtttgaccaagggtgagaccccaatgctgaagatgctggaacaaagcttgaggcagcaaagagcgtttcatcaaatggggatgatggaacaggaggcttggaggccccagagagggttgccagaacgatctgtcaacattttgagagcctggcttttcgagcatttccttcatccgtacccaagcgatgcagataagcatctgttggcacgacagactgggctatcgagaaatcaggtatcaaactggttcattaatgcgagggttcgtttgtggaaacccatggtggaagacatgtaccaacaagaactcaaagaggccgaaggggcagaagaagagagggaggggaaccaaagcagtagcaacaacagtggccaccaattggcacaaactccaacaccctcaaccacagcatcgacggcaacagcgccaccaccaccaacaacgacaccaccaaccggaaaaagatccgattctgaaagcgacccttcacttgcaccaataaataacaccaccagcactgctgccatgaccgtcaccgcctctgaggtgacgcaactgtcggagctgccccgaacaatggtggccgatgaatcttgtaggcatggtagccttgttgcaacggagtttgggaccgcttctgctgcttctgaaattggttccactctgatcaggtttgggaccaccgccggtgacgtgtcactcacgctagggcttcgccacgccgggaacatgccggagaaaactccgttctccgttagggactttggaggcatttaaaacttaatcaattccccctatattacttcacatgatcataaaagataagaatgatacgtataggaggttgctttattattactattattataattataataatatgattattatgatatgatatatcaaaagaaaccatttttccacccttgtaacttctctttgatgttagttcctcctctcagattaagttgcattttatggaaggaaaggaagaagggaatacgaaatgagaaaggtaggcttatatgtgattatcagctggcgataggtaggctctgtggtgatctgtgcaactgtatagtaggttgttttctacgtttttttatttatttatcacgtgtatgtacttaaggtttcatatcttaatttgataggactttatctaaataatagaataacatgtgctcactctcatcccgtatatgcacttgatgttttgtaacttataatttgacaagacttgttccntttt

SEQ ID NO: 27883 - DNA, 1559 bp, Glycine max
  Clone ID: TF_GmC3921_5
gattgagcatcagagaaggaaggtcaaactactatctatgcttgacgaggtggacaggagatacaaccactactgcgagcaaatgcaaatggtagtgaactcatttgacctgatgatgggatttggggcggcagtgccatacacagcactggcgcagaaagcaatgtctcggcatttccggtgtctgaaggaggcgataacagcgcagctgaagcaaagttgtgaagtacttggagacaaagatggggcgggaagctcaggaggtttgaccaagggtgagaccccaaggcttaagatgttagaacaaagcctaagacagcagagagccttccaccagatgggcatgatggaacaagaagcttggagaccccagagaggcttgcctgaacgttctgtcaacattttgagagcctggcttttcgagcattttctccacccgtatccaagcgatgcagataagcatctgttggcacgacagactggcctatcgcgaaatcaggtatcaaactggttcattaatgccagggttcggttgtggaaacccatggtggaagagatgtaccaacaagaacttaaagaagcagagagtgcagaagagagagaaaaggaccaaagcaacaacattagtggcaaccaagcacaaattccaacaacaccatcagcggccacaacatcaacagcaacagcaacagcgccaccaccaccaccatcaacaacgacaaaaacaacaaaaccgacaggcaaaagatccgataccatcaatgcccccgaaagcgacccttcacagcaccttgcaatgaataacagacaaggcttctcggaaaaccaagcaaagaagtccaccgcatccaccaccaccaccaccatcgcctctgaggtggcgccacccgtgtctcagtgcttcgacgactcagacctgcccgcacacagattaatggcctctgatgacacgtgtcatttggtcacagcagattttgggaccgcatctgcaagtgctgacattggatccacactcattaggtttgggaccacacccggtgacgtgtcactcaccctagggcttcgccacgccgggaacatgcccgagaaatctcctttctctgttagagactttggagccatttaaacttcaatatatattatatagtactacttcacataataataatcaaaataataataaatattatataggaagatgctttatcatattattatgtatatcatatcatcaaaagaaaacatttttcccccctttattgtttctcagttattcctcgatctgtcttatttgcattgtggaaggacaggagaataaaaaaggcaatacgatatgagaaaggtagtctgaaggtagctattaattaggcgcaacattaatatggtatctattgtataactgtatagcagattgtttttcatgattatttttcccgatatatgtactttattatttttaaggtttgtagtttagtttgataggacttgatctagtcaatgactgaaataataactgttccttttttttttaacttttaagataatgaaatgttatacct

SEQ ID NO: 27884 - DNA, 2610 bp, Glycine max
  Clone ID: TF_GM240G09rgnA1.C1.o3.ma
atgtttttgataattaacaggtgggaagtgggtgacaatgcaagatgcaaaaaccaccggcttttcatttgtggcaatagtgcatatggagctgaaagatgggttatgacacttgaaagaatgtgtgagagatcacctgacggaagaagaaacataatgcacctaactcactctatggttaaaatgttttgtgggaatttggacatgaaagatgacaaaaacttcccacatttaaccaggatgaataatggtgggactagaatattcaaggaatgcacacatccaaatgaagtgcgacgccgtcaaataggcgaggagctcgggcttgatcctgaacaagtaaaattttggtttcaaaacaagaagacgcatataaggactataaatgagcgattagatacagatgctcttcggcttgagaatgaaaggatacaatcggaaaacaacaaaatgagagagactttggagaatctttcatgcggatcttgtgggggtcgagccatggaaccagtaaagcatcaactttccttgcaagtcttaaggggggaaaatattctattaactaaagagtgcgagaggataacctcacttatggcaaacaatgggataaatattaatccagcactacttcctgtccttccttcttcttcatcacatgatgccttaggaggaagtttactaaatcaaccagttggaattcctgctcataatcaattcatttctaaccatgataaccattatattcctgccgcaattccaactccttttcaggataatcctattgttagccctcctagccataatcaagacattaaccctgctcctaccattgatcaacacattcctactcttgatgatcccactctcattggagataattctcctttgatttcaagttttgattataatattccagctttggttactgctcttgatcgaaatcttcccgcaatgattcatcctcacgatcaaaataatagcattccttccgctgagaaagaaattcatcaagtgtctaacaattcaaacaataacctttctgctctagagttggatgcagttcaaattctaaacaatgatatgttaccccaaccaatgaagagcctaagtaaagatatggatagtgtacaaatgttgaagattgcagaagatgcaatggaagaattgatgaaacttctcagtttgaacgagcccttctggtttagatctttactagatgggaaattcaatcttcggcatgattgctacaaaaggatatttggtaggagcaattgcttaagtggacctcatgtacgaatggaatcgtcgaaagattcacgagttgtgaaaatgagtggggcacaactcgttgaaatgttcttaaattcggacaaatgggttgatctattcccaacaattgttaaaaaagctcaaacaattcaagtacttgaaagtggttcatcaggaaaccgaaatggagctctacagttggtgaatgcagaaatgcacattctttcacatttggttccgagtcgggaatttctcttccttcgttattgtaaacaaattgaagtaggtatatgggccataggggatgtgtcaattgattcttcaacatacaaaactactgtttctcacgctcgaaggcttccatctggatgcctgattcaagaaaagtcgtctgagggattgtgcatggtttcatggatggagcacgtggaagtgaatgaaaagatgcaaacccacaatcttttcagagatactatttgtgggaataacgcatatggagcagacagatgggttatgacccttgaaagaatgtgcgaaaggtttgcaagctactcagctaaaactatacctagttgtgagactggaggaggttggttactctttattttctttgctcgatccaaagttattctaattttaatttatttaatttttgttagatcgcccgacgtaaaaagaaacataatgcacctaacgcatcgtatggtgaaaatgttttgtgggaatttggacatgcaagacaatccaaatttcccaaatttaacccggatgaacaacaatggggttaagttatccattcgcgtgaatcacacagggccaaatgagcctaaaggcacgatcattggtgctgctatctgctttcgggttccactctctccacaaattgttttcgataacttgatagacaacaacaaacgagccaaggttcaaagcctaaaattcatatacatggcacgagattcaacgaatctcaactggaagcaatcctggaaattgtatttcaatcatgcggatgctttgggatccatgttggtattcgctcctttttatatggaaggattggatttgatcatgaagggagaagactcatcactgtttccgattcttccctctggccttaccatatcttgggattaccaatcaaataaagttcctgaaggacaatctggacaagttggtcaatcaaggggttcgttggtgactctaatgtttcaacttttggcatccagtacatctaaaatagataatgtagacatgaaattaataggttctattaatacactcgtgacctcaactgtggagaaaattaaagatgctttgaattgctcaaattcgaagtaa

SEQ ID NO: 27885 - DNA, 1433 bp, Glycine max
  Clone ID: TF_GmC419_206
cggcgccggggagtccatggtggagcacgccgatttgaaggacggcggcggagacgccgtgagctggcagattgggcggtgtaagacggagattctgcagcacccgctgtacgagcagctgctgtcggcgcacgtggcgtgcctccggatcgccacgccggtggaccagctgccgaggatcgacgcgcagctggcgcagtcgcagaatgtggtcgcgaaatacgcagtgttcggacacaacaacatcgtcgccgatgacaaagaactcgaccagttcatgtcgcactatgttttgttgctctgttccttcaaagaacaattgcaacagcatgtccgggtccatgcaatggaagcagtaatggcttgttgggagttagagcaatcattgcagagtctaacaggagtttcacctggagaaggtacaggggcaacaatgtctgatgatgagaatgaccaagtagatagtgatgccaatctcttcgattgtagttttgatggggcagatagcatggggtttggtcctcttgttcctacagagagcgagaggtccctcatggagcgagtaagacaagaattaaagcatgaactgaaacagggttataaggagaaaattgttgacataagagaggaaattttgcgcaagagaagagcagggaaacttcctggtgacacaacttctgttcttaaagcttggtggcaatcacattccaagtggccttaccctaccgaagaggataaggcaaggttggtgcaagaaactgggttgcaattaaagcagattaataactggtttatcaatcaaaggaagaggaattggcacagcaatccttcaacttctactgccttgaagagcaagcgcaaaagaagcaatgcaggtgataactgatgatcgttgcatgaaattcaactctttgtcctttggtcaatcatggaaagacaatgagaaagaaccacattttgtttctgatgggccagggttaaagcagatcaaggagctaatattggtgaaccagtttacttatgcttaaaggccagcaaatagttcatatagtacttgtgatgctacataattaggaagttcaattaagaatcatataccaacagagaattatgatttttgttcatgttttattgctttgtgaaatatagtatatggtagcgaagggggttatgggtgtacagtaataagctgtgcattttttttcccttacaatcatactcttgtttttgttcttggtctttcaattggtatttggtaatgtagagagtaatttgttgtagaaatatggtataagtttttacttgttatataatttaaatgctcgttgtcatggtgctacaaatcgtaaacacttttaactgttgtctgttggaaggtataataatagtgtggtgggttcttgtgatttgacatgtagatggatgtgcagtgt

SEQ ID NO: 27886 - DNA, 2008 bp, Glycine max
  Clone ID: TF_GmC1293_1
gttggtaaacacatcccataccccaaaacctctctctcatgtgatgaaccttcgcattggctgtttaacgcagagggaccgcgatagattcaacctggcgagaaaattggttttgatagggttttccaacatccttgagcaaaaccatggaagcatcggggtcgtgtggacatgcttcttctgcaaaccccgtcaccatctggtccctttccctctcactctgatgaacgacccgggcacctctttctccaccacaggtatagatatcaagagtcattactaagatcctacatcatcgctgccatggaaggacagttgtgtgtatttttaattaattagtatatttggggcgaccccggggtccttgcacgtcccaaagggtgatcggtcctcgtagcaatgcttgtaaccagcatgctgttgcgtataatactaataagcaagacatttcatcaaggtaatgtgaatattaagagaactaaataaatggttgttattacatgcactcaagagtagattgtacgtacgtgttgaatttggaagcaggtttcgaattggtttattaacgcgagggtgaggctatggaagccgatggtggaggaaatgtatctggaagaagagaaggagcaagaaaacgacgtagcatcatcggatattaatgttcccgaagaggatgagaagccaacgcaggaggctccactccttcgaattgactcagagtgcatgtcgtctatcgtcaacgacgtcacaaagagcggcaaaaccatccaaaacgacaaccaaatggacgcattcgggtcggtggagcttgacttttcgtcctacacgcatgcgcaccattcttccggcgtgtcgttgacgctggggttacagcagcacggtgaaagcggggtaagtttagcgttcctgccagcggcaacacagagctcgatgttttacccacgggatcagattcaagagtgtcaaacagttcagtactctcttttggatgccgaaggacaaaacatgccgtttaggaatgtcatggggacacacttgcttcatgatttggtatgatatatcgcaaagtttattgagttcaatcatggaggacgtggatttaattaggtgtcacgtaagtagaaagtttagtttttaattttaatatatatagtgcatagttatatatatatattaatgcttccatatagaaatttaagctacacttgtagttaattacataatatatacacttcctagtttcaacatgctacccggcacaacaaggggcgaaacaccaaggcttagaatcgttgaccaatcgctgagacaacaaagggcctttcagcaaattagcatcatggaaacccatccttggagaccccaacgtggccttcccgaacgttccgtttctgttcttcgagcttggctttttgagcactttctccatccgtacccaagcgatgttgataaacatatcctagcccgccaagccggtctctccagacgtcaggtttcgaattggtttattaacgcgagggtgaggctatggaagccgatggtggaggaaatgtatctggaagaagagaaggagcaagaaaacgacgtagcatcatcggatattaatgttcccgaagaggatgagaagccaacgcaggaggctccactccttcgaattgactcagagtgcatgtcgtctatcgtcaacgacgtcacaaagagcggcaaaaccatccaaaacgacaaccaaatggacgcattcgggtcggtggagcttgacttttcgtcctacacgcatgcgcaccattcttccggcgtgtcgttgacgctggggttacagcagcacggtgaaagcggggtaagtttagcgttcctgccagcggcaacacagagctcgatgttttacccacgggatcagattcaagagtgtcaaacagttcagtactctcttttggatgccgaaggacaaaacatgccgtttaggaatgtcatggggacacacttgcttcatgatttggtatgatatatc

SEQ ID NO: 27887 - DNA, 1370 bp, Glycine max
  Clone ID: TF_GmC585_1
tccacgcgtccgcttcaccctctcacaataaaatcattgcaatagagaagtcccttaaataaatctgaatttccctgctttgcttcaccaccccccttgcttgcgtgggtagaaatgcaagaagcagggctgggaatgggaatgggaatgatgagcggagaagtatccgccgccggggaccaccaccgtcaagtgaaggcggagatagccaaccacccactctatgaacagcttctatctgcacacgtgtcatgcctccgcgtcgccacacctatcgatcagttgccgctcatcgacggacagttatcgcagtcccaccatctcctccgctcttatgcctcacaccattcccattccctctcgccccatgaccgacaagaacttgacaacttcatggcacaatatttgattgtgttatgtacgttcaaagagcagcttcagcaacatgtgagggtgcatgccgtggaggctgtgatggcctgccgtgatattgaaagtaccttgcaagctctgacaggagtcagtttgggagaaggaacaggtgcaacaatgtcagatgatgaagatgatttgcagatggatggctctttagatcagtctagcgctgacgggcatgacatgatgggatttggtccattgcttcctacagaatctgaaaggtccctgatggaaagagttcgtcaggagcttaagattgagctcaagcagggttttaagtcaagaattgaagatgttagggaggaaatattaaggaagcggagagctgggaaattaccaggtgacacaacatcggttttaaaggcctggtggcagcaacatgctaagtggccctacccaactgaagatgacaaggcaaaacttgtggaggagacagggttgcagctgaagcaaatcaataattggttcatcaatcaaaggaaacgcaactggcacagcaactctcaatcggttaactctctgaagtccaagcgcaagagagagtatgcccactaaggattccagtctggtgcagaagataacaggtgatgcactacaacataagatggcttacaatagtgatggttgtaaattcttggaatacataacggatacaaactattcttgttgtgcacggtcgcctccatttctttcaagtgtttttttatttgtaaatttgtttgctatgatttgactggctgaagaagtatttttagcagctgaaagcctgaaagtgtttcctatacttgatatgtttgcatgtactattatgtatattttgtgttgtactttatatcagttaaatttacaagtactaacatctccatcctttggaggagataactgtaatttgtaaggatgcaaaaaggaatttaaggacgaattggctaatg

SEQ ID NO: 27888 - DNA, 3033 bp, Glycine max
  Clone ID: TF_GmC1515_1
cggaattcccgggtcgccctccgcgtccggcagagagtactactcatgaaactctcccaagtgaagtcccaacccaatataaatccatctgaaagcaaaagggagagaagctttaatttacttgcatcccctgccccgcgatgatggacactttgtctatctagacagcacctttctaccttccttctcagcttcctcaagtttatagctccctctatccatttattaattcagcaaaatgtgtcactgagagagatacaatcatagaattgaagaagaacgcaacatggcgacgtactttaatggaagcacttcggaaattcaaccttctgcagatggcggcttgcaaacgctttaccttatgaacccaacttacgtaccctacgctgacgcgccgcaccacccaacaacgctcctcgtcaatcccaacgcacccaacctcgcgaatatcccacacgcgccgccagtgtcaccaaaccaacaacatcaccacgtgattcacggcgtcacaagcatcatcggatccggcaattccgatgaccactcccgaccgtcgttgatcggcgaaaacatcgccgccttccacggcttctccggcggggcaggcactgcctccaccaccgcccctcgccttcactataacctctggggtccggtggttgatcagccgggaacgccgtctagcagctccggtggaggcggtttccggcggccgagtcagcagggtttgtctctcagtctttcatcacagcaaacaaattttagatcagtttccggcgagcttgacgtggccggacagggccacgttgccggaattgggaactcgccgatgtcggcgtcgatcggagtttcaggtgttattatggggtcaaagtacttgaaagctgcacaggagcttctggatgaagttgtgaacgtgggaaaaggaatctacaaagaggagaaattctcagagagcgtgaaagcgaatagggaatcaactaattctggtgctgctggtgatggtggagatggttcaagtggtggaggagaaaacagtgcagggaaacaagtggttgaactcagcaccgctcagaggcaagagcttcagatgaagaagtccaagcttgtgaccatgctcgatgaggtagaacaaaggtacagacaatatcaccaccaaatgcaaattgtggtatcgtcatttgagcaagcagcaggttatggggcggcaaaatcttacactgcccttgccctaaaaactatctcaaagcaattcaggtgcctgaaagatgcaatctctgcacaaatcaaagccacgagcaagacattgggtgaagatgattgcttaggagttaaagtagaagggtcaaggcttaggtatgttgaccaccatctcaggcaacaaagggcacttcagcagctaggaatgattcaacccaatgcatggaggccccaaagaggcttgcctgaacgagctgtttccattcttcgggcttggctttttgagcatttccttcacccttatccaaaggactccgataaagttatgcttgctaaacaaactggacttgctaggagccaggtgtcaaactggtttatcaatgcccgagttcggctttggaagccaatggttgaagaaatgtacttggaagaaatcaaggagcatgaacaaggtaatggctcagaaaacaccaaatcaaaagaatcgagcaaggagttggcttcaacagcaaatgttgcactcgatcatctccaatcaaaacatgaaagcttcaacaaccaaaatacttccccaaccgagatctcaacaagctcttcaatgtctccaatgggagggtcccttcaatcccactctggtttccatcttgcaggatcatctgacatgcaaattaggagtccaaacaaaccaagaagttctgaaatgcaaaactccccaagtagtatcctttcagtggacatggaaatgaagcatagtggtgaccatggaaataatagagatgccaacacaaagtttggtattgaaaggcatcaccaacaaaaagatgggtaccctttgatgactagcaatccaaaccatggtggggggtttggagcattcaccatggaagacattggaagcagatttaatgtcactactgagcaactagcttcaaggttccatggaaacggtgtttctctcacacttggacttccccacaatgagaacctttctatgtcaggaactcaacaacatgggttcctctcacagaatatacacctgggaaggagacttgaaatgggaacaaatggaaatgagttttgtactatcaacactgctccaccttcttctcactcaggaaccacttatgagagcattgatattcaaaacagaaagaggtttgttgctcatcagttattaccagatttcgtggcctaggaagtaagaactgatggctagctagctagctaaaacaatattggataatttatgagagaaatcttagagttctgatgagtgtttctctagacttggctaattaacttcgctagcagcaccaagaaaagaaaaggagagggtttatgttattttcatttacatatatatacacatgcatgcagtcactaattatgaaatattgtaccgtgattctggtatactggaattcctggcatgggaggggatgctagctccctgtaaacattgaatagtagcatatagaactatacttgcagagatttaagttagcttaatattaattataggattcataaagttggggatggggtatatatattgtatatggtattggatgtagccaggtacgtagatggatttgaaagatttcttttgatttgatgttatatatatttgtgcaccagagttattatttgggtatagaagaagaagcattgctttgtaaaattaggtattcctgcgctgtgtttttggttccatatccgtttgtcttctgtgcatagctggttcaaggtggaattaattgtgggagacatgcataagagggaatatacgcataggcgtccaatttggacgccttctataaaatagagtttgag

SEQ ID NO: 27889 - DNA, 1197 bp, Glycine max
  Clone ID: TF_GmC1117_2
ggtgttgtgtgagacataagagcgtagaagatggtgagactgagataattgagcatcaatgagtggaagctgatcgatgggagtcgccacacggaggcatgccacgtgtgctgccagaagctgctcgtacagcggatgagtcgctatctccgctccttcagcttccactcatcgatgctcaattatctcagtctcaccatcttctacgctcttatgtctcacacaacactctttctctctcccctcatcaccgccaagaacttgacaacttcctggcacaatatttgatagttttgtgtacatttaaagaacagcttcagcaacatgtcagagtccacgccgtcgaggctgtcatggcctgccgtgatatcgaaaataccttacaagctctcactggagtgagtttgggagaaggaactggtgcaacaatgtcagatgacgaagatgatttacagatggatttttctttagatcaatctagcgctgaagggcatgacatgatgggatttggtcttcctacagaatctgaaaggtcattgatggaaagagttcgccaggaactaaagattgagctgaaacagggtttcaagtcaagaattgaagatgtcagggaagaaatattaaggaaacgtagagctgggaaattgccaggtgacacaacttctgtgttgaagaactggtggcagcaacatgcaaagtggccttacccaactgaagatgacaaggcaaaacttgtggaggagacagggttgcagctgaagcaaattaataattggttcatcaaccaaaggaaacgtaactggcacagcaactctcaatcggttacttctttaaagtccaaacgcaagaggtagacattatattattttgtccctaactatgtggaacagctagcaagcaacacaactatatataaggacatgcttattgctgataaagtgtagtcccactaaggattcagaagatagtagatgggttactgtaatattgtaagatagctgaaacaaattcgaggctggctgtaaatttgtggaacttaacgtatgcaaacttttcttttaggtgtggttaagttgcctctctttttaactgtctttgtaaattgttttgctacttttctgaccggcggaagaattattattactactacacagatgattgaaagattcgctgttctattaaatatgctctttggtc

SEQ ID NO: 27890 - DNA, 450 bp, Glycine max
  Clone ID: TF_LIB3242-236-Q1-J1-C12
tgcggagacagaaggccgcctaccggggaggccggaggccggctagtcgcggactcgggcgaacccaccctcgcgatctgtcaagtctgtccccaggggaggtccccctttcgggaggaagtttttaaggggatttctcaaaatcacccccgcgcttccttcactccttccttagagccggagcgcgcagggaccatgtcggcggagaccgcgagcggccccacagaggaccaggtggaaatcctggagtacaacttcaacaaggtcgacaagcacccggattccaccacgctgtgcctcatcgcggccgaggcaggcctttccgaggaggagacccagaaatggtttaagcagcgcctggcaaagtggcggcgctcagaaggcctgccctcagagtgcagatccgtcacagactaaggagatggcaggcattgacagcttcactccatg

SEQ ID NO: 27891 - DNA, 3311 bp, Glycine max
  Clone ID: TF_GmC2101_1
ggtgcttgaaagatgcaattgcagggcaggttcgcactgcgaataagagcttacgagaagaagattgctttggaggtaaaatggaaggttcgaggctcaaatatgttgaccatcatcttcggcaacagcgagctctccaacaattgggaatgatccagcacaatgcttggagaccccagagaggattgcctgaaagatccgtttctgttcttcgtgcttggctcttcgaacacttcctccacccttatcctaaggattcggacaagcacatgcttgcaaaacaaacagggttaacaagccactccgaaacaagtgaatagaaaagactggaccgtgaactaagagattattgcatggaatggtaacagttcagcggattcgtcgtgacaggacgctgctccacccgcacccgaaacatcagaatgaaacgaaacacggatggcattctcctgcaccctccttaaaatgagatacaacaactcatttccccactctttcctgtatacatctacttggtaattatttctcggtatttcttctttctccaaatatctttgtcgagcccctgagaacgtgtctgattctcctttctcgttccggcaacagggatcaaagtggttgtagagcgtcaacggatgtaacggagatagattcttctttcttacgttgcaaacattgacgcaatggtatcaacgaattaacttggtgtagggagattggaagctgaaatcgcttagtgatgaagccatggagcaaataatactcgcaagactagaagatgaaactcatactaaactgaaagagaacattggagcctcttataacttctgtcaacagtcaaaaggtgaggcaaccacgacatgttagacaccaaacacacgaaatgatggatacaagataagtacaaatgtccgaatttgaaaagcacatgaaaaaagctaacgacttaattcccgagtccccggccgcaaatccctcactacttatccatcttcaactgcggtcattccctgaacagaacttggatctttcaccagtaaaagctcgcaaggttgcacaggaggatcgtccaacctccaattggggatattcaaaggtttgagccagagccgtatacaccaagacctttggttcacgttgcagctcatccttcctggtctgttagcaacgccaggaacacatcaaacggttttcctaagtcaaaacagtcaactggtaagcacattagacacttggaccccagacgagtttaaagtcctaagcacttcgtcggatctgtcgatggctgcttacaacaatttgagtatgaaaaagcctgagatttttgctgatgaagtgttgcttgactgtgtaacagagattaaagattgaaaggagggcaacgtcgtaaaaacttactatgtcgggcaattaacaagtcccgcaagtggcctccgtagctttgaggtattgggaagtgggaaaagcaacaatgatttgtcaactacggaaagacaagaaattcagataaagaaagcaaagctaatcaacatgcttgatgaggtggagcaaaggtacaggcagtattcacaaccagatgaagatagtgatatcctcatttgagcaagctgctggaataggctcagcaagaacgtacactgcgcttgcattgcaaacaatttcgaagcaatttcggtgtttgaaggatgcaataacggggcaaatcagagctgcaaacaagagtttgggagaagaggattgttttggtgctaaaattgaaggatctaggctcaaatatgtggaccatcatctaaggtaacagagggcttttcagcacctgagaatgatccatcacaatgcttggagacccctgcgagtactggccaggatagcactttctgttctgcctgattggaagtttgaacactttcataatccttacaccaaggactcggacaagcacatgcttgctaaacaaacagggcttaccaggagccaggtttcaaattggttcattaatgctagagttcggctttggaagccaatggtggaggaaatgtacttggaggagatgaaagagcatgaactaaatggttctgaggagaaatcaagcaagagtggtgaagatcctgctacaaaaaccacaagtccacaagagaaacgtacttcctctgaaattgaatccaaaagtttcaattccaaacaagatgtttccaaacaaagccagaacactccaattcttccaacttctccaccatcaatatcacctatagggggaagtgttaagaaccaatcaggattcagtttcatggggtcatcagaacttgatggaatcacacaaggaagtcctaaaaaaccaaggaaccatgaaattcttcactctccaaaccgtgtcccttcaatcaacatggatgtgaaagccaatgaagcaaacaatgagcaacaactctcaatggatcacgagaggcagaataatagggatagctactccttcatggggaaccaaacaaacttcattagtggctttggacaataccctattgaggaaattggtaggtttgatgctgagcaattcacaccaaggttttcaggtaagaatggagtttccctcactcttggtcttcctcattgtgacacattgtcaggaacacaccaaagttttctcccaaaccaaaacattcaacttggaagagggttggacattggtgaaccaaaccagtttggtgccttgaacaattccaattctcacaattcagcagcatttgagagtatcaacatgcagaacccgaagaggtttgctgcacaattgctaccagactttgtggcctaaataagacattgaagaggggatagatcatagttggtgacattggttatatgggtctctcatattttcttctaatccatgtgcttgtttcttgggagtagtgataaaatcttagtgtaaagaaagaaggaattttactctagtataggtttataccttgcatagaaccattttagtttcttagatagcttagagatttgaaagtctatggttatttgaggttgtatattatttttgtaatttttgaaaatgggatagatgggttggtgtcataaaatttcaattggtaaagattacaatatatcttcgattgagagtatatgcaatgtaatattttgcaaggtagcttaggatttgaaagtatatgattgagattgtatattatttttgtaagttctgaaggtgggatagatggattgttgtcataaattttattttggtaaaagataccaatatatcttcgattgaaatctccatagaagaaagtggaaccaattacctttcc

SEQ ID NO: 27892 - DNA, 1891 bp, Glycine max
  Clone ID: TF_GmC637_1
cttcttccttcctccttctctctctcagcttctccccttcccaccctttctcccccactcatctcctgcaacaacaaacaaacaaacaccaccaacaacaaccactcctcttctttttcaccctcgaatccacgcttcctttacaccgcgtttggatctccgttaaacaaaaccattaaaatgtagcgagagaaaaacaaaacagaaaaagaaaatcagttaatttattaattttatttttttatggctttccacgaccatctccagcacgaaatagcgttccagcgtttcacggaggagcaagagttgaccgagaacagagacatgcagcagaggctcccacctccgacatggctcaacaacgttaacgcgcgtcaacagaatttcctcgacaccgagaagagcgtggatcggaacaaccgaagcgagagcaattgcgaatccgaggatttgagggaatacaaagcggacattctaggtcaccctctctacgatcaactgttgtcggcgcacgtctcgtgcctcagaatcgccacgccggtggaccagcttcctaggatcgatgcgcagcttcagcagtcgcagcgcgtggttgaaaagtactctgcacttgcacacaacggggtcgtcgatgagaaggagcttgatcagttcatgacccattatgttctgttgctctgtgcctttaaagaacaactgcagcagcatgtccgtgttcatgccatggaggcagtgatggcttgttgggatctggagcaatctctgcaaagcttgacaggtgtatctcctggtgaaggaacgggtgcaacaatgtcagacgatgaagatgaccaggcagagagcaatgccaacttatacgaaggaagccttgatggcggtgaaactcttggatttggtcctcttgtccccactgaaagtgaaagatctttgatggaaagagtcaggcatgagttgaagcatgaactaaaacagggttacaaggagaagattgtggacataagagaagaaattctacgaaagagacgagcggggaagcttccaggggacaccacatcccttttgaaagcttggtggcaatcacattctaaatggccttaccccactgaggaagacaaggctagattggtgcaggaaacagggttgcaattaaagcagataaataattggttcataaatcaaaggaaaaggaactggcatacaaataacccctcatcctctagcaactccaaaagcaagcgcaagagtagtgcaggagaagccagtaaccagagcttcatgtgaacggtcgcatattttgaacaaaaattattggtattgttctcccttttaatgcatgctcgtgggattcatagatcttacggtccagcgtgaacgtgatggattctggatgaaaaagggaaattcatgatatataaaaccactgtattggttgaattacagaaaattatccctggtattgttgtatatgaggctgctgcatgccgcttgatatctgatattgatgcagtcgcattctattcgatttaatgggtagcatgctgatattattctgcttatttaaaaatattatggatccaattagtataactcagtggataatgcatctaacttgttggatgctgatacgtacatataaatttttctacttatttttttaaaaaatccaattagtgtagttcaattttttttattaacaaatttaattgttagtttgttaatttttgttagtaggtaattgaatccaatcctttttttaaaccaccatatggtattactattacagttcacaggttttcgataaaaaagaaaaaaacaacatagaatccttgaatgcggtgcaaattaacgatcagttttatttgttacacacataagtgtcctacatctgata

SEQ ID NO: 27893 - DNA, 1594 bp, Glycine max
  Clone ID: TF_GmC637_4
cggaattttcgggatcccttacgcgtcgggtgaaatctaacaccgagcgtgtagatagtctatgaaatccaattaaatgttcttctgagaacaaagaacataagataacaaacagaaagcgcttataaatggctttccacgaccatctaccgcacgaaatcacgttccagccgtttaccgaggagcagcagttaggtcagagcagggacatgcagcggctgctcccgctctccggcggggcgccgacgtggctgaacaacagcaccgcggcgacgctccgccagcagaatttcctccacctgcagccggaatccgccgcaacgacgcagcaaaacgacgacgttcgcggcggcggcggcagcggcatggatcggaaccggaccgagagcaactctgaaccggatgatttggcagaatacaaagcggacattttaggtcaccctctctacgaccagctcctatcggcgcatgtctcatgcctgagaatcgccacccccgttgaccagcttccaaggatcgacgcgcagcttcagcagtcgcagcgcgtcgtcgacaagtactccggcatcggaaacggaaacggcgtcgtcgacgacaaagagcttgatcaattcatgacgcattatgttatactgctctgtgctttcaaagaacaattgcaacaacatgtacgtgttcatgctatggaagctgttatggcttgttgggagctggaacaatctctacaaagcttgactggtgtatctcccggtgaaggaacgggtgcaacaatgtccgacgatgaatattatcaggcagagagtaatgccaacttgttcgaaggaagcatggatggagctgatagtctcagctttggtcctcttgttcccacagaaactgaaagatctttgatggagcgtgtgaggcaggagctgaagcatgagttaaaacagggttacaaggacaagattgtggacataagagaagaaattttacgaaagagaagagcgggaaagctaccaggcgacaccacttcccttttaaaagcttggtggcagtcacattctaaatggccatatccaacagaagaggacaaggcaaggttggtgcaggaaacagggctgcaattaaagcagataaataactggttcataaatcaaagaaaaaggaattggcatactaatccgtcgtcttctagtggctccaaaagcaaacgcaagagtagtggtgcaggtgaaacaagtaaccagagcttcatgtgaatgaacacctgatttgaactgaaaaaaaaaatagatatatctctattcttcattttatgcaacaatggtgagattcatatatgaccggagcttagagggaaaaacatgaactgaaatggtggaatatggatgattaagagtaatttgtgataccaacatttacttggggggattaattaattacttggttcaattacagaaaaacctagtattgttgtatatgaggctgctgagttgatacctgatactgttgcaggcactatctatttggttcaatgggtatcgaatgcaatatgtattactattacagttcaaaggtttttgataaaaaaaaaaacaacatagaatccttg

SEQ ID NO: 27894 - DNA, 3238 bp, Glycine max
  Clone ID: TF_GmC2011_1
ctttgtcgacccacgcgtccgacctcttttgccctccattcaatgcaattgcaccctcttaatacgctctgcaattactcttcgctgccacattttcctccatttgttccccacttccctctcctccttcaatgcccttgtccctatctcttcttcttctcctcactttctctctgtaacacctcttcatgccatagcttctttttcttttctttttttccttataagtaaacattttttttttcaaaactgtcccaaacccttccttcaaaacggtcatctcttttcaacccaaaacagatctacaccttcatcttctactcccactctcactgaaaatccaagggctcaacttcttaagctttttctctatccaagaacctcttaggagagagaaagtgatatatatagagagagaaagagtcaattctacatatacttgttggtggtggtttttgaggcatgtgaagtatgcaagccgttattacgatgattggggcgagtagcgggccttcgatgatagcaaggaacaacaacaacgttggagggttttttggatcatcttcatcacctttcactcttgcccagattgagaaactataatcctctctccggaaccttaaaagatccgtagcaataatcataatgttccagccgaacctgatggacgcgttggagatgggtcagaacactcccgagagtgagattcctcgaatccgtgaggatgagttcgacagtgccgccgagtccggtattgaaaaccatgaaggtgccttcggtgaagggaatgaccctcgttgacccacgcgtctacgtaggctcgagaaggaactgagcagggagttagggttagagccattgcaggttaagttttggtttcagaacaagcgtactcagatgaagacacagcacgagcggcatgagaatacaaatctcagaaccgaaaacgagaagcttcgagcagataatatgaggtatagggaggctcttagcaatgcttcgtgtcctaattgtggtggaccaaccgctataggagaaatgtcattcgatgaacatcacttgaggcttgaaaacgcaaggctaagagaagagattgatcgcatctcagcaattgctgcaaagtatgtagggaagccagtggtgaactattcaaatatttctccttctctccctcctcgtccattagaactgggggttggtggtgctggttttggaggccaaccagggattggtgtggacatgtatggagctggggatcttcttaggtcaattagtggacccactgaagctgataagccaataatcatagagctagctgttgcagctatggaggagctcattgggatggcacaaatgggtgagcctctttggttaactacccttgatggcacatccactatgctcaatgaggatgagtacattaggtcttttcctcgagggattggtccaaaacctagtggcttcaaatgtgaagcttcaagagaaactgctgttgttatcatgaaccatgtcaacctcgttgagattctcatggatgtgaaccaatggtccacagtgttctctggtatagtctcaagagccatgactctggaagttctatcaacaggggtggctgggaactacaatggtgccttacaagtgatgacagcagaactacaactacctacaccacttgtgccaactcgcgagagttattttgtgaggtattgtaagcaacatgcagatgggacttgggcagttgtggatgtttctttggataatttgcgcccaggtccttcagccagatgtagaagaaggccttctggttgcttaattcaagaaatgccaaatggctattcaaaggtcacatgggttgagcatgtagaagtggatgatagaggtgttcacaatctttacaagcagcttgttagctctggacatgcatttggtgcaaaacgttgggttgcaaccttagatcgacaatgtgaaagactcgctagtgccatggcaacaaacattcccactgtagatgttggcgtgataacaaaccaagacgggagaaagagcatgatgaagctggctgaaagaatggtgataagcttttgtgctggagtgagtgcttccactgctcacacatggacaacactctctgggaccggtgctgatgatgtaagggttatgaccagaaagagtgtggatgaccctggaagaccccctggcatagttctcagtgctgccacttctttttggcttcctgttccacctaaacgagtctttgacttcctccgtgacgaaaactctaggaatgagtgggacattctttccaatggaggagttgtccaagaaatggcacacattgcaaacggaagagacacaggaaactgtgtatctctacttcgagtaaatagtgcaaattcgagccagagcaacatgttgatattacaagagagttgcaccaattcaacaggctcttttgtcatttatgctccggtggacattgttgcaatgaatgtggttctaaatggtggagacccagattacgtggcacttcttccttcagggtttgctattctccctgatggaaccacatcgcataatggaagtggtggcattggcgaaactggccctagtggttctctcttaaccgttgcgtttcaaatattggtggattctgttccaaccgcgaagctttctcttggatctgtggccactgtgaacaatctcattgcatgcactgttgagagaatcaaggcttctttgtctggtgaacctgcttgatcagagcttcaagacttttggattctgcgttgcagtttacaagaaggatcaacgggacgcattgcattgtggaaaattaaaaagttggtgttgaacctcggcttatattacaaagacggggagaagtcaagagcgcaccttgcatgattccttctcagtgccccaaaagagttatgagaggattaaggttcgggaattgacttccctagctagatatagtaaacgttaagagcacattttaagatcttgctaccctttaccatttccaagactaaaatatatatatagctagctaggattaaccttttgagtaactagggtttaacattaatgtaaaactcttgtctttttcaatatctgattttgtgtgatttagaagtagtagcaccggcactagttggtgggaaaatttgcatttaaaaaacagaaaaatttctcaccaaacctccttttttaaaaggttttgcaatggatttttcct

SEQ ID NO: 27895 - DNA, 2736 bp, Glycine max
  unsure (1)..(2736): unsure at all n locations
  Clone ID: TF_GmC1817_1
aattcggctcgaggtgaagaactccaagttcttggtgcctgcacaagaccttctcaacgagttttgtagccttgacgcaaagcaaagcgacttgggaaagccaacaaaatcgttgaataagaagcagtgggaagaggaaaataacggtatcggttcctcgaagaagcattctctgacctctctagagttcgtggagttgcagaagagaaagacaaagctgctttcgatgctggaagaggttgacagaaggtacaagcactaccgcaatcagatgaagagcgtggtgtcgtcgttcgaagcggtggcggggaatggtgctgccacggtgtactcagctttggcgttgaaagccatgtcgagacatttcaggtgtttgaaggatgggattatggcgcagattcaagcaacaagaaaagccatgggagagaaagacccagttgcaccaggcacaacaaggggcgaaacgccaaggctcaaagttattgaccaaacactgaggcaacaaagggcgtttcagcaaatgagcatgatggaaacccatccttggagacaccaacgtggccttcctgagcgagctgtggcagttcttcgggcttggctctttgagcatatccaacaatgttagcgaaccgatgccgaggctcatattttagcacgccaaaccggtctctcgagacgacaagtttcgtattggtttattaatgcaagggtgagactatggaagccaatggtggaggaaatgtacttggaggaagtgaaggaccctgaaaacaacatagcttcctcagaaggggctactgatcaagacaatgatataaacccaaataatgttgaataccctccacctccttcttcatcacgatcagaggatcagaagccatctctggttcgaattgactccgagtgtgcatcctccatcatcaacaaccacagtaccccagataacaaaaacgacccaaagggccacgaacagtgctttgggccagccctgcctgctttcgctcgcactctctccacccctcgcgtacagcctccttcgggagtttggttcggcgtgggcccgacatccggtctggggtgtccctgtcgctaggcttgcacaacagatgttgtcacaagatgggtatgtgagttctaattctaaagttgcaagtgtttatcaacaaggacatttcctggtgaagaactccaagttcttggttcctgcacaggaccttctcaacgagttttgtagcctttgtgcaaagcaaagcgacttgggaaagccaacaaaatcgttgaagaagcagtgggaagatcaggaaaataacggtgtcggttcttcgaagaagcattctctgacctctctagagttcgtggagttgcagaagagaaagacaaagctgctttcgatgctggaagaggttgacagaaggtacaagcactaccggaatcagatgaagagtgtggtgtcatcgtttgaagcggtggcggggaatggtgctgcgacagtgtactcagctttggcgttgaaggccatgtcgagacatttcaggtgtttgaaagatgggattttgtcgcagattcaggcaacaagaaaagccatgggagagaaagacccagttgcaccaggcacaacaaggggcgaaacgccaagacttaaagtcattgaccaaacactgagacaacaaagggcgtttcagcaaatgagcatgatggaaacacatccttggagaccccaacgtggccttccagagcgtgccgtttcagttcttcgggcttggctctttgaacattttctccatccgtacccaagcgatgttgataagcatattttagcacgccaaaccggtctctcgagaggccaggtttcgaattggtttattaatgcaagggtgagactatggaagccaatggtagaagaaatgtacttggaggaagtgaaggatcctgagaacaacatagcttcctcagaaggggctactgatcaagacaatgatataaacccaaataatgttcaataccctccacctcctttatcatcaagatcagaggatcagaagccatcactggttcgaattgactccgagtgtgcgtcctccatcatcaacaaccacagtaccccagataacaaaaacgatccaaagggccaagaacagtgctttgggtcagtggagcttgatttttcatcatacacacaccactcctcgggcatggtttcttacggaagtagtgatcagaatgggaacaacaaccagagtggggtgtctttgacgctagggttacagcaacatggggtgagtctagcgttcccgccagcaacacagagttcactgtactatccaagggaccaaattgaagattgtcaaccagttcatcagtactctcttttggacggtgaaggacaaaacctgccttacaggaatttgatgggagcacagcttctgcatgacttggcaggatagattatatatattaattcttgatttgaggaattgagattaaaatggtgagtataatcaacaacaaattaagattagtctctttttttttcacttttagctagctacgtacaaaattattatatagtacacaattaatgcttaattccatacataaagctatatatactcggttaatttgataaacgtacagtttaatttctacatgtgtatttatgttataatttggaatgcggacgcctaagtcaagagatccgggggcccggtttcgccggtnttnaaaaacatcatcgca

SEQ ID NO: 27896 - DNA, 779 bp, Glycine max
  unsure (1)..(779): unsure at all n locations
  Clone ID: TF_LIB4280-027-R1-K1-D7
ccacgcgtccgtttcaatttaaactatttatttatttttcatcagagaggataataattctgtgcctttccattccttgactatcacggaatttttttgatttccaaagagaaaaaaagagatgacaaaaataaataaaaacaaagaaacaccaaaatcgattctattcggttgccctaattattattattttccccttttcttctctgtgctgcttggttgggtttctttttgtggcttcgttgtggattcctagggtttgaaggtggaaagaggttcgatctcgatcgatggaggccgaggcagagaacaacgacgtgaagaaggaagaaaacagcaatgataacaacaacaacaacaacaatgaaagtaacagcaaaattgggaattcgagtgagggtctgagcaagcccaagcgtcagatgaagacgccgtttcagcttgaaacgctcgagaaagcttatgctgttgagaattacccgtcggagactatgagggtgngagttgtcggagaagttggggttgtcggatcggcagttgcagatgtggttctgtcaccggcggttgaaggacaagaaggagttgccgtcaaagaagccgcgaaagggcagcggcgttgccggattctccggtggaggagcccaagttggggcctgaagtgggtgttgaatatggatccgggtcaggtttcggngtccagcccgtttgcccggtcggagttgangaaatgtggtgcctccggggggtactatgagtcaccacangactatatggagctt

SEQ ID NO: 27897 - DNA, 731 bp, Glycine max
  Clone ID: TF_LIB4366-009-R1-K1-A7
ctcttttttcacctatataccctctaatattctaattctctctcttgatccaacaaacaaacactaccattttgtttgttctgagtagtgatccatgatggaacctcaacaacaacaacaacaagcacaagggagccaacaacaacaacaaaacgaggatggtggcagtggaaaaggggggtttctgagcaggcaaagtagtacacggtggactccaacaaacgaccagataagaatattgaaggaactttactacaacaatggaattagatccccgagtgcagagcagattcagaggatctctgctaggctgaggcagtacggtaagattgaaggcaagaatgtcttttattggttccagaaccacaaagctcgagaaaggcagaagaaaaggttcacttctgatcataatcataataatgtccccatgcaaagacccccaactaatccttctgctgcttggaaacctgatctagctgatcccattcacaccaccaagtattgtaacatctcttctactgcagggatctcttcggcatcatcttctgttgagatggttactgtgggacagatggggaattatgggtatggttctgtgcccatggagaaaagttttagggactgctcgatatcagctgggggtagcagtggccatgttggattaataaaccacaaacttgggtgggttggtgtggacccatataatttctcaacctatgccaacttctttg

SEQ ID NO: 27898 - DNA, 493 bp, Glycine max
  Clone ID: TF_uC-gmroLIB3259P256d10a1
cccccccccttaaaatataacatgggtttttggggtcaacccccccaaaaaactggggtaaaaaaaaattccataaacccctgaattttttatctctccccaaaggggggggtttccatcggggccggggggttgggaaccaaacggttttttgtttagggtgcaacccaagtttttggggaagcttgaccttcctttaagggtaaagcttgttttaaacccaaaagtttttttccaaagccttaatttgttccaaacttaaggaaccctttttttaaaaaggaggccccggtttttaaacacacccttttttgggggggccccccaaaaaaaaagggaaccccccgccaaacaagggggggggggtcccgggacaatgcccctttggggaaaaaaaaggaaaaattgtcttgggggccggggaaaaaactcagaccttaaaactctttctgagggggaaaaaggggatctttttgttgtggggagaaaaaca

SEQ ID NO: 27899 - DNA, 422 bp, Glycine max
  Clone ID: TF_10847932
acatggacgagggcttgtcaggcttttgcattatatcatcatcaggaagtgtccgtggcaaaagtggcaccaagtgtgggcgttggaatcccaccactgaacaggttaaacttctaactgaactcttcagatcagggctccgaaccccaagcactgaccagattcaaaagatctccactcagcttaccttttatggcaagatagagagcaagaatgtcttctattggtttcagaaccataaggctcgggaaagacagaagaaccgtaagctctcctttgatgatcacaaggatctcatttgtagacaaaatgcaccttctacacaaagtaagtaatatatatcttcgttccaatatactttttcataactatttacaataaataataataataataaaatgaattaaacttctcatataatt

SEQ ID NO: 27900 - DNA, 1520 bp, Glycine max
  Clone ID: TF_GmC1705_1
cccttcaatttattcatctctgacaccctcttaattctgcttccagatcttctccatgatcggttcctatcacctgattgattttaactatgtctctccaaactcaaatacctttatgtttttcttttcagtttattcgtctgatgagaaccttttaaagtctgcctccaggttcctccagaatgatgggtatgatcactcgtctctcacgcaatcaagtccatatcctaatactcatcatctacttctttcataataaataatagataagaatccactcacttgcacaacattttgcctttcagccaaggcaagttgctatatggttccaaaaccgaaggacaaggttcaagaccaagcagctagaaaaagactatggcgtgttgaaagctagttatgacagactcaaaagcgactatgaaagttttgggcaagagattgagatgcaaaatccacgggtgatgatgattacgattattcaaccaaaaaacaagcaaggcgcctattttggatttattaatttcaaaaaatgcaacaacattctagaaaatggaatcgaaagtgtcaacacttattatttatcctattaatgtaacatggaagcgagtggcagacaattcttcctaaagagaggtgcatgattcggagagcaaacattgcattaaagatggggagaagcaggagcattcggatgaaaagtcatctcctgatgatgctgtcaattcctcttcaccccacaacaacaaggagccaatggatttattaattatttcaaaaaatgcaacaacaacaacaacatctgaaaatgggaccaaagtgttgtcaccactcccactccctattatggtaacatgctgcaagcaagaagatgccaactcagccaaaagtgatgtccttgattcggatagcccacattgcacttcattcgtggagcctgctgattcctctcatgcctttgaaccagaagaccactcagaagacttctcccaagatgaagaggataaccttagtgaaaaccttttgatgaccttcccttcttcttgttgcttacctaaggttgaagaacactgctatgacggccctcctgaaaactcttgtaattttggcttccaggttgaggatcaaaccttctgtttctggccctattgaaccaaaccaaccaaccaaccgctagcaatgttttaaaaaactttgcagttgtaaccatgtactagaaagcaataaaaatggtattgttacttctactattcgttgagcctgctgattcctctcatgcctttgaaccggaagaccactcagaagacttctcccaagatgaagaggataaccttagtgaaaaccttttgatgaccttcccttcttcttgttgcttacctaaggttgaagaacactgctatgacggccctcctgaaaactcttgtaattttggcttccaggttgaggatcaaaccttctgtttctggccctattgaaccaaaccaaccaaccaaccgctagcaatgtttaaaaaactttgcagt

SEQ ID NO: 27901 - DNA, 750 bp, Glycine max
  Clone ID: TF_GmC1293_3
ggaaaatgatgtactaccaaagcaaaagtgctctcaaaagaacaagcagtgggaagaaggtaatagcggtggtggttcctcaaagaaccacttctcttagctctctagagtatgtggaattgcagaagagaaagacaaagctgctcgcgatgctggaagaggttgatagaagatacaaacactaccgtaaccaaatgaagggtgtggtgtcctcctttgaagcagtggcgggtaatggtgcagccactgtttactcggctctggctttgaaagccatgtcaagacattttaggtgtttgaaggatggaattatggatgaaattgaagccacaagaaaaggcatgggagagaaagaccacgtagcggcagtacccggcacaacaaggggcgaaacaccaaggcttagaatcgttgaccaatcgctgagacaacaaagggcctttcagcaaattagcatcatggaaacccatccttggagaccccaacgtggccttcccgaacgttccgtttctgttcttcgagcttggctttttgagcactttctccatccgtacccaagcgatgttgataaacatatcctagcccgccaagccggtctcttcagacgtcaggtttcgaattggtttattaacgcgagggtgaggctatggaagccgatggtggaggaaatgtatctggaagatgagaaagagcacgaacacgacgtagcatcatcgatattaatgttcccaagaggatgagaagccaacg

SEQ ID NO: 27902 - DNA, 861 bp, Glycine max
  Clone ID: TF_GmC2011_2
ccacgcgtccgattttcctccatctgttccccacttctctctctccttcaatgcccttgtccctctctcttcttcttcttcttcttcttctgcgtccgtctctgcgtgggcttctcttcatgatatagcttcttcaccttttttttctttcttttctttgttaccatatataagtaaactagattccataactgtcccaagcccttccttcaaaagggtcctctcttttcaacccaaaacagatctacaccttcatcttccaccaccactctcactgaatccaagggctcaacctcttaagctttttctctatccaagaacctcttaagagagagaaagaataagagaaagagaaagtgagagagccaattctacatttgttggtggtggtttttgaggcatgtgaaatatgcaagccggtattatgatgattccggcgagaaacatgccttcgatgatagcaagaaacaacaacgttgtagggttttttggatcatctgcacttttcactcttgcccagattgagaaactataagcctctccggaaccttaaaagatctatagcaataataatgttccagccgaacctgatggacgcgttggagatgggtcagaacacttccgagagtgaggttcctcgaatcctagaagacgagttcgacagtgccaccaagtccggtagtgaaaaccatgaaggtgcctctggtgaagaccaagaccctcgtcccaacaaaaagaagcgttaccaccgccacacccaacaccagatccaagaaatggaagcttttttcaaggagtgtccgcacccagatgacaagcaaaggaaggaactgagcagggagttagggttagagccattgc

SEQ ID NO: 27903 - DNA, 422 bp, Glycine max
  Clone ID: TF_LIB3108-022-Q1-K1-A9
agcatcctggtggtgaacatacaggagaaaaagatagaacctttgaaacatcgtttatcagagaacaatgggctttgcaacagctgagaaggaacgagcaacaatcttggaggcctcagaggggcctgcctgagaaatctgtctcggttctacgtgcatggatgttccaaaactttcttcacccgtacccaaaagacaacgaaaagcatttgctagccattcaaagtggattgacgagaagccaggtgtccaactggtttataaatgcgagagttcgcctctggaaaccattgatagaggaaatgtactcggaggtaaacaaaaagaatcgtccaatagaaggatcaggctgcgatagcaggaactatgcaagcattgggaatcaaagaattcagatgaattgaattactgaaatattctta

SEQ ID NO: 27904 - DNA, 646 bp, Glycine max
  Clone ID: TF_GmC419_97
ggctcgaggacctctgtccttaaagcttggtggcaatcacattccaagtggccttaccccacagaggaggataaggcacggttggtgcaggaaacgggtttgcagctaaagcagatcaataattggtttatcaatcaaaggaagaggaactggcatagcaacccctcaacttctactgccttgaagagcaagcgcaaaaggtcatagtggtgctgatcatcacatgtaaatggaggaaaactcaagaaccaatccctgactctgtactctgttagtttgtctctgcggtcaatcatggtgcatggcaagggattcaagtaaagccaatcataaaaaaaaaggttcacatttagcttccgctcatggaacgggcctaacacagatgtggaggatcaaaagcctgcagtacggtgatgcatcaaaattagggagttcaattaggaattacaccgctatcaaaatgggtaactccatgggagcatgatttttagtgatatatatatatatatatatacattaatgtttgtgaaatatatataatagtgaggggttgtgggtgtatagtaataatcagagcatttttccttcaataatgctaaatttgtttttgtgcttgaattcttggcctcgagggccaaattcccta

SEQ ID NO: 27905 - DNA, 1132 bp, Glycine max
  Clone ID: TF_GmC228470_1
agtacaaaaaaaccagtatcatttccctttctctttgatatctatgatcttcactgtctaaaattttctgctgcctttttttctgatttcaccgtgaataaaaccagaaaaagaaggataatacacagagagattcaaacaagaaaaaaaaaaaacccaattatccaaattttatatgaccccctacacccccacaaaaaaaatctatcagcctctcagaatcaattaaccttccctatatacaaaaataaaatcaatttccaagcctcaattcaacagcactagtcttgatgaacttcatatctttcaagatgctgtggattggtgttgatggggttgttggctactgtgaacaaatgggtggaacctcggtttgccaaaggggaatccaatggctttggaggttgagtcattgttgttattgttattacttgttttgacactggccatggctcctgaatttgtagcattgatggtggcactaatagataaggaagtggatgtagaatttgtggccacgcgctcacaagaagggcacattagtggaaggtaattgcttgtaattgcattttgaagtcttcaaagcccgtatttcttgaccctcattcctgaagctcctattctcttccgttaatgccccacaacatctcttcaagtaccaacaatccacttctgtttgcttcaacttagtcctgcatgcaatacacacattcacgattatttattagtataaccaatagtattactcataagtcataaccatgcatataacaaaaatgaaactaatcaagtgtatgacactcccatgtaaagttctttctaagattaaataaaaattaaaccatacccttttatataatatggtgtatgaaaaaaaatggtatgaaatttgaaaaatctagcaaatagcaaggtcatgtggaatagaactatgctcatgtgtaggatgttgtaccttgctcttcggttttggaaccaaacttctacttggcgaggttgaagattgagttgtttagcaagagcaagcttttgtttctgcatcacaaaattacgcgtccaacaccattattaattaggtacaaatactactaaaaaaacaaaaccaaacaaagaaaaagagacaagataaatt

SEQ ID NO: 27906 - DNA, 718 bp, Glycine max
  unsure (1)..(718): unsure at all n locations
  Clone ID: TF_GmC143165_1
ttttgttgcactgagtcatgataggttactaggagatacaagcaataccatcaacaaatgcagatggttgttcaatcattcgagtcagtggtgggtcttagttcggctaccccgtacgtctccttggctctcaagtcaatatcaaaacacttcaggtgcctaaaaaatgcaatctcagatcaactgaagcttacatgtgaagtcttgggagaggactattcaataccaaccacaagtactggtagtaaatttgacaacaatgtggccaggctaaggtgcatggaccaaaactttcaaaaaaacaaatctggcggggctaacataaactttcttgagccccaacaacacgtatggaggccccagaggggcttaccagaacgctccgtggcaattcttaaagcttggttatttgagcattttcttcatccttaccccacggacactgataaacacatgttggctagccaaacgggtctatcacgacaccaggtatcccattggtgcataaatgctcgagtccgcgtgtggaagccaatggttgaggaaatacacatgcttgaaacaaaaggcgcaacagaagcccaccaacaccaaacctctagttaaaatgaccagttagcttctgcctctngaggcagcaacaacccagctcaatctgataaccaacctgctcacgagtttggcgcgcatgcattgcattcacatgccatccctgaaa

SEQ ID NO: 27907 - DNA, 280 bp, Glycine max
  unsure (1)..(280): unsure at all n locations
  Clone ID: TF_701134378H1
gagaacagcnacnacatgnatggnnggnnagttccgatcgatntngganggnctcnncgaggaagggtgtgncgaagaancggggnntcanatctgagaagacngcgtcgactaagtgtggnacaagtganngctttggagaagaactttgaggttgaaancaagcttgaacctgagaggnaggtcaagcttgcccaagancttgggttgcagcctagcacaagtagccgtttggttccanaaccgccgagccncatggaaaaccagacantggagagag

SEQ ID NO: 27908 - DNA, 750 bp, Glycine max
  unsure (1)..(750): unsure at all n locations
  Clone ID: TF_LIB4392-003-Q1-K1-B8
cggactcttgggcggacgcgtgggcggacgcgtgggcggacgcgtgggttcacacaccaccaaactccaaacccaatcaattaacctcattgttccaaagcttcaaatttcaagtgactccaccccaatgggggatttcatcttctccttcaaaacacaacaacaagaacatcatgcacaccaccaaagagcaaagcatattttctttaagaagaggctaaccgaggaccaagtttcaattctcgagaagtgcttttcctccaacatgaagctcgaaccggagcagaagttccaccttgcaaaccaacttggtctgcctccaagacaagttgcaatttggtaccaaaacaaaagggcacgatggaagacccaaagccttgaggtggaccatggtgtgcttcaggcaggctagagaatgtggtggctgaaaagaagcagctagagaaagatgttgaaaggctcaaagctgagcttaagaaggctcaagagatgttgcttattaccaatagtgtcaaaggtggagaccataataataataatgcttgtgaattttcaacttcttttgaagaaggagggagtntctggggtggtgcttgatgatgccacttatcatcatcatcantgagtgttggcaaagtgggggntgagggtatgccangtttgaggagctctatgcttacttcggtgggtgcanattatggggacaggcttgcatgagaaagggcataaaatataacaaactttttgcta

SEQ ID NO: 27909 - DNA, 1597 bp, Glycine max
  Clone ID: TF_GmC53_2
caaatcctttctactgttacggtcctctcatcttcagagagcacttgccagattcagattagattcatttcatttctcatttacacgaattcggctcgaggtaagtatggtggttatcttagcagcttgagaaaggaatttctaaagaaaaggaaaaaaggtaagctaccaaaggatgcaaggatgatactcatggactggtggaacacacactataggtggccttatcctacggtaattgaaattaatatcatgaagtatatatatagcaatatagcttacgttatattgtgtattgctcattaacagtagtatgtgatctgatttgatgaaatatgccaaattgccaatataaagccaccttgaataatgtatgtccatcagcaatgatttgaaatccatagtttgtaattatggtcaagttgtgtgttatgttaaccctgcacaaaacattctaattgcttaattgcagaaaaattgtaacttggtgaattttgtcgccgatttgtatattgtagtgatatagtaattttcttcttaaggtagtccatgactagaggattcataacttgcatatttgtactgtgttccacatgcctagagaattcctattgttttgtaaaggaaaaaaatgtggttttagtccttatactttccacttaaactttttagttaaacttggctttatcctgataatttcaaagtgatgaatttaatcttccaacttttggaaatacgtgaattcagtccctcttcatgttttaacttgaactttttgaggtggattttagcctctaagaagaagagggactaaatttacatattttctaaagttggagaactaaatcaattgaaaagtatgggaatcaaaaccatgtttgaatgagagtatagagacaaaaaacgaatatttttcccttttttatatatttctagtagaggatgaactctacaaagttttgtatgaacttctgaatttaatatgcgagcatgggtaatttcatttttgttagttgcagaaaatgaggatgaaattgggtaattactaattaagcatgcgtgcttaacttaaatttgcacatgcaacttaccctgagccctggtggccaattaatcaatcaagcacagtttccatttaaatagacattgccaaatcttatataaatgccttgaaactaatcatttgttaggaggaagagaaagtgcagctatcagaaatgaccggacttgatcaaaagcagatcaataattggttcatcaatcaaaggaaacggcattggaaaccaacagaggacatgcgatttgccattatggatggtgtaagtggcagtggcttaggaggacctatgtgatttatttctcgagatggaccgtgttgattcccaatacttgtatcttctgctcgtgtgatgtgtgtataccttctattccgcgagatattaattttttgaacctacatttgtatgctaagtaggtccttcagctatatatatatatatatatgcaagtgtaaaaaactgtagctaatatacgcgacgacagtgataatcgatcaatgttactgaatcattatttcatggcaatacgttatactatt

SEQ ID NO: 27910 - DNA, 2939 bp, Glycine max
  Clone ID: TF_GmC378_1
cccacgcgttttttttttttgggagataaaagagaaagggtcaatccatttttttaaagtcttttgtgcgggtctgagggttgcagtgtgggggtgcaagagttacgactgatatttatttctcaatccattccctgttcaatgcaaaattcatcatgcttcttgtgctcaactcaaaggaaaatggagggccccagtgagataggtctcattggagaaaattttgatgctggtttgatggggaggatgagggacgatgagtatgaaagccgttctggaagtgataactttgaaggcgcatctggtgatgatcaggatggtggtgatgatcagccacagaggaagaagagataccacagacacacccctcaccaaattcaagagcttgaggctttcttcaaggagtgtcctcatcctgatgagaagcaaaggttggatctcagtaagaggcttggcttggagaataagcaagtcaagttctggtttcagaatcgacgaacccaaatgaagacccaactggaacgccatgagaacataatgcttaggcaggagaatgataagctcagagctgagaacagtttgatcaaggaagccatgtcaaatccagtgtgtaacaactgcggtggccctgcaattcctggccaaatttcatttgaggagcaccagattagaattgagaatgccagactaaaggatgaattgaaccgtatatgtgtcctagcaaacaagttccttggcaagccaatctcatcattgaccagtcccatggccctcacaacctcaaattctggtcttgaacttggtattggaaggaatgggattggtggttcaagcactcttggcactcccttgccaatggggcttgatttgggagatggagtgttaggcacccaacctgcaatgcctggggttagaccagcattgggtttgatgggaaatgaagttcagcttgagagatctatgcttatagatcttgcattggctgccatggaggaattactgaagatgactcaggcagagagccctctttggatcaagagtttggatggtgagaaggaaatctttaaccatgaggagtatgcaaggttgttttctccttgcattggtccaaaacccgctggctatataactgaagctacaagagaaactggaatagtaatcatcaacagtttagcccttgtggaaactttgatggacgcgaatcgatgggcagagatgtttccgtctatgattgctagagctatcaacctcgatgttatatctaatggcatgggtggaacaagaaatggtgctctacaagtgatgcatgctgaggttcaattgctttctccactagtccccgttcgtcaagtatacggctgcaagaagacgacagaaggggcagaaggtgtatgggctgtagttgatgtttccattgagataggtcacgatgctgctaatgcacagccatccattagctgtagaaggcttccttctggctgtattgtgcaggatatgccgaatggttactccaaggttacttggcttgagcattgggagtacgatgagaatgttgtccaccaactttatcgcccgttgctaagttctggtgttggattcggtgctcatagatggattgccaccctccaaaggcagtgtgaatgcttggctatcctaatgtcctcttccatttcaagtgatagtcacacagcattgagccaagctggtaggagaagcatgttgaaattggcacaacgcatgactagcaacttctgttccggggtttgtgcttcgtcagctcgcaagtgggacagccttcacattgggactcttggtgatgacatgaaagtgatgacaaggaaaaacgtggatgaccctggtgagcctcctgggattgtgctcagtgctgcaacttctgtttggatgccagtgtcacggcaaaggctgttcgactttctgcgtgatgaacggctgagaagtgagtgggacatcttgtccaatggtggaccaatgcaggagatggtacatattgccaaaggacaaggacatggaaactgtgtttctcttctccgtgctaatgctgttaacgccaacgatagcagcatgctgattctgcaagagacatggatggacgcgtcatgctcagtggtggtatatgcacctgttgacgtgcaatcactgaacgtggtgatgagtggtggagattctgcatacgttgcactcttgccttcaggctttgcaattcttcccgatggccactgcaacgacaacggctgcaacgggagtctgcagaagggccgcggcagcgacgacggcagtggcggaagccttctcacagtcggtttccaaattctggtgaatagtctcccaacagcaaagctcacagtggagtcagtggacactgtgaataacctcatctcctgcaccattcagaagatcaaagctgcactcagagttgcatgatgccaacaacaacaacaacaacaaccattttgttaatgcagtaataatatgcaaaagttaagttaccttaaaattattattttgtggtcttttttaattttttggtttctaagatgaatattattcggagaggggttatataattcggttgggtgtataggatttataattatatagagtagtggaagaggctgaggcagaaagggtcgcgtaaggaaggtttcgagtcaagaacgaaccgcgatggaggaacttgaattgtgctgtttgcatttgcatgcagcttttctctgctcatagtggttcgggtattgactcgttgacctgcgagttagtctcagtgctcttgtttagataagatgacagaaaaaaaaaaaacaaatgtgcgtgtgttactacttaaattattactagtgcccatccatccgatacagttgcaaattgctgaactaatgtattttggaattatgcatttttcatattttagtagtcttttt

SEQ ID NO: 27911 - DNA, 395 bp, Glycine max
  Clone ID: TF_LIB3242-270-Q1-J1-B8
cggctcgagggtccatgtcgttatcaggcatagagaacaagtgcaatgaagtacatggagatgatgagttatccgatgatggggtcttccagagtggggagaagaagaagaggttgaatttggaacaggtgaaggcccttgagaagagttttgatcaggggaacaaacttgagccagaaaggaaagtgcagttagctaaggctttggggttgcagccaagacaagttgccatatggtttcagaatagaagggctagatggaaaaccaagcaattggagaaagaatacgaagtcctcaagaagcagtttgaagcagtcaaggctgataatgatgttcttaaggttcggaaccagaaactacaggcagagttacaagctgtaaaaagtaaggattgg

SEQ ID NO: 27912 - DNA, 981 bp, Glycine max
  Clone ID: TF_GmC1019_2
atggtgaacgcgatggagtggcagaagcagcgttgttggcaaccaaacagaaacgcggaaatgatgtgcgtgaaagtgatgaccgacgaacagctcgagattctgcgcaaacagattgcggtttacgcaacaatctgcgaacaactcatcgagatgcacaaaaacatctctgcacaccaagatctcgcaggtattaggctggggaatatgtattgtgatccattgttggggtctggtggtctcaaaatagcttcaaggcagcggtggactccaactgctatgcagcttcagattctggagcgaatatttgatcaagggattgggactcccaccaaggaaaagatcaaggagatcactaatgagctcagccagcatggtcagatttctgagaccaatgtgtataattggttccagaacaggcgggctcgctccaaaagaaagcagcagaatgtggcgcctagtgctaatgctgaatcagaagtggagactgaggttgattctaaggataagaagacaaagccggacgaatttcaggcccctcctagcgtttctgctgggcctgctgataatttaggcttccagaaccatgatagtttgcagtacttgaatccagaatccaacaaaccagattctgtcttcccgtctgatgggaccagaaattttcatcatgtgcctgcttttgatgggctgctatcaaactcaaggagcaactatcttactggaaaactggaaacacctgagaactacgaattataccagccagcaggtgactacaacattgcaggttgacattcaatattattctgatgactgtgattagctgtaaagaattgctggtgtggttttgggcttgtgttgatgagaaaaattgaaccaattgaaacgtgaaacttatagtttgtagtatatagatacaatgatcttttatgtggtaggtggacattttacttgataatggaatataatcatgagttcatattg

SEQ ID NO: 27913 - DNA, 1005 bp, Glycine max
  unsure (1)..(1005): unsure at all n locations
  Clone ID: TF_GmC597467_1
ccaaaaaagacattgttgcttttcattttggcatcacagagtatcagagagaaagagagagagagcggttttgcagaaaaaatccaagtaaatttaaggagccaccactgttccaatcagcccctttcattttgcagtgcccgtttattttttcgtgtttgcattcaccgttccacagaaggaaaaaagagtgctttgttccatctctttctgtggtgtgtctcaagataaaaagctcactcactcacagcagcaacaacccttttaccttaactcttgaaactttgttcagagtttggattttgagagagcatgatctgatgaaggagtgtggaggctctcttgggggagagggcaaggaagaagaggactacacaaaacaagtgttgtctttttgaaccccaaaaaaaaacgtttttttttgttttgttgttatggcactttgtatgcagagtcagcagagagattcagcatcaaacaagctgctcatggattgtggcaagtatgtgaggtacacacctgaacaggtggaggctttggagagggtttatattgaatgtccaaagcctagttcttccagaaggcaacaaatcattagggagtgtccactccttgctaacattgaaacaaagcagatcaaagtgtggttccagaatcgcagatgtcgtgaaaagcagcggaaggaagcctctcgtctgcagacagtgaatagaaagctgtctgcaatgaacaagttgttgatggaagagaacgaccgactgcagaagcaggtctcacagttggtttatgataatggattcatgaaacaacaaatacatactgcatctgctactactactactgacaatagctgtgaatctgtggtagtgagtggtcaacgccaacatcaaaaccccaaaattcagcatccccagtgggatgccaacaacccagctggtcttcttgcaattgctcaggagaccctggcggctntcctttcaaaagctactggaactgctgtcaact

SEQ ID NO: 27914 - DNA, 2258 bp, Glycine max
  Clone ID: TF_GmC1502_1
cccccccttcgccttgagctcctttctctgttcctaagaggagttatgggggcaaattgaaaacgcattcaattacaacaaacacgttttttttttcggttaatgttgttgcattctcttttccttttgccgtaaacgggggccctcgcttttctcataagccactgaaaaattttgctcctttcgcccctaaactttaacagaggtcgttgttctgtcatatgatggagattggattatgatctaaatatatattatttagtattttaattttgatttcatatttaggaatcaagtgaattgcaatcagaagaaaataaagtctccaatgagaaaaataagaaaagaaagctgaaaacaccggcccagcttaaggccttggagaatttttataatgagcacaaataccccacagaggaaatgaaattagtacttgctgaggagttaggattgacagaaaagcaaatatctggatggttttgccacagaaggttaaaagataaaagattgatgaaagatgaagctgttgctaatgggcgacaagatcgttcaagtggtgtcatccaagatcgtggcagtggacttgggcaagattcatgcggaagcagtaagcatgctgatcacaggtatctggatcctaaggaggttgagagccatggcctctacaatcacgaattgtcagttgcagatatgacccacagacgtaggaaccattatcctgaaaatgttagcggggtggatgacacatcatctgagagcagctcatttttgcaagaaaggttttctcaaggtcaggatccatatgatatggagccttctagacatcttacacctaatggagctcttccacccctaaatcccaaaggtgcagttaagatggggcacaaaccatcaggatatttgaaagtgaagggcgagatagagcatgctgctataactgctgttagaaagcaattaggaaggcattatctggaagatggtccactacttggtatagaattcgatccacttcctccaggggcatttgaatgccaaactgcagatccagctaatgaaccgtactctgttacaaatcctctgctttcgaattctccagaaatctctgctgcaaaaagacaacccagtattagctctagatatgattcatattatactaaatttcgttcccaagattcgcatatggaaggagctgactttggttccttgcatgaatctgatttccaggataaacaagataagaaagcatgccagaatataaaacaaaggcaatctttatacggttataccaatcattttcctggaaggaacactttcccagatttgtatgaagactctactggagaagcatctgcttataatagcaataagagtcatagaatgagcactaaacatggtgttgaggggatgcgatctgattctgcttctaaccatagtgatcactatgaagagaagcttacagttaagcagaaaaccttgatgctgcatggttatgataacatcaatccaaagaatatacaaaggagtgaacatgtaaaatctaaaccttctagttcaatccataattcccgtgttcctatggatactgaagaacgggggttatctgctaggatggcaaaggaagagatgtttaagggggacaggaaagcaaaaaatacatactgcaatgtagatggagcaggaatgctttcaaatgaaattatggttgcaaaacgagctaaagttgacatgcttcaacaatacaatgtgaaaaaatcacctgttgctgagatggaacaaaggaaaattcagagatctgctgcagacttgccttctagctttagcgaggatgaaactgctgacaccaattcctcactggattattaagtgatgttgataaatgctaacaagtgtgtgggatttctctaagccattgggtatgtacagcctaaaatgacacatacattttctctgtaacgtgggaaccattgtttctggcagcaatggcagtgactcgctccatttgctgttttttgtgctcacctatttgcctttgtaaaagaaaaaaaatacaccccaggttattcttttgatgtaaaatctcatttcctgaagctacttgtggtaggtttaatgcagcttatatacttgtcacttgtcttttattgatttaattatggtagtgtgtatggcatcctaatttgctccaatttgatctcttgttttggagtgttggctacttctaatttatgatttaacaatttgatctcttgttttggagt

SEQ ID NO: 27915 - DNA, 608 bp, Glycine max
  Clone ID: TF_GmC1502_3
cccacgcgttggctcgagggaatgcaaagactgattggaacaagccagcaagcattgaacttgtttcttctccctttgtcttaccagaagctcctttcctgttcctaagcggagttagggggtcaaattgaattcatttgcaacaaacacctttttgttaatgttgttgcattctcttttcctattgccgtaaacgggtcctgtcctcgcttttctcacaagccactgaaaaattttgcacctttcgccccaaaactttaacagaggggtgttgttcaccgcaattcctcaccccgatggaagaatcaagtgaattgcaatcagaagaaaataaagtctccaatgagaaaaataagaaaagaaagctgaaaacaccggcccagcttaaggccttggagaatttttataatgagcacaaataccccacagaggaaatgaaattagtacttgctgaggagttaggattgacagaaaagcaaatatctggatggttttgccacagaaggttaaaagataaaagattgatgaaagatgaagcttgtgctaatgggcgacagatcgttcaagggtgtcatccagatcgtgcagtggacttgggcagattcatg

SEQ ID NO: 27916 - DNA, 998 bp, Glycine max
  Clone ID: TF_GmC18168_1
aattcggctcgagaacctttgctgacttctgtctttctctctcttatcatcataattcacaatcatcagagacagagagagatggtgaacgtggtggaatccagaaacagttgcagaggtggcagcagagtgggaatgtgaatgtgaatgtgaatgttgatgccaacggagaactcatgtatgtcaaggtcatgactgatgaacagttggaaactctgaggaagcaaatagccgtttatggcaccatttgtgagcaacttattgagatgcacagaacactctcagctcaacaggatcttgcaggggttaggttgggaaacatatactgtgaccaattgatgacatctggtgggcacaaaataacctcaagacaaaggtggacacctacacctgtgcagctacaaattcttgaacgtatatttgatcagggaaatggaactccaagcaaggaaaaaatcaaggaaatcactgctgaactgggccagcatggccaaatttctgaaacaaatgtgtataattggtttcagaataggcgtgctcgatccaaaagaaagctgcaaaatgtggctccttatagcactgaatcagaagtggacactgaggttgattctaagaataagaagacaaaagctgaggaggagtttcagtcccaacataacataacaacttctggaggggctgaaaagttgtgcttccagaaccctcaagtatactctgatcacttgcactacttgaaccctgattccaacaaaccatattccatgtgccaatcagattgcaatctgaaatccacaagaaattcgagtcatgtgtctgtttttaatgagatgctgtcaaactcaaggagtgagtatgtaggtggaaaaatggaagttgctgggagtgtgagctacaatttattccaccaaacaggagactgcaatctggcgggttgagatttagtgtgagctgtaaagaaccctgagttgtgtggatgggcttgtgttcatgtttatgac

SEQ ID NO: 27917 - DNA, 2166 bp, Glycine max
  Clone ID: TF_GmC30_1
gtaagaacatccctaccagataacaatcccctttacagcaaacacccacgcgatgtgggggctctgaagctacttcaccactccaaacccaccacaccaccattattcatatctcattctctaacctttcactctgccttactcactctctactttgctcatcatcgtagatgaaccaacacttctagtctctcttactttataaccatgtaaaaatgagtcacctaatgaaaaattagtagcttcttgttgtgctttttattttgtttgtgttgagataaatttgtttgtttgtttggtattgttttgtgttttatgaattatttgatgggtgaagaaggagaagtggtgagaaagcaaggacaaaggggtgttggtggagataagtggtacttgtatagctgcttacaagactgtaaatattggtgctgtttaatacacgagactagttctctttcgatggtcccttttgagtgaaaaaccttgtcttctcagctttctttcgagagatcttaaagacattgactaacaacaataaagtggatcaatcaaaagacttacttcttcttctaacaacaataagatcacatctttcccactcatgaagagacttagcagctcagattcttccagtgccctcatgacaatttgtccatcaacagaggaacatagtccgaggaacagccaacacatgtatggtagggagttccaatcgatgttggacggactcgacgaggaagggtgtgttgaagaaccggggtatcaatctgagaagaagcgtcgtctaagtgtggatcaagtgaaggctttggagaagaactttgaggttgaaaacaagcttgaacctgagaggaaggtgaagcttgcccaagaacttgggttgcaacctagacaggtagccgtatggttccaaaaccgtcgagccagatggaaaaccaaacaattggagagagattatggtgtactcaaagccaattatgatgctcttaagcttaactttgacaccctcgatcaggacaacgaagccttacgaaagcaggttaaggaattgaaatcgaggctgctgcaagaagagaacacaggaggaagcggtgtttcggtgaaggaagagataataacgaggcctgcagactcagaagacaaaacgatggaacaaagtaagagtgacccatcttctgaaacctcaaatattaatcctagttcggagtcggaggaggatcacttgaactacgagtgtttcaacaacaacgacgactgcgtcggaggaaccgccgcatcgctcttgcaagtggacttcaaagacggttcttccgacagcgacggatcaagcgcgattttgaacgaagacaacatgtactctcccttgaaattcaacaattgctccatatcaacctcgccgtcatcgtcttcgatgatgaactgttttcagttccagaaaccgtatcatcaccacgcgcagtacgtgaagatggaggagcacaatttcctcagcgcggatgaggcctgcaatttcttctcggatgaacaagcaccgacccttcaatggtactgtccagaacagtggagctgagataagaaacatggaaattaaaccgctttcagaaatttttgtttaatatgttgggttgtgttgaacactcattgaggtaaaagttgtaaaaaaaggtttgccggaaggtagaaaatgaaacactgtgcagaagatagagtgaaagagagaacagagatcaatggctgcatggcgtggggtcggagatgaaggatgacgattaaggttaattattactctcgatcgtgggtaatatcaataattattcaatcgtaaagcaaaccatgctgtaaaaaacaaatttcaattcaagtatagaataacgatgtagtactttatcaaacagaaaacgaaaaaaaaaattataaatctgttaaacaatatccttttgcctcactgaactcagtttactagtgtttatgattgattatccttttcctgtaaaagtatttttttttcaccaacaattgctactaaactgaatttgagttggaggcaacatatgagttgttttttaatgttcatttccattgacattgtttattcattagtcgtgtcaagtaaaaatatttttgttattagtatatcattcaaataaaatttattttatcaaaaaa

SEQ ID NO: 27918 - DNA, 1934 bp, Glycine max
  Clone ID: TF_GmC30_3
accacactaccattattcatatctcattctctaacctttcactctgccttactcactctctactttgctcatcatcgtagatgaaccaacacttctagtctctcttactttataaccatgtaaaaatgagtcacctaatgaaaaattagtagcttcttgttgtgctttttattttgtttgtgttgagataaatttgtttgtttgtttggtattgttttgtgttttatgaattatttgatgggtgaagaaggagaagtggtgagaaagcaaggacaaaggggtgttggtggagataagtggtacttgtatagctgcttacaagactgtaaatattggtgctgtttaatacacgagactagttctctttcgatggtcccttttgagtgaaaaaccttgtcttctcagctttctttcgagagatcttaaagacattgactaacaacaataaagtggatcaatcaaaagacttacttcttcttctaacaacaataagatcacatctttcccactcatgaagagacttagcagctcagattcttccagtgccctcatgacaatttgtccatcaacagaggaacatagtccgaggaacagccaacacatgtatggtagggagttccaatcgatgttggacggactcgacgaggaagggtgtgttgaagaaccggggtatcaatctgagaagaagcgtcgtctaagtgtggatcaagtgaaggctttggagaagaactttgaggttgaaaacaagcttgaacctgagaggaaggtgaagcttgcccaagaacttgggttgcaacctagacaggtagccgtatggttccaaaaccgtcgagccagatggaaaaccaaacaattggagagagattatggtgtactcaaagccaattatgatgctcttaagcttaactttgacaccctcgatcaggacaacgaagccttacgaaagcaggttaaggaattgaaatcgaggctgctgcaagaagagaacacaggaggaagcggtgtttcggtgaaggaagagataataacgaggcctgcagactcagaagacaaaacgatggaacaaagtaagagtgacccatcttctgaaacctcaaatattaatcctagttcggagtcggaggaggatcacttgaactacgagtgtttcaacaacaacgacgactgcgtcggaggaaccgccgcatcgctcttgcaagtggacttcaaagacggttcttccgacagcgacggatcaagcgcgattttgaacgaagacaacatgtactctcccttgaaattcaacaattgctccatatcaacctcgccgtcatcgtcttcgatgatgaactgttttcagttccagaaaccgtatcatcaccacgcgcagtacgtgaagatggaggagcacaatttcctcagcgcggatgaggcctgcaatttcttctcggatgaacaagcaccgacccttcaatggtactgtccagaacagtggagctgagaaaagaaacatggaaattaaaccgcttttagaaatttttgtttgaaggtagaaaatgaaatactgtgcaaaagaaaaagagagaacagagatcaatggctgcatggcgtggggtcggagatggaaggttgattattactactctcgaccgtgcggcagggggtaatattaataattattcaatcgtaaagcaaaccatgctgtaaaaacaaatttccattcaagtatggaataacggtgtagtacttttttaataaataaaaaaaacaacaacaacggtgtactacttttaggaaagagaaaacaaaaaaaaaaataattaaatcggttaaacaatatccccttcgcctcattgaactcaattttctagtatttatgatttgattattcttcggtgttcttctttttggaaaaaaaaaaaaaaaaaaaaaaaaaaaaaaaaaaaaaaggaaaa

SEQ ID NO: 27919 - DNA, 825 bp, Glycine max
  unsure (1)..(825): unsure at all n locations
  Clone ID: TF_GmC30_5
atttgtattggtttagaggaacatagtccgaggaacagccaacacatgtatggtagggagttccaatcgatgttggacggactcgacgaggaagggtgtgttgaagaaccggggtatcaatctgagaagaagcgtcgtctaagtgtggatcaagtgaaggctttggagaagaactttgaggttgaaaacaagcttgaacctgagaggaaggtgaagcttgcccaagaacttgggttgcaacctagacaggtagccgtatggttccaaaaccgtcgagccagatggaaaaccaaacaattggagagagattatggtgtactcaaagccaattatgatgctcttaagcttaactttgacaccctcgatcaggacaacgaagccttacgaaagcaggtagaataatactccttccaaaatataaacaaatttcgattatttatctgtcttattaatgatattttctccaaattatattttatttaataagataaaaaaaaaactatgtttaatataattaaaaaaaactatttatattttaattaaaaataatataatttattgaaattaattaatttttttaataagtatgaaatgtgtttgtttttcttataattaagatgggagagaatacataggagtataatatttatttcattttgagtctaattaattttaaattagaaaactacaggtaaattttgagtgagatagcanacttcatactaaatttgttnttttgtcctagaatttatgggtgtcttttttcaatcggatactaaatttgtcgagccttctgcttgaaattagtagtttttttctaattta

SEQ ID NO: 27920 - DNA, 1227 bp, Glycine max
  unsure (1)..(1227): unsure at all n locations
  Clone ID: TF_GmC30_6
nagaactactcatcactcactccaaacccaacaaaacaccattattcatatcccaattcccaaactttcactattccctctcattcactctctagctagtttcctcatcatcgtagaagaaccaatacttgtactctctcttactttttaaccatgtagaatgattcacctaaggaaaaattagtagcttcttgttgtgctttttattttgttttgttttgtgtagagataaatctgtttggtattgttttgtgttttatgaattatttgatgggtgaagaaggagaagtggtgagaaagcaaggacaaaggggtgttgaggaacatagtccgaggaacagccaacacatgtatggtagggagttccaatcgatgttggacggactcgacgaggaagggtgtgttgaagaaccggggtatcaatctgagaagaagcgtcgtctaagtgtggatcaagtgaaggctttggagaagaactttgaggttgaaaacaagcttgaacctgagaggaaggtgaagcttgcccaagaacttgggttgcaacctagacaggtagccgtatggttccaaaaccgtcgagccagatggaaaaccaaacaattggagagagattatggtgtactcaaagccaattatgatgctcttaagcttaactttgacaccctcgatcaggacaacgaagccttacgaaagcaggttaaggaattgaaatcgaggctgctgcaagaagagaacacaggaggaagcggtgtttcggtgaaggaagagataataacgaggcctgcagactcagaagacaaaacgatggaacaaagtaagagtgacccatcttctgaaacctcaaatattaatcctagttcggagtcggaggaggatcacttgaactacgagtgtttcaacaacaacgacgactgcgtcggaggaaccgccgcatcgctcttgcaagtggacttcaaagacggttcttccgacagcgacggatcaagcgcgattttgaacgaagacaacatgtactctcccttgaaattcaacaattgctccatatcaacctcgccgtcatcgtcttcgatgatgaactgttttcagttccagaaaccgtatcatcaccacgcgcagtacgtgaagatggaggagcacaatttcctcagcgcggatgaggcctgcaatttcttctcggatgaacaagcaccgacccttcaatggtactgtccagaacagtggagctga

SEQ ID NO: 27921 - DNA, 670 bp, Glycine max
  Clone ID: TF_GmC73539_1
ccacgcgtccgatatagggagggtgcacacaaacaagagtttattgagagagagagagagagagaagaagagggtggtgttgttgctgattcagtggagagaaagtggtggtgttgagagtgatcaagagagagagagagaaaagacaaaaaatggagtttggaagtggttctcctggtgatcaccatcatcaccatgatggttcttctgattcccagagaaggaagaagcgttaccaccgtcacacagctaaccagattcagaggcttgaatcgatgttcaaggagtgtccgcacccagatgagaagcagaggttgcagttgagtagggagttaggcttggcgcctagacagatcaaattttggttccagaacaggaggacccagatgaaggctcagcatgagagagctgataattgtgcactccgggcagagaatgacaagatacgttgtgagaacatagccataagggaagccttgaaaaatgttatctgcccctcttgtggtggtcctcctatgaatgatgattgttattttgatgaacagaagttgagattggagaatgcccaactcaaagaggagcttgatagagtatctagcattgcagctaagtacattggaaggccaatttctcaactcccacctgttgaggctattgacatatgttgtgt

SEQ ID NO: 27922 - DNA, 469 bp, Glycine max
  Clone ID: TF_GmC391285_1
ggctcgaggtttaggcggggcggcgagggtgctagacgtgaacctattccgggcggcgaccgcggaggatggcgacgacggcacgtcgttgtcgtcgtcgccaaacagcgcggtgtcaccgtttcagatggatttctgcaccaggaactgtaatgcagagttcggaggcagaaacaagagagagcagcaagaggctgagggtagagcgagtgatgacgatgaaaatggctccacgaggaagaaactcaggctctctaaggaacaatcagcttttcttgaagaaagtttcaaagaacacaccactctcaatcccaagcaaaaacttgctttggcaaaacagttaaatcttcgtcctcgtcaagtggaggtttgtgtttagaacagaagggccaggaccaagttgaagcaaacagaactgggttgtgagtatttgaagaaatgctgtgagaaccttaacagaagaagatta

SEQ ID NO: 27923 - DNA, 1842 bp, Glycine max
  Clone ID: TF_GmC4473_2
cgtaagctccacgcgcggctccaggcgtgcgctcacaaacagacacagagtgcgttcgttgacgacaaacacacacaaacacacaacaaaagctcgccggaaaatctttctccggcgacctggaattccgacgaaggtagttgcggctccttcgtcccgaaactgaggccctcaaagtataaactttggtggtggtgggtaggatctggcggtgtatgatgggatcttgcatatgcccgttggagactccggcgaggttgctttggaccacaagcttcttccgtcataagcttatgatcttctaataattaataattcacgcacacaaacaaacaaacaaacaaacaaaaaacacttcataacaacaacaacaacccttctgaaattctcaacacaagtttcaaaaaacagagtaaaagaaacagagcaaaaacacacacacaaaaacacaaacacagacaccttttaagtattaaggtgtctctttctctccccggaaagtttctccgtcggcggtggtgattgaccggagtgccatggagtctggacggattttctttggtgcctctgcttcaagcggcaacaacatgctctttctcggcaacactgaacttgcttttcgagggagatcgattatgagcatggaggaagcctcgaagaggcgacctttcttcacctcaccggatgaactgtatgatgaagagtattatgagaagcagtcgccggagaagaagcaccgcctcagttccgaacaggtccatctgttggagaagagctttgaggaagagaacaaattggagcctgagaggaagacccagttggctaagaagctgggattgcagcccaggcaggtggctgtgtggtttcagaaccgcagggctcgatggaagaccaagcaacttgaaagggattatgatgttctcaagtcttcatacgataccctactttcatcctatgattcaattatgaaggagaatgagaaactcaaatctgaggtggtatccttaaatgaaaagcttcaagttcaagctaaagaggtgcctgaggaaccattatgtgacaagaaagttgatccaattccagtagatgaagatatggctccgattttcggcacaagggtggaggaccacctgagtagtgggagtgttggaagtgcggtggtggatgagggtagtccacaggtggttgttgacagtgttgattcatacattctagctgacaactatggtggatgtgtgggcccggtcgagagggttcagtcggaggaggaggatgggagtgatgatgggaggagttacttggatgtgtttgtggtatctgaaactgagcaccaaaaccatgaggaaggagagacattgggttggtggactaatatgtattatgttggataaaatggtaatgcagcagtgctttcgaaattagatgcttaattaagaaaacgtaataatattgtataatgtatcatgtgggcgagggaggaaaaagtaaacgcctggattgggtggcttggacccctaggaggagttgaagtgtccttaacccgagtttaataaataaagtctagtagtaatttggtcaatggtgtcttgtgttggttaatggttgtactgccaaaattaaagtaagtatatttcttgttcaagtattaaaacatggttaattagtactatacaaaatttgagctgtatcttttttttttttgaatccaattttcgaaaaccattttgccaacttaatcaaaataaaatcgggggtaaggcccccaaaaaaggcaaagccctccccattgtcttgtaacccgtttcgaatagggcctattagcaaaaattattttccccccct

SEQ ID NO: 27924 - DNA, 1470 bp, Glycine max
  Clone ID: TF_GmC444_2
gggagaccctcttgtccctctctctcttctttcttctctcaccttttcctctctcaatttcctttcccttttgaaattatgatataagagaacaaaaactcccccttaaacagataaggtatatataagccacccttcagagcaatttgtccatcttcttcaatttattagcagaagatgtggtgcattagattaccttagtctttgtcctagtgtcttccacaacaacacgcgtccgcgtttccaaatattcacataagagaagaacaatagttctctccctagaaactcatgatatgctagataagccatccttaggagcaatatatccgtcctcttcaatttattagcagaaggtgtgttgcgtattagaccatagtctttttgtcattgttgtttcccaacaacgcagtttagcctttgagagcatcagcaatcacatggtgatcagaatatcattcagcaattgaagatcagtggcatcaggcataggctagcaagcaatgatatggctttcttcccagcaaatttcatgctacaaacacctcaccaagatgaccatcaacctccaccttcactcaactcaattataacttcatgtgcacctcaagagtaccatggtggaggagcatcctttcttggcaagagatctatgtcattttcagggattgagcttggagaagaagctaatgctgaggaagatttgtctgatgatggatcacaggcaggagagaagaaaaggaggcttaacatggaacaagtgaagacacttgagaagagctttgagttgggaaacaagcttgaacctgagaggaaaatgcagcttgcaagggctcttggcttgcaacctagacaaattgctatatggttccagaacagaagggctaggtggaagaccaagcagttggagaaagactatgatcttctcaaaagacaatatgaagctatcaagtcagataatgatgcacttcaagctcagaaccaaaaacttcaggctgaaatattggcactgaaaagcagagaaccaactgaatccatcaacctcaacaaagaaactgagggatccagcagcaatagaagtgagaacagctcagagatcaagttggatatctcaagaacaccagctattgacagtcctctatccactcagcagaacaacaacaacagaaccctctttccatcttctgctagaccaacaggagtggctcagcttttccaaaccactccaaggccagagattcagtgccaaaagattgatcacatggtcaaagaagagagcctaagcaacatgttctgtgccattgatgatcaatctggcctttggccttggttggagcagcaacatttcaattgatcatcatgcaaaaggagagtgtgagagtgagtgagagagtttcatattgcaatgtaatttttccttttccgaatgaaaatgaaatcatctagaggtgtctgtgtcaattgattacc

SEQ ID NO: 27925 - DNA, 1400 bp, Glycine max
  Clone ID: TF_GmC444_3
ctctctctctctttcctcccttccttccctctcaacttcattttcctttcaaatagtaacactagagaacaaaagctctggctagaacttgtaatgtatatgcaagccatcatcattcagaacaattagtgcatcatcctccttcaactgaagaactttatttaatttgctcctaaaatattttgtcagaggatgtggtgcagcataaaacctgcaatgagatggctttcttcccagcaaatttcatgctccaaacccctcaccatgatgatcaccatcatcatcaacctccaccttctctcacctcaattctaccaacgtgtgcacctcaagaatatcatgggggagtgaccattctaggaaagagatccatgtcattttcatcagggattgagcatggagaagaggccaataatgctgaggaagatttgtctgatgatggatcacaagcaggggagaagaagagaaggctcaacatggagcaagtgaagacacttgagaagagctttgagttggggaacaagcttgagccagagagaaaaatgcagcttgcaagagcacttggcttgcaaccaagacaaattgctatatggttccagaatagaagggccaggtggaagaccaagcagttggagaaagactatgatgttctcaaaagacagtatgaagctgtcaagtcagataatgatgcacttcaagctcagaaccaaaaacttcaggctgagatattggcactgaaaagtagagagccaactgaatccataaaccttaacaaagaaacagaaggatcctgcagcaatagaagtgagaacagctcagacatcaagttggatatctcaaggacaccagctattgacagtcctcattctacacatcagcaaagcagacccttctttcctccttcttctgctaggcctgcaggagttgctcagcttttccaaacttcttcaagaccagaccttccatcatgccaaaagattgaccaaatggtcaaagaagaaagcctaagcaacatgttttgtggcatggatgatcaatcggggttttggccatggttggagcagcaacatttcaattgaatattccaaaggaagagagagttattaattaatttaaaaaattggatgtagtaggttttctttttccctgtgaaatcaagagggtgtccatcaatttatcacaccatactttattatgatgagttcttaaattaaaaacccatgttttggaaacttggtgtataaaataggatatatatcaagtagaaattttctggcggcgcttgaaaattttcttgaaacttttgagtaatgctactatttggttcatgagttaattaatggggaatgagaagctgtcaagtcagattatgatgcacttcaagctcaggaccaaaaact

SEQ ID NO: 27926 - DNA, 830 bp, Glycine max
  Clone ID: TF_GmC444_4
cggccgctcgagccggcggccgggcgcctgctcgatctctctctctctctctctttcctcccttccttccctctcaacttcattttcctttcaaatagtaacactagagaacaaaagctctggctagaacttgtaatgtatatgcaagccatcatcattcagaacaattagtgcatcatcctccttcaactgaagaactttatttaatttgctcctaaaatattttgtcagaggatgtggtgcagtaatcctttgccattccttctttatttttaagcttacagcatctgcaatcatctcttattattacttcaaagtggcgatcacactatcattcattcagctgatcttgaagattttgtggcaggcataaaacctgcaatgagatggctttcttcccagcaaatttcatgctccaaacccctcaccatgatgatcaccatcatcatcaacctccaccttctctcacctcaattctaccaacgtgtgcacctcaagaatatcatgggggagtgaccattctaggaaagagatccatgtcattttcatcagggattgagcatggagaagaggccaataatgctgaggaagatttgtctgatgatggatcacaagcaggggagaagaagagaaggctcaacatggagcaagtgaagacacttgagaagagctttgagttggggaacaagcttgagccagagagaaaaatgcagcttgcaagagcacttggcttgcaaccaagacaaattgctatatggttccagaatagaagggccaggtggaagaccaagcagttggagaaagactatgatgttcccaaaagacagcat

SEQ ID NO: 27927 - DNA, 1585 bp, Glycine max
  Clone ID: TF_GmC3110_1
cggctcgaggctattttgaaccgcacgataccgaaaagctattttggccctgtgccaccaaagccatctcccccatttttgctcctctatctcttttttctaatcatcacaattgggtgagaaaaaaacacacacacaactcaacaatgggtgagaaagatgatggcttgggtttggggttgagtttgaagttaggatggggagaaaataatgataacaataataatcaacaacaacaccctttcaacgtgcacaagcctcctcaatcggttccaaaccaaagggtttccgtcaatagcttgttccattttcatgatcggagctccgagatgcggtcgttcttccgcggaatagacgtgaatttgccaccgcccccgccttcggcggctctggcggcgttcgatgacgagaacggggtgtcctcgccgaacagcacgatatcgagcatcaacgggaagcggagcgagagagagggaaacggagaggagaacgagagaacgtcgagttctcgcggcggcggcggaagcgacgacgatgaaggcggcgcgtgtggtggagacgccgacgccgatgcgtcgaggaagaagctgaggttgtctaaggaacaggccttggtgctggaagaaacagtcaaggaacacaatactctgaacccggagcaaaagcaagctttggcaaagcagttgaatttgatgcctaggcaggtggaggtgtggtttcaaaacagaagagcaaggaccaaattgaagcagactgaagtggattgtgaatatttgaagaggtgctgtgagaatctaactgaagagaataggaggcttcaaaaggaagtgcaagagctcagggcattgaagttatccccacagctttacatgcaaatgaaccctcccaccactctcacaatgtgcccttcatgtgagcgtgttgctgtctcatccgcatcctcttcctcatcggccaccatgccctctgccctgcctccagctaatctcaacccggtgggccctaccatccagcggccaatgcccgtcaacccttgggcagcaatgttgaatcagcaccgtggccggccataatcaaaccctccaggccgtaggtaatagggtaaagttcaggatggaagctaggacattttagttgtgctagacagaaatgaatcaaagaaataggaatcttatgtgttggttaactttactaggactttgagagctcatggtttgggaaattctatttgcatccttttttttttcattgcaccttccattctcttttacattgcagaaattagttttcggaatctacaatgcaattatagaaattaatttttgaaatgtaaaagaaaaggtagagattttgaagagttaaaaaaaaaggatgcaactagaatcatcctcatgcttttggttaactctttttgtctaggcttattttactttgagcatagatagaacatgtttttagtcaactttaggatgtgtaaagtttggacatgttaaagtagttagtgttttcatctgctgaacagtgtttgttatttgttaaccttggaaagttggaaaagggaattggaatctgtattttattttaa

SEQ ID NO: 27928 - DNA, 455 bp, Glycine max
  Clone ID: TF_jC-gmle01810092g05a1
agctgatctaatttgcattggtttagatgaacatagtccgaggaacagcctccatatgtgtggcatggagttcctatctatgttggacggacttgacgaggaacggtgcggtgactaaccgcggcattattctgtcaagaggcttcgactaactgtgctacaagtgtacgctatgtagaagaactttgactgagataacacgcttgcacctgagacgaaagtgaagcttgcccaagaacttgggttgccacctacaccagtagccatttggatccaaaacctccgaacccgatggagaaccatactgttggagagagattatggagacctcatagccaatgatgacgctcttaagcttaactacggcactctcaatgaggacaacctaatcttattatagcacgtagaataatcatacaacatagtataatatgtagaatagttgattatgagtc

SEQ ID NO: 27929 - DNA, 571 bp, Glycine max
  unsure (1)..(571): unsure at all n locations
  Clone ID: TF_jC-gmro02910022c12d1
ccacgcgtccggcaacgacgacgacgacggcgctcaggactcaggtgctttcggttcaggcggaggagggcatggagcgcggcgactgccagttcacggtggtgccgccgcggcagtacgacgaggcccagttcatgcaccagctgatggtggccggcgaccagcaggaccccgcgggcgcggggcggggagctgccgccgccggcggggagaggaagcggcggttcacggaggagcaggtgcggtcgctggagacgacgttccacgcgcggcgcgccaagctggagccccgggagaaggcggagctggcgcgggagcttggcctgcagccgcgccaggtggccatctggttccagaataagcgtgcgcggtggcgctccaagcagctggagcatgactacgccgcgctccgggctcagttcgacgcgatgcacgcccgcgtcgagtcgctcaggcaggagaagatcgcgctcgccgcgcaggtagacgagctgcgngggaggctgaacgagcggcaagaccagagcggcagctgcgaggtcaacgacgcggaggcggctgcggacgacaa

SEQ ID NO: 27930 - DNA, 1594 bp, Glycine max
  Clone ID: TF_GmC1705_3
ttaagagggaatctctctctttatttctttcactctctcagaaccaaaattttccaaactcctcaactctcatcagatatcaaccatctctctctctccaaactcaaatacctttctgttctgctcttcaatttattcatctctgacaccctcttaattctgcttccagttcctctgagtgatgggtatgatctctcctcactcccacaattcccacattatagtaatcctcatcacctgcttctttcgtcataaattctagatcaaactccactccctgatcctcccttttacttcttatgtagcatgtatgaactcaaatcatcaaatgaatatgaccctttaatctaagaagaagaaaaaaacacacacatacacacacacactttaaagtccaaagtctaaaccaacccaccaaaagtcttgttcccatggcgagtggcaagctttatgcgggttcaaacatgtcacttctcctccaaaacgaaaggctcccttgctcctctgaagtccttgagtctctttgggctcagacctctaaccctgcttccttccaaggttcaaaacccgtggttgattttgagaatgtaagtgggagcaggatgacggataggcctttctttcaagcgttggagaaggaagagaactgtgatgaggattacgaggggtgtttccaccaaccggggaagaaaaggaggctcacaagcgaacaagttcagttccttgaaaggaactttgaggtagagaacaagcttgaacccgaaaggaaagtccaacttgcaaaagagcttggcttgcagccaaggcaagttgctatatggttccaaaaccgaagggcaaggttcaagaccaagcagctagaaaaagactatggcgtgttgaaagctagttatgacagactcaaaagtgactatgaaagtcttgttcaagagaatgacaagttaaaagcagaggtgaattctctggagagcaaattgattcttagagataaagagaaggaggagaattcggatgacaagtcatctcctgatgatgctgtcaattcttcttcaccccacaacaacaaggagcctatggatttattaattatttcaaaaaatgcaacaacaacaacaacatctgaaaatgggaccaaagtgttgtcaccactcccactccctattatggtaacatgctgcaagcaagaagatgccaactcagccaaaagtgatgtccttgattcggatagcccacattgcacttcattcgtggagcctgctgattcctctcatgcctttgaaccagaagaccactcagaagacttctcccaagatgaagaggataaccttagtgaaaaccttttgatgaccttcccttcttcttgttgcttacctaaggttgaagaacactgctatgacggccctcctgaaaactcttgtaattttggcttccaggttgaggatcaaaccttctgtttctggccctattgaaccaaaccaaccaaccaaccgctagcaatgttttaaaaaactttgcagttgtaaccatgtactagaaagcaataaaaatggtattgttacttctaaaaaaaaaaaaaaaaaaaaaaaaaaaaaaa

SEQ ID NO: 27931 - DNA, 1740 bp, Glycine max
  Clone ID: TF_GmC1520_1
ggctcgagatcatccccgtattataaacccaggattgcctcttcttccaggaaccccctcaacaaaaggaaactctcattcaccttcttctctctccctcactccctctctttcttaatacaccaccttcccaaccctcttccattctccttctccaactccaacccctgcttcccttttttcattttctcactccccatcttctgagagtgatgggtgtttgctaccgctgttcccacacctcccacatcaccgccatcatcatcaccagcttcttccgccacaagccttagaattatactattcccaccctccctctttcttcaacaacaaccgttgacttcactacagtcacgtggtctttctctgaggatccaaccatggcggctggaactgtcttctgcgctgctgctactgctgcttctaatttgacaacaaccacttttcttcacaaccaaacacctccttccacctcctctcagcctcctctcgattctcttttcctctctgcctcttcccctttcctcggttcaagatctatagtgagttttggagatgttcaaggagggaaggggtgcaatgattcattcttccgcccctatgatgagaatggggatgaggacatggacgagtacttccaccagcctgagaagaagcgcaggctctccgtggagcaagtgaagtttcttgagaagagctttgatgaggagaacaagctcgagcccgagaggaagatttggctagccaaggaactcggcttgcagcctaggcaggtggcgatttggtttcagaaccgccgcgcgcgctggaagaccaagcagatggaaaaggactatgattccctgcaggctagttacaatgatctcaaggctaactatgacaaccttctcagggaaaaggataaactcaaagctgaggtggcaaggctcactgagaaggtgcttggaagagagaaaaatgagagtcacttggaacaggctgaaaccaacggattgcaggagccgctgcacaagtctttggttgattcagcttctgagggtgaagggtccaaagtgacctttgaggcttgtaaacaggaggacattagctcagccaagagtgacatatttgattcatcagaaagcccacaatacactgatggagttcactctgcacttctagagactggtgattcttcttatgtgttcgaacctgatcgatctgatgtgtctcaggatgaagaagataacttgagcaagacccttctgcctcattacatttttcccaagcttgaagatgttgattactccgacccacctcatggttcatgtaattttggaattccggaggaagatcaagccatttggtcttggccttactgaattttctctatagcatatagagcatgtctctaccttctactctcaagttcttctgtttaaacttgagatcatgtggtagaaaagggtgagttaataataagccaaagaaaaaatggcactctactggtttgttcccaatggtggtttcttgccagctttttttttttttttttttactttgcaatgtaacttttggttcaaatgtaaataaataatatcttcttgttgaggatgtagctctgaatatcacttcaaggatgaatttacatagcaaattagatgagaaaaatgggaagataaaaaaaggttatgttttcaaaaaaaaaaaaaaaaaaaaaaaaaaaaaaaaaaaaaaaaaaaaaaaaaaaaaaaaaaaatt

SEQ ID NO: 27932 - DNA, 1896 bp, Glycine max
  Clone ID: TF_GmC952_1
gaattcggccgagatcaaaacaagaacttgttcacccttccccttctccttacttctcactctctttccaaaacactccctttctctttccccttacccttcttctgtgtgtgatgatgtagatagagaataaaaagagaccagtgtgcagtgagaaagaggttggtcacttcttgtgtggctttgttttgttctttgtgttggaatttgttgatgggtgaagagggagaagaggtgtcaagagataaggaacagcaacacatgggagtttatggaaatgagtggttgtttagtagtttctgtgcaaattggcgccgtttaagacaccagaattcctgttctatgcctccttttgagtgaaaaaaaaaaaagcatcaaaacaaaaacttgttctctctcagcttttcatcttccgatcttaatatacattgactaaaagaaaaataaaaagggatcaaatttaagttccttgatctaattaaagatccttgcttttaattgtatactcatgaagagacttggcagttcggatacactgggtgctctcatgacgatttgtccaccaacagacgaacacagtccgaggaacaaccacgcgtatgggagggagtttcagtccatgctggaaggactcgacgaagaagggtgcgtggaagaaccagggcaccactctgagaagaaacgacgactaagcgtggatcaggtgaaggctttggagaagaacttcgaagtagagaacaaactcgaacctgaccgaaagttgaagctggcacaagaacttggcttgcaaccaagacaagttgcggtttggttccaaaaccgccgtgccagatggaagacaaagcaattggaaagagattacggcgtcctcaaagccaattatgaatcacttaaacttaactacgacaccctccaacaagacgacgaagccttactcaaagagataaaggaattgaaatcgaggctggtgcaagaagagaacaacaacaacactgaaagcgatgtttcggtgaaggaagagatgctaaccaccacgctctgtgaaaccgccattcctggatcggacacgaaggagttgagttacgagtgttttaacaagagtgatgaggtgggagggggttcttctgtgttccatgtggatttcaaagatggctcttctgatagtgactcaagcgcgatcttgaacgaggagaacaacaaccacagccccaacaataacgcggcgatttcgtcgtgtggggttctgcaaagtcacgggcttttgtcgtcgccttcttcttcgtcgatgaacaactgtttccagttccagaaacagtaccagacgacgacgcagtacgtgaagatggaggagcacaattttctcagcgccgacgaggcctgcaatttcttctcggacgaacaagcaccaactctgcagtggtactgttcagaggaatggagttaagagggaagaagaagaagcttaattaattgagagcgagggagggaatagaaagaataaggcattttgcagggtgtatagtaatgggatggagagagaaacattgtaaaaatgaaatggtcaaggattgaagaagagagggaaattgaagagcttgagagagaggggatggggttgaagcacgcatggcgtggggtcggagatgagaggttgatgacgataaaaaaaaaggggggtaataataatcatcaacatccgtgcggggaaaggggagtaatttatgaataataataatgattaggtcgtaatgaagtgaaatctatctagtgagtaatgctgtaaaaaatccacaattcacctctgcttccacctttctttctagctctcaccagttttatcggcttttgtatttctatatctagattaatttcttttataaaaaatctggaattaat

SEQ ID NO: 27933 - DNA, 1975 bp, Glycine max
  unsure (1)..(1975): unsure at all n locations
  Clone ID: TF_GmC952_2
ccttggtttatttaaagacacaaactcttgttcacccctgggcgtccgcttgttcacccttcttccctttctcacttaccactctcccccttctttccaaaacactccctttccctttctattcacttcccctacccttccgtgatgatgtagatagagaataaaaagagaccagtgtgcagtgagaaagagattgctcacttcttgtgtgggtttgttttgttctttgtgttggaatttgttcatgggtgaagaaggagaagaggtgtcaagagagaaggaacaatacatgggagtttatggaaatgagtggttgtattgtggttgctctgcaaattggcgccgtttaagacaccagaattcctgttccatgccttttttcaagtgaaaaaaaaaaacaattacttgttatctctcagcttttcttcttgagatcttaatatacattgacttaaaaaaaaaaaaaaaagggatcaaatttaagttccttgatcttaataaagttccgtgcttttgtttgtactcatgaagagacttggcagttctgattctctgggtgctctcatgacgatttgtccaccaacagacgaacacagtccgaggaacaaccacgcgtatgggagggagtttcagtccatgctggaaggactcgacgaagaagggtgcgtggaagaaccagggcaccactctgagaagaaacgacgactaagcgtggatcaggtgaaggctttggagaagaacttcgaagtagagaacaaactcgaacctgaccgaaagttgaagctggcacaagaacttggcttgcaaccaagacaagttgcggtttggttccaaaaccgtcgtgccagatggaagacaaagcaattggaaagagattacggcgtcctcaaagccaattatgaatcacttaaacttaactacgacaccctccaacaagaccacgaagccttactcaaagagataaaggaattgaaatcgaggctggtgcaagaagagaacaacaacaacactgaaagcgatgtttcggtgaaggaagagatgctgaccaccacgctctgtgaaaccgccattcctggatcggacacgaaggagttgagttacgagtgttttaacaagagtgatgaggtgggagggggttcttctgtgttccatgtggatttcaaagatggctcttctgatagtgactcaagcgcgatcttgaacgaggagaacaacaaccacagccccaacaataacgcggcgatttcgtcgtgtggggttctgcaaagtcacgggcttttgttgtcgccttcttcgtcgtcgatgaacaactgtttccagttccagaaacagtaccagacgacgacgacgcagtacgtaaagatggaggagcacaattttcttagcgccgacgaggcctgcaatttcttctcggatgaacaagcaccaactctgcagtggtactgttcagaggaatggagttaagaggaagaagcttaatgaggtttaattaattgagagcgagggagggcattttgcagggtgtatagtaatgggattgagagagaaactttgtaaaaatgaaatgctgaagattgaagaagagagggaatgaattgaagagcttgagagagagagaggggagggggttgaagcacacgcatggcttggggtcagagatgagaggttgatgacgataaaaaggggtaataataatactaataatcatcaatctctcggccgtgcgggggtaatttatgaataataatgatgattaggtcctaatgaaatctatctatctagtgagtaatgctgtaaaaatcagtccacaattcacctctgcttccactccttcctctcccaccacttttatcggcttttgtaattttatccagactttaactagattaatttgtcctttttttatttatcaaaatccccaattcataagtttttaagattaaaactaaatttctgtaaaaaaaatnnnntttat

SEQ ID NO: 27934 - DNA, 893 bp, Glycine max
  unsure (1)..(893): unsure at all n locations
  Clone ID: TF_GmC1502_2
ccacgcgtccgctttccaccttcaccataagctcctttctctgttcctaagaggagttatgggggcaaattgaaaacgcattcaattacaacaaacacgttttttttttgttaatgttgttgcattctcttttccttttgccgtaaacgggggccctcgcttttctcataagccactgaaaaattttgctcctttcgcccctaaactttaacagaggtcgttgttcaccgcaattcctcaccccaatggaagaatcaagtgaattgcaatcagaagaaaataaagtctccaatgagaaaaataagaaaagaaagctgaaaacaccggcgcagcttaaagccttggaggatttttataatgagcacaaataccccacggaggaaatgaaattagtacttgctgaggagttaggattgacagaaaagcaaatatctggatggttttgccacagaaggttaaaagataaaagattgatgaaagatgaagccgttgctaatgggagacaagatcgttcaagtggtgtcatccaagatcgtggcagtggacttgggcaagattcatgcggaagcagtaagcatgctgatcacaggtatctggatccgaaggaggttgagagccatggcctctacaatcacgaattgtcagttgcagatatgacccacagacgtaggaaccattatcctgaaaatgttagtggggtggatgacacatcatctgagagcagctcatttttgcaagaaaggttttctcaaggtcaggatccgtatgatatggagccttctagacatcttacacctaatggagctcttccacccctaaatcccaaaggtgcagttaagatggggcacaaaccatcangatatttgaaagtgaagggcgagatagagcatgct

SEQ ID NO: 27935 - DNA, 923 bp, Glycine max
  Clone ID: TF_GmC30_10
cttgtactctctcttactttttaaccatgtagaatgattcaccgaaggaaaaattagtagcttcttgttgtgctttttattttgttttgttttgtgtagagataaatctgtttggtattgttttgtgttttatgaattatttgatgggtgaagagggagaagaagtggtgagaaagcaaggacaaaggggtgttgatggagataaatggtacttgtatagctgcttacaagactgtaaatattggtgctgtaatttaatacacgagactagcagttctttttcgatggttccttttgagtgaaaaaaaccttgtcttctcatcagctttctttggagagatcttaaagacgacattgactgctaacaacaataaactggatcaatcattaaaggcttacttcttcttcttcttcttcttcttcttcttctaacaacaataagatcccatctttcccactcatgaagagacttaacagctcagattcttccactgccctcatgacaatttttccatcatcatcaacagaggaacatagtccgaggaacagccaccacatgtatggcagggagttccgatcgatgttggacggactcgacgaggaagggtgtgttgaagaaccggggcatcaatctgagaagaagcgtcgactaagtgtggaacaagtgaaggctttggagaagaactttgaggttgaaaacaagcttgaacctgagaggaaggtcaagcttgcccaagaacttgggttgcaacctagacaagtagccgtttggttccaaaaccgccgagccagatggaaaaccaaacaattggagagagattatggtgtcctcaaagccaattatgatgctcttaagcttaactttggcaccctcaatcaggacaacgaagccttacgaaagcagataaaggaattgaaatcga

SEQ ID NO: 27936 - DNA, 665 bp, Glycine max
  Clone ID: TF_GmC75260_1
aattcggctcgaggaatttcaattcaacaattaaaaacaaaaaaaaaaacaaaaattgatttccctgttcaatcagaaggtaaaaacaaaaccaaatgtgaaagctgattggaggaagaagcaaatgaaataaaaaagagagagaaattgttcttctgtctctattggctttcaactttccccagaagttactttctctctttcttttctctatgacgaattaagtgtcaaattgaatgaatcacacagacccacatgttaattttgcattttctcttggtttgggtcaaatgggtctcatttttctgagaacccagtgaaaacgcttgcacctttgactccaaaagctgcagagtagagggagattcatcacaattcctcacaaccatggaagaagcaactgagttccactctgaagaaaataaattgtctatggagaaaaataagaaaagaaggctcaaaacaccggcccagcttaagggcttggaagatttttataatgataacaaatatcccacggaggaaatgaaatcagaacttgccgatgagttagagttgacagaaaagcaaatatctggatggttttgccacagaagattgaaagataaaaaaatgttgaatgatgaagtatgtgctaatggacgacatgatcgttcaagtggtgt

SEQ ID NO: 27937 - DNA, 683 bp, Glycine max
  Clone ID: TF_GmC451723_1
ttcttgcgtccgcttaaatccaccacttcctgcgtcactttctctcttccccctggcctctctgccatttttgatccttcataaacacaccattcttcatttccttcatcaatgggcgccgacatgtccaacaataataatcctcctcccacttctcacgccaaagacttgtttgcttctccagctctctctctcagcctcgctggcatttttcgccatgctggggtggccgcggctgatgaggctgccacttctgtggaggagggcgccggagggagtggaggagctgctgataggttagaggagattagcagcgagaactccggccccacgagatccagatcagaggatgacttgtcaggaggagaagctgatcctgaagatgatgacgatgcccatggagacagcgaggacaagaagacgaagaagaagaagaagaagtatcacaggcacactgctgaacagatcagagaaatggaagcgcttttcaagagtcaccgcatcctgatgaaaagcagaggcaacaactcagcaaccaacttggccttgctccaaggctagttaagttttggttccaaaatcgtcgaacccaaatcaaggcaatacaagagcgccatgaatattcattggtgaagacagaattagacagacttagggaggaaaataaggccatgagagagacc

SEQ ID NO: 27938 - DNA, 1435 bp, Glycine max
  Clone ID: TF_GmC1235_1
aattatcaagcacaaattaataatatccgttcttgtggaacgataaagctttagttgtgcaaatattaaacaattgaggtaattaattaacacctacaatcatttgctggttggtgtctaattagaaaggcttattaatattgaatttgtgtggttcacaagtttgataaattcataagataataacatgactttgtggtatattaagattttggggagtgtgttgcacaccatatatcattcccaactgggctcgagcacacgtacatctatctctcccccccaaacccaccgttttattctctcaaatgggtcttgatcaggatgccaatagctcaggccttcacctcgttctagggctttctttgactgctagtgttaaggaaaccactcaatccaccaagcctgatgatgatcatcatctttgtgttatcaagccaactccaacgaaaccttatccttccaatgaaccgtctttgacgttggggctgtccggtaagggttaccacgtgcccaatcacgttgccatcaacaaggtttattgtgaggaccctcttgagttctctagacagacatcacctcacagtgttgtttcgtctttctcaactgggagggtcatcaagagggagagagatcttagctgtgaagacatggaggtagaggcagaagagagggtttcttcaagagtgagtgatgaagacgaagatggaaccaatgctagaaagaagctcagactcaccaaagaacaatctgcactgctagaagagagcttcaaacaacacagcactctcaaccccaaacagaagcaagctttagccagacggttaaatctccggcctcgacaagttgaagtgtggttccagaatcggagagccagaacaaagctgaagcaaacggaggtggactgtgagttcttaaagaaatgctgtgaaacattgaaggacgaaaacaggaggttaaagaaggagctgcaagagctgaaggcactgaaactagctcaacccttgtacatgcctatgcctgctgccacactcaccatgtgcccttcttgcgacaggctcggtggcgttaacgataacggttcgaataaaagccccttctccatggctcccaagcctcacttctataaccccttcgccaatccttcagcagcatgttgattattgtggttaggttttcactattcattcggggcgaagaggttaaaaaggcaagagttatttcccacaaccattgtatttttttggttgagggcgatgcgtctagctagctagggaaaattaagctgtaattagctaatactgttgagaatagtaactgctgattgaaattatcttttgcttttttcttcatctattgtatgtttatataaaccgttacagaaggtgttcatctatgaaggaattagaattttttttcttttgtcgttcaaaaa

SEQ ID NO: 27939 - DNA, 1305 bp, Glycine max
  Clone ID: TF_GmC66552_1
atatttccaaccgcaccatcatttttttcatctatatatataatatctattcacaacatattgcaagtttcaggtagcaaaccccttcaacatttttcaccctcagaattcatatcatgagttttcatgatacatcaaacacagggcttggacttggtcttggtcttggtcttgttagcttccatgatcaatcagggaattgcatgaagagtacaaataatgatcccatgagagaaagccataagatcaaaaaagtggagaatccatcatcaaaatgtaacaacacatacccttcacttacattaggaccaccagatgatgatgatggtgatgatgatgatgaagtgaataataataatcaaccaagttcaaagactgagtcctatgaatattttcgtccccaagtttcttctcctagtgcggtgtcttcattttccaactcttctagcatcaagagggaaagagatcaggtcttgggaggagaagaatttgaggtagtggtagagaaagttccaacaagggttgttggtgatgttgatgaggatggtaaccccagaaagaaacttagactcacaaagaacaagcagcagtcttggaggaaaatttcagagagcattctactctcaatccgaagcaaaagcaagaattggcaatgaaactgaatctgcgagcaagacaagtagaggtgtggtttcagaataggagagccaggacaaaactaaagcaaaccgagtcagattgtgaactactcaagaagtgctgtgatactctaacagtagaaaataagaagctgcaaaaggagctgcaagaactaaagtcaatgcaagcaacgccagtgcctctttatatgcagattccagcagccacactttccatatgcccttcttgtgagagaatctgcggtggcaacgaaaacaacggtgacaacaacaacaatggctcttcacacacgacaacgttgctcattggctcaaagacgcatcatcattccttttacaaaagtaacaactatccattccctcattcatcatccgcggcatgctagatatatatacatatatatatagttccgagctaatatatatatgtaattaaagataggtgattagtgattattactattagagatcaatcccccatgcaccacatgctttcttatatatatgtatacttcataaatggaaagatcaattcatagagatttttctaatttgttgtaatttattttatatgtaatatatttatggtctatgcgtacattacatatgaataacaatgcagggttatcacatagttcaatcaaaa

SEQ ID NO: 27940 - DNA, 590 bp, Glycine max
  unsure (1)..(590): unsure at all n locations
  Clone ID: TF_LIB4167-033-R1-K1-F6
cacgcgtccggtgtgttgtgtaactgangaactctaagtgaactagataccaaaaacactctcatacaacctcctcatacattgctccttctgttacgcaagtgaagtgtagttttgggaagcaagaatgtatggggattgccaagttatgtcaagtatgggagggaacgtagtagtaaactcagacactctcttctcctcctcgatccagaactctagcttcaacttcatccccaccatgccctttcaaccttttccttccatgaaagaagaagatgggatcttgcgagggaaggaagagatggaaagtggatcaggaagtgaacaattagttgaagacaaatcagggtatgaacaagagagtcatgaagaacccacaaagaagaaacgttatcacaggcacactgctcgccagatccaagaaatggaatctttgttcaaggaatgcccacaccctgatgataagcagaggctgaaactgagccatgaattgngtcttaaaccgcgccaggtcaagttctggttccagaaccgtcgaacccagatgaaggcacaacaagaccgggcagataatatgatacttagagctg

SEQ ID NO: 27941 - DNA, 1289 bp, Glycine max
  Clone ID: TF_GmC1019_1
cctcgtgggtttcggacaagaatatccctcaagacattggaataagacaaaccctatccttggtctgttccttcattcttattgtctccccgcatcgtacgccgccgacacagcttcgaatcgctgccaagtgctaacaaacgcctctgagtctctgacaccaacgcaactctctctgctcacatttttgaaggagatggtgaacgtgatggagtggcagaagcagcgttggcaaccgaatgggaacgcggaaatgatgtacgtgaaagtgatgaccgacgaacagctcgagactctgcgcaaacagattgcagtttacgcaaccatctgtgaacaactcatcgaaatgcacaaaaacatctcctcgcaccaagatcttgcagggattaggctggggaatatgtattgtgatccattgttggggtctggtgggcacaaaatagcttcaaggcagcggtggactccgtccgctatgcagcttcagattcttgagcgaatatttgatcaagggactggaacccccaccaaggaaaagatcaaggagatcactaatgagctcagccagcatggccagatttctgagaccaatgtgtataattggttccagaacaggcgtgctcgctccaaaagaaagcagcagaatgtggcacctagtgctaatgctgaatcggaagtggagactgaggttgattctaaggataagaagacaaagccggacgaatttcagtcccctcctagcgtttctgctgtgcctgctgatgataatttaggcttccagaaccatggcagtttgcagtacttgaatccagagtccaacaaaccagattctgtgttcccatctgatgcaagtttaagatctacaagaaatttcaatcatgtgcctgtttttgatgggctgctatcgaactcaacgagtgactatcttactggaaaaatggaagcacctgagaactacgacttataccagccagcaggcgacttcaacatggcaggttgacgtccaatgtaatttctgaagactgtgattagctgtaaagaattgctggtgtggttttgggcttgtgttgatgtgaaaagttgaaccaattgaagcatgaaacttatagtttatagtatatagataaaatgatcttttataatggtaggcggacattttacttgataattgaatataattatgagttaatattgatattgtgaagttggattttaaaaaaaatggtgaaccgtaagcgtcttccaccattggcttggctttggtatttggttaaaagagaaatggtaagaat

SEQ ID NO: 27942 - DNA, 2349 bp, Glycine max
  Clone ID: TF_GM240G09rgnA1.C1.o4.ma
atgtatccttcaaacttgggtggttcaggtcgtggtaatcgtctcaatcatgctacggtatctaaactcgaagcaatcttcagggaatgcccatatccgaatgaaaatcgacgccgtcaaataagtgaggagctagagcttagtctaaatcaagtcaaattttggtttcaaaataggaagactaaactaaaggtagtctattattttctttatgatgcttcatttttaaggacaattatttatacactagttttgtgtaattttcaggctataagtgagcgaatagataacaatgctcttcggcgtgagaatgaaaacatacaatcagaaaacctattaatgagagagtctctgcagaatgcattctgcttatcttgtgggggtctacccgtgggatcagtagagcgaaaacttcaattgcaatcattaaaggcaaaaaatattcaattagctaaagaggcaagaggaagattgctaaacccaatagttggacttccttctccttatcaacatagtcatgttcttagtactcctggtttcaatcaagatattcctgctccagctcctgctcttgattgctatattcctgatcctcctagtgatgatgttgcacttgattattgtattcctactcctgctagtgttcttgcggttgatcactctattccagctcttgctagtgatccttggcttggtcaagatattcctcatcttcccactcttgccacattggatcaagatattccacctcttggtcaagatacttctacccttcctcaggatcatatgcccaaggatcttgatcaagaattggatgcattgcgcggaattttgaacaatgatttgatattccaatctatcattaaccaaaggatagacctggacaatgcaatgatgtcacaaattgcaaataatgcaatcgaagagttaattaagcttttggatatgaaccaacccttctggtctatacatgactggaagttagttcttaaacgtgataattaccaaagcatacttggtaggagacattgcttacctggacctcatgcacggatagaatcctcaaaagattcacgaatagtggacatgaatgcggaacaacttgttcaaatgtttatgaatttggaaaaatgggttgatctgttcccaacaattgttacaaaagcccaaacaattcaagtactcgaaaacggtttggtaggaaatcgaagtggagctttgttgttgattaatgcagaaatgcacattctttcacatttggttccaactcgacaattctacttccttcgttattgtaaacaaattaaagaaggtgtgtgggtgataggggatgtgtcaattgattccttagaatacaaaaccattgttcctcgcatttggaggcgtccatctggatgcctcattcaagaaatgaatcacggattgtgcaaggtttcttgggtggagcacgtggaagtggatgataagatgcaaactcaccagcttttcactgatgttatttgttgcaataatgcatatggagcagaaagatggctttcgacacttaaaagaatgtgtgagagatttgcatgcgcttcagctgaaactatacccagttgtgacgagtctggagaagccattttatcacttgaaggaaagaagagtgtgatgcacttggctcatcgaatggttaagactttttgccgcactttagacgtgtcagattgtgagaacttcccatatttaacgaggatgatgaataatggtgaggttacaataattgttcgcaagaataactcagaacaagatgtgccacaaggcttgattctcagtgctgctacctcttttctacttccgcactctccagaaaatgtttttgacttcttgatagacaacaagaaacgagctaagtgggaacctttttggtatggaaagccagggcacgagattcaacgcatctcaactggaaataatccaggaaatttcatttcaattacgaaggctcttggccccagtgataacaatatgatagttcttcaagaaagttatgcagatggtttgggatctatgatggtatactcagcttttgatacggagacaatgaattttgccatgaggggagaagacacgtcacagttgttggttcttccctctggctttaccatatctggggatggtcattcaaatgcttttgaaggacaatctagacaagtggtgtcaaaaggttcattggttactctaatgttacaagttctagcttctagtactcctagcatggacatgatagacatggaatttgtaggttctgtcactacacttgtgtcctcaacagtggagaaaattaaagctgctttgaattgttccaattaa

SEQ ID NO: 27943 - DNA, 1819 bp, Glycine max
  Clone ID: TF_GmC3892_1
caatgaagaaagttcaagctctgatttcacatctgattccgaggatcaagagaatggatttggggataacacatcccctttccagaatgagatcacccatactagctttaaaaaggcgaataagctaagaatatctatggatgatgaactgtcatctttactagagccagattctcagcaacggagtgccacagcctgttaaggagattgacatggcgaaggcggaaactactcgaagcagattgaagatacggggatcagtgatactagtgatgatgaagattggaatgacgcagctgctccaagtagaaaaaagaaactcactggcaatgtgactccagtgtcaccaaatgcaaatgcttcaaataattctatacatactcttaagagaaatgctcatcagaataaagttgaaaatacaaatagttcacccactaaatcccttgatggccgttcgaaatctggttccagggataaaaggtctggatcttcagcacacaaaagactaggagaagccgtagttcagagacttcacaaatcttttaaagaaaatcagtatccagatagaagcacaaaagaaagcctggcacaagaacttggacttacttatcagcaggttgccaaatggttcgacaatacacgttggagcttccggcattcatcacaaatggaaaccaattctggtagaaatgcttcaccggaaggtaccgaaggcagggctgaaaagggatgatgaagattggaatgacactgctgctccaagtggaaaaaagaaactcactggcaatgtaactcctgtgtcaccaaatggaaatgcttcaaataattctatacatactcctaagaggaatgctcatcagaataatgttgaaaatacaaataattcacccactaaatcacttgagggctgttcgaaatctggttccagggataaaaagtctggatcttcagcacacaaaagactaggagaagccgtagttcagagacttcacaaatcttttaaagaaaatcagtatccagatagaaccacaaaagaaagcttggcacaagaacttggacttacttatcagcaggttgccaaatggtttggcaatacacgttggagcttccggcattcatcacaaatggaaaccaattcaggtataaatgcttcacagcaagttactgatggcagagctgaaaatgagggggagaaggaatgtgaattaatatctctggagttcagtggagaaaaatcaaaaaccccaaactctagaaaaaggaagcatttgtcagaacccctatctgaagcacagctggatatcaatggctcagcagcaagttcaccaaatgttcatctaacgcaaataggcaataaaatgaagacaaggaaaaggaaatgatgcttagttgagaagtcgggtttaaccttttcctaaggcttcaaattgcagtatccatccttttgtgagattgagatcccatgagatgatcagctcagatctcgatggatttgtttccatttaggaagggaaccctagtaaatattgcagcttatgtgtttgactgttcacaatgtatggatatggctctcatcttgcattgatcgtgtgtggttcgacattcaaggtgggttgttttcgggaatcatgaagctgctacgttggtcaattgttggcaatccccatttcctttaaacaaaaatttgtcatggatctgtgatttgagtaatagagtggggggatgggagcatcatatattccaattgctgcatgcacattgcttaacttaataacctattattattgtgaggaatggaagtaaaataacacattgaggg

SEQ ID NO: 27944 - DNA, 681 bp, Glycine max
  Clone ID: TF_GmC617300_1
gagagagagagagagtggatgaaatgttagagagagaaactctgaattcacgcgtccagctaccccttttggctctgattttgctttccgtgttcttcgagggtttttggtttctgggttgtttctgattttggggttttgggtttctctggaacaaaaatagttcaattttgttgttggggttttgtgagtaaaaagcttgatatttgtgtatggagggtgtttctgaaggagagaagaagaaggagccagtggaaggagagaataagagcaagcgcaaaatgaagacggcttcacagttggaagttctggaaaaagcctatgctgcggaggcttacccttcggaggctttgcgggctgagctatccgtgaagctgagtctgtctgatcgtcaattgcagatgtggttctgtcaccggagactgaaggaccgaaatgccaagaagctgcaaaatgattcatcccttgcgggggctccggcggtgggtgaggagggtgttgagcaagtgacaggggctgatgttgggcgtgattgtggtttagcttctgggccattcaatcatctggattcgcggaaaattgcgcctcggcctgggatgacggcctttcctagtatgggagctggattgccagcagtggtgggcagcagttactatgaaccacctcagaacatggatgtgc

SEQ ID NO: 27945 - DNA, 3124 bp, Glycine max
  Clone ID: TF_GmC6526_1
ctcttataagcaaccccatctctctgtcccaatcccaacataccccccactggtccttttccattctttatacagacacacacaataaagaaaaagaaaaactacgttttcctttcactattctttttcaccctctccctctctcccatatatgatccaatatattgctataatacaatagaaccaacaactgtgacagacaaactctgagtagtacctcttttattctcctcctccttctctttcattctcaaaccactctgccatagtcttttctttcacctcttaatgaaacctcttggtttgtgtggttgaaacaaacaaagataagtcataataataaatcgggttggattcggaagggatgatggcggtgagttcagcctgcaaagatgggagcaaggtggcactggacaacggcaagtacgttaggtacacacctgaacaggtggaagcactggagaggctctaccatgaatgtccaaaaccaagttctcttcgccgtcaacaactcatcagagagtgtcccattctctccaacatcgaacccaaacagatcaaggtttggttccaaaaccgaaggtgcagagagaagcagcggaaagaagcgtcacggctgcaagctgtgaacaggaagctaacagcaatgaataaattactgatggaggaaaacgacagattgcagaagcaggtgtcacacctcgtctatgaaaacagctttttccgccaacagacacacaacaacaacgctacgcttgccacaacagacacaaacacaagctgtgagtcggtggtgacgagtggtcagcggaacttgacaccgcagcagcatccaccgagggatgctagccctgcaggacttttgtccattgcagaggagactttagcagagtttctttcaaaggccactggaactgctgtcgagtgggtccaaatgcctgggatgaagcctggtccggattccattggaatcgttgctatttctcacggttgccctggagtggctgcacgtgcttgcggccttgtgggtctagaacctacccgggttgtcttttcctcttgcaactttgcagtggagtggatgagcatgcagttggcaccagcgcagaacttgtttttgctccaatcgatgcatctttctctgatgatgcgcccattttaccttctggttttcgcatcatacctcttgattctggcacagatgctgctagtccacatcacttttggaggacggtagttttgtggtctgtgaaagatcacttaacaacactcagaatggtcctgctatgcccccagtgcagcattttgttagagcagacatgctgccaagcgggtatttgataagaccctgcgaaggagggggatcccaaccatggccagacaatatgttcgtagtatcattgcatctgttcaaagggtttcattagcactttctccttcgcgctttggttctcacaatgctttccacttaccacctggcactcctgaggcacaaacacttgctcgatggatctgtaacagctaccggttctatcttggggtagaacttctaaaatgtgaaggcagtgaatccattctcaagtctctttggcatcactcagatgcagttttgtgctgctctttagtccatgttagagagtgatggcattgatgatgtcacccttcttgtgaattcctcacctagcaagatgatgggagttagccttgtctataacaacaatggatttccttctgtgagcagttctgtgctatgtgagttcccccagataatgcagcagaatgtccctccagcaattcttcttagattcttgcgggagcaccgatcagaatgggcagacagcagtattgatgcttactcagctgctgccatcaaagctggtccctgtagcttgccaggggcccgatcaggaggttttggcggtcgggttattcttccactagctcacacaattgagcatgaagagttcatggaggttatcaagcttgaaaacatgggctactatagggacgacatgagtatacctggtgatgttttcctcttgcaactttgcagtggagtggatgagcatgcggttggcaccagtgcagaacttgtttttgctccaattgacgcatctttctctgatgatgcacccattttaccttctggttttcgcatcatacctctagattctggcacagatgctgctagtccaaaccgtacacttgatttggcttctgcacttgaggttggcacaacagcaaacaaagcagctagtgacaactcagctcattctgggagcacaaagtctgtgatgacaatagcattccagtttgcattcgaagttcaccttcaagagaacatagcaaccatggccaggcaatatgttcgtagcatcattgcatctgttcagagggtttcattagcactttctccttcgcgctttggttctcacaatgcttttcacttaccacctggcactcctgaggcacaaacacttgctcgatggatctgtaacagctatcggttctatcttggggtagaacttctaaaatgtgaaggcagtgagtccattctcaagtctctttggcatcactcggatgcagttttgtgctgctctttaaaggcattacccgttttcacgtttgcaaatcaagctggacttgacatgcttgagacaactttggttgcacttcaagacatcactctggaaaagatttttgatgacaatggaaagaaaactctgtgcactgagttcccccagataatgcagcagggtttcatgtgtattcaaggtggtatctgtttatccagcatgggaaggccagtgtcctatgagagagcagttgcatggaaagtgttaaacgaagaagaatccgcccattgcatctgttttatgttcatcaattggtcctttgtctaatatattaaacagtattaggatgtaggaaagaaaagtagagcacaagagtacctaactttggcgaatccctagaatgctttaaaactctagtgggcatatgcgccaccaagatctatctatggccccatttgttttatttttaaaaaaaagggcggccgcccacaaattagctagctggtccagccattaattcagtccgggcccgtgccggcgggcgagcc

SEQ ID NO: 27946 - DNA, 785 bp, Glycine max
  Clone ID: TF_GmC69305_1
ggttgtagaaaggaggaaggtttattcatttttgcagcactctccaactttcttctttgctttctataacttactgggcacatatatagaaatagatagatagtctttgctttcaaagtttacactttgcttcgcgattaatccacgctcctagctcttctaaataccctttctttcttttgcaaccatataataccccgaaaccgttctcttttacatcggtatcgttgtcgcagatggagctagctttgagcttaggcgacacacccaagcccttctctttgcccgcaaaaaatgattctgtgagtttcaaaatagcactgggtgacgacaaaagggtttcttcagatccacccgttcagctcgaccttcttccttcaacaccagttcttccttcttcacgccttcgaattccatggctctccgatgcactgggtatggaacgtgtgacatcagagattccggtgagggcggtggatgacactgacgatggtgctgcactttcatcccccaacagtgcagtgtcatcttttcagatggatttttgtttcaggaacagtagaaagtcttgtgagggtgccagcgacgaggacgacgaaaatggctcaacaaggaagaaacttagactctccaaacaacaatcagttttcctcgaagagagcttcaaagaacacaccactctcaatcccaagcaaaaacttgcgcttgcaaaacagttaaatctccgtccacgtcaagtggaagtttggtttcagaacagaagggcaaggacaaagttgaagcag

SEQ ID NO: 27947 - DNA, 1058 bp, Glycine max
  Clone ID: TF_GmC1889_1
tgaatgcatgtttttaactgtttcgtgagcaacaatggtccctttcattgttttctgtgtgttttctatggcggttttaccaagtagctcctcaagcttggaattgaccatatctgtacctggttttgcttcttcaccaacccttcttccctcatcatctgtgaaagaattggacataaatcaagtacctcttgaagaagattggatggcatcaaacatggaagatgaagaagaaagcagcaatggagaacctcctcgaaagaaactccgtctcacaaaggaacaatctcttctccttgaagaaagctttagacaaaaccacacgttgaacccaaagcagaaagagtctttggcaatgcaactgaagctgcgaccaaggcaagtggaggtgtggtttcagaaccgtagggccaggtatcctaataataataatgaataaagtggagtaggtgtttattatgcaggagcaagctgaagcagacagagatggagtgcgagtacctcaagaggtggttcggttccctcacagagcagaaccggaggctccagagggaagtggaggagctgcgagccattaaggtgggcccacccaccgtgatctcccctcactcctgcgaaccgctcccggcctccacactttccatgtgtccccgctgcgagcgtgtcacctccaccgccgacaaaccgccctccgccgcggccactttgtccgctaaagtgccgccaactcaatcccgccaaccctccgcggcctgttgaccctataactatagtccatcgcctactctgcacgccacctctactacctcatcatctaattaatcagaaacagggcacaaacttaactaaactttacaaaactaaaaagttagtgtgaatgaagatataatatgtgttagaaaaaataatgtttttttttttttttttactaaaagggcgttttcggatagggaaacttttgtagttagtagtagtactttcaatggtcaatgcgtatctgattattgggctttcatattgactttctcctttttcaaatatggatagaacttttattt

SEQ ID NO: 27948 - DNA, 524 bp, Glycine max
  Clone ID: TF_GmC126645_1
acggctgcaagaagacgacagaagggggaagttgaaggcttgggaagagagacaagaaaacaaagccagacatggaggggaattatgggagcacaagacgttatgttccccgagcagattcttccttgagcttcctttacaactacaactacaccccttatccaggaatggaagtgaagcaacaaacactggctggcacaagttcatccatggaaaaagtgaactgcgggaaccaggagaagaagaagcgattaacaagtgaccagttagattcgttggagaatagttttcagaaggagatcaagttagatcctgataggaagatgaagctttccaaggagttagggcttcaacctcgccaaattgctgtttggttccaaaataggcgtgcaaggtggaagaacaagcaacttgagcacttgtacgattcgcttaaacaggaatttgatgtcatatccaaggaaaaacacaatctcggggaagaggtaatgaagttgaatactttgctgagagagcaagctttt

SEQ ID NO: 27949 - DNA, 3131 bp, Glycine max
  Clone ID: TF_GmC95_1
ctcctggcttggaaattccggggttggatgaatcaatcgacacaacaaggattgacaatttttcacccatgaggccgagccattattagttgcttcaccttgtttttcttcaaaggcagtttctgttgtggtgtgcttgattgaagagagaggagagaaaaagaaaagaaaaaagggaagcaaaagtggctactttgatgagttttggggggtttcttgagaccaaacaaagtgatggaggtggtggtaggattgtagtttcagatattccttacaacagcaacaacggttcaaaccacagcaacgatataatgccctctggtgcaatctcgctgcctcgtttagccactcctactttggccaaatccatgttcaactctcctggcctttctcttgcacttcaaagtgatatagatggacaaggggatatgaacagattaatgcccgaaaattttgagcagaatggtttgagaaggagccgggaagaggagcatgaaagcagatctggcagtgacaacatggatggtggttctggtgatgattttgatgctgccgacaacccaccgaggaaaaaacgctatcaccgacacactcctcagcaaattcaagagcttgaatcgctcttcaaggagtgtcctcacccggatgagaagcaaaggcttgaactcagcagaaggcttaatttggaaacgaggcaagtaaagttttggttccaaaatcgaagaacacaaatgaagacacaattggaacggcacgagaactcgctgctaaggcaagagaatgacaagcttagagctgaaaacatgtctatgagggaagccatgagaaatcccatatgctcaaactgtggaggtcctgctatgatcggtgaaatttcactcgaagaacagcaccttagaattgagaatgctagattgaaggacgaactagaccgtgtttgtgcactcgctggcaagtttttaggtcgacccatttcatctctaacaggctcaattgggcctccaatgccaaactcaagtttggagcttggtgttgggagcaatggttttggaggtttaagcactgtgccttcaacaatgcctgattttggggttggaatatcaagccctttagctatggtgtcaccttcaagtactagaccaaccacaacagcattggtgactccttctggctttgacaacagatcaattgagaggtctattgttcttgaacttgctttggctgcaatggatgagttggtgaagatggcgcagactggtgagcctctttggatgagaagcttggaaggaggaagagaaattctcaacaatgaggagtacacaaggactatcactccttgcattggcttgagacccaatggctttgtcactgaggcctctagacaaactggaatggtcatcataaacagcttggcccttgttgaaacattaatggactcaaatcgttggtcagagatgttcccttgtatgattgctagaacctccaccacggaagtgatatctagtggaataaatggaactagaaatggtgcacttcaactaatgcatgctgagcttcaagttctttctcccttggttcctgttcgtgaggtcaattttctacgcttttgcaagcagcacgcagaggggttatgggcagtggtagatgtgtccatagataccatccgagaaacttctggagcacccacttttgtgaactgtaggaggcttccttctggttgcgtggtgcaagatatgccaaatggttactctaaggtgacatgggtggaacatgcagaatacgacgaaagccaaattcaccagctctttagacccttgttgagctcaggcatggggtttggtgcacaacgttgggttaccactcttcaacgccaatgcgagtgcctagccattctaatgtcctcagcagctccctctagagaacattcagcaataagctcaggtggaaggagaagcatgttgaagctggcacatcgcatgacgaacaatttctgttcgggtgtgtgtgcctccacagtgcacaagtggaacaagctgaacgcaggaaacgtgggggaggacgtgagggtgatgaccaggaagagtgtggacgacccgggcgagccgcccgggatcgtcctaagcgctgccacctcagtgtggcttcccgtctcgtcgcagaggctctttgacttcctccgcgacgagcggctccgaagcgagtgggatatcctctccaacggtggacccatgcaagagatggctcacattgcaaagggacaagaccatgctaactgtgtctccctccttagagccagtgctataaatgcgaaccagagcagcatgttgattttgcaggagacgtgcaccgacgcgtcggggtcgcttgtggtgtacgcgccggtggacattccggcaatgcacgtcgtgatgaacggcggcgactctgcttacgtggcgcttcttccgtcggggttcgccatcgtgcccgacgggtccgtcgaggagaacggtggcgcgtcgcagcagagggcggcgagtggcgggtgcctcctgacggtggcgtttcagattctggtgaacagcctccccacggcgaagctcacggtggagtcggtggagacggtgaacaacctcatctcctgcaccgtgcagaagatcaaatcagcgcttcactgcgaaagctgaaagtcacgtgactctggctttgtctattattattattattatttttgttttggagaatttaggttacattttgtagttaaaggtggcgcgtgtgaaggacgcgaggggtgggggtgttgagtcaagaacgaaccgcgcgtgggtgagagaactccttgcatggtgatatgaggatccgagaccttttccgggttgggttaggattttcaacacaaagcaagggtggtggttcgggtattgactcgggtcgacccctttgtttgctccatacagtagcagaagaaggaaaaaaaaaaatgaatagaaatgtgagaaacaaaaaggaacaaaattgtgtttctggttaggaatatttattgtaagttatcatcattttgatttgtattgacttggtgggagtatgctagaattggatctagtagtttgttgcatatgatcaaatcaataatttgtgttcattttttc

SEQ ID NO: 27950 - DNA, 1028 bp, Glycine max
  Clone ID: TF_GmC1282_1
gaaagatgcgcctgcctatgaactattgagtgaagatgaagactggggtcctggcaaaagaaagcgaagagaaaaggagtctgatgctgttgattctcttatgactttgcatgaaagtgagaataggcatcccaataatgagcacaacatgacaagtaaagattcttcaagcataaagatcaaaaggcattgttttaggattccacgtgatgcagttgagaggcttcgccaagtttttgctgagaacgaacttcctccaagatctataagagagggtctttcaaaagagctgggccttgacaccgagaaggtcagcaaatggttcaaaaatgcacgttacttagcacttaaaaacagaaagcatcaagcagaaggagtagcagatcagcttcagagtatcacttctacaaagaacagattacaaaaacaggagaatgtcgatcctttgaaatcaaagaccccaaaaattactaggacacattcccagaaggatgttaaaaatgtcaatggaagaaagaaaatgaagtcatctaacaagaaaagacaaccagaaattcctccacctccaggagaaaatggcaagaaggactttatggagatcagtgatgatgtgagcttgaagaaactgttgaagaaaagaaagaagaggttgataaattttacgtttggaggagactctcagttggcagagttggaatttgaaagactaagcgaattgaagactaaagtagatagtatgaagcaaaaattaactgcaattcaaaattacagagttaagggttcaccctattcgaatgaaccatccattgtatatgtacccacagctgtgttaagggaaaaggttgaatgataactttaattgaaaaatgcacagtgggggaatacatgatttgtagttagttcctgtctttcctttgtagtattcaaagaaaggaactgttttgaagttaatgatattaatacttgtctcacataacttggtattaaatattaatgatattggcttgctcaaagccaccttcagtatg

SEQ ID NO: 27951 - DNA, 1051 bp, Glycine max
  Clone ID: TF_GmC6828_1
cggccctttgccctttctcttgagggctgtgggcgccggctctctgcaaaatgcaaatcgaaattcaattcttgctgccaaagccaccaaaacaaaactgagtcctttccttgtttggttctgcaaaagcaaaaatggaagcagagcatcatcaccagacctcaaacgctggtggtattattggaggcctttacgtcaaagttatgaccgacgatcaaatggaactgctcaggcaacagatttctgtctatgccaccatctgtcaacagctcgttgagatgcacaaggccgtaactatccaacaggacctcgcagggctgaggctgggtaatttgtactgtgatccgttgatggcgtgctctggacacaagataactgcgaggcagcgctggactccaacacctttgcagcttcaagtacttgagcgtatttttgacgagggaaatggtactccgagcaagcagaagatcaaggacataaccattgaacttggccaacatggccaaatatcagagacaaatgtttataactggttccagaacagaagagctcgttcaaagcggaagcaactcactcccgcactgaatgttgtggaaccagaagtggagacagaagttgaagttgagtctccaaaagagaaaaagactcgtgcagaaggctttcaggttcagccctatgagaaatcatcacctcataggatcaaggatatgtacatccagagtcctgacataggatttgaccaattgatgagtaaaatagaagttgcaggctgctacagttcttattttctttgagaaatctgtggaatggatgggttgaagacttaaattcttgattgcagcttggtggactcaagtttgttgatgatactgttagatatatgggctttttgtccaatatgttgatgaaccacacatgatgtggtataactatatattgtataaattgttttgcttaggtgctttgcagtgctaactgttgacaaccgttactgtgtgacatgttataattttacaagtttaaacatgattgcttctcctagctgctgggg

SEQ ID NO: 27952 - DNA, 476 bp, Glycine max
  Clone ID: TF_GmC294_2
gcaataagcaaaagccaattgatacgtgcatatcacaaaaactactcttacacaccaaaaaaatcctctatcaccaaactcacctataccctcaaactcaaggccctatagtccaagcaagtgagtgagtgttacaacttacacagcatggaatatagtcaatatactacttattcagcagaaggtgttgaggcagaaacttacacaagtagctgcaccaccccatcaagatcaaagaagagaaacaacaacaacacaagaaggttcagtgatgaacaaatcaaatcattggagaccatgtttgagtcagagacaaggcttgagcctagaaagaagttgcagcttgcaagagagcttggattgcagccaaggcaagttgctatatggtttcagaacaagagggctagatggaagtcaaagcaacttgagagagactatgccatactccaatccaattataacacttttgcttcacg

SEQ ID NO: 27953 - DNA, 892 bp, Glycine max
  Clone ID: TF_GmC776238_1
gctctttctttctctctctaatggaagacaataatgaagaatgcatcgcggggctatgtttgggactgggactgggattgggatcaggacatgttccaaagaagaataagcagaaagagaacaaggctgtggtgtgcctagacctagcgtttgagctttgtccaaaaggagaaaaagccgttaataacgtgaatcatcatcatgataaggtagagagaatcagcttggagagaatccacgactaccccaatgaaaagagcactgattctgataacagcaacaacaacggatgcagaaagaaactgaggctttccaaggatcaatcatccatgcttgagaacagcttcaaacagcatagcactcttaatccggtcctcattcatgcacttgctgctcgattgaatttaaagactagacaagttgaagtttggtttcagaacagaagagcaaggaccaaactgaagcagacagaagtggaccgcgagttgttgaaaaaacactgtcaaaatctaagtgatgagaacaaaagattgaagaaggaattgcaggaactacgtgccactaaaggttggaccgtcgccaccatgcattccactatccaaaccggcgaccctgacaacgttgggttcttcctgcgttcgcgagttatgtcctgtcgtttttgctcctgtccctggggggtaggacggcgttgtgtttgcgggtggttttgggttccctctggccggtcccaagaccttactcgtgcatcaagcaccggttacaatacgtaactcaaaaactttctgattataattagaaggaaaaacagtacatattattgtattcctccggtccccacatcacaaacatatagaaaactggggcggcttagatacgtatcgttagtaat

SEQ ID NO: 27954 - DNA, 1573 bp, Glycine max
  Clone ID: TF_GmC722_2
cttctacaatcaaaatattatatggggcggtagatagataggctacaagtaaacgaagcaagataatttcttcctacttaacaaaagatagtaagagccacacggtatcttatcccataggtcaccatgatccttccattagaagttgcaataacgtgatagaaatggctttgagatacactttcttttatggttagctatatattctgaacccgatcccccctcaccagacttttaaatcacataattcttttttttatttcttggtggaaaacagattgtgcatctaattccaaattcacccataaaaatacttccttttgctcaccagccatatattatgatggagggagatgagaatattcaagcatcatcaaagggaaaatatgttgaaagcttcaactgctcggaggcaccaaggaagaaaagcaagaagatagaaaacaagaggaggtttagtgatgaacagataagatcactagaatgcatatttgagtcagagtcaaagcttgagccaaggaagaagatgcaactggctagagatcttggcctgcagcctcgccaagtggctatatggttccaaaacagaagggcaaggtggaaatcaaaacgaatagagcaagagtaccgaaaactcaaagatgaatatgacaatttagcatcaaggtttgagtccctaaagaaagagaaggactctttgcaattagagaaactaagtgatttgttggaggcatgtcaagatgatggaagggaagacaaggctggcaaagaaaacagcatagaagatggtggctcaggcagtggatacagcagttggaagcctgaagcaaaaccaaggttttcaaatgagggtttggaggagaggataggtgtgtactcagatgatcaaaatgagaatagcatcataaggggtggtgagaaatctgaagacaaaggacaccaacttctcagaatggatgatcatgcagagatgccattggcatcacttgaaaaatggtatagtggtgtggaccctagtggcatcttggaccagtcatgtagcagttctcaatggctagatttctggacttgaaaaaaacaagcgagccacactttgtgctgcatctgcatgtgtgatgttttgtttcctccgagagaaggaacaaaagattggttgattggttggctcttgtgctgccagcaggtccaaaacattccagcctagccaagaaactcgaaggaagttttgtaggcttgatttgataggcgagagaattaagatagcctcactcaattcaattgtgtagagatttggaaaaaaacaaataatgtgcaatgtctctgtctgttcatgcttgcatgcctttccaacccgtctttgcgtgtgttctttcttcttcttttttttcttttcccacttcaaggggttagttaatctagaacctctttatatttcttaaaggggtctctcttttatcactttagcttattcccatattaacaagtttgatccttatagcacgaccgagacacacaaaaataaaacttaatgaacggtgtgaatgagatattgctcgacttcatgaagcagtga

SEQ ID NO: 27955 - DNA, 899 bp, Glycine max
  Clone ID: TF_GmC4674_2
gaagacggcgccgccaccagaaagaaacttaggctcaagagggagagggatctcagctgtgaagaagttgtggatgcaaaagagattgatcagagggatcttagctgtgaaggaataataagagccaccgaagaagaagaagacggcgccgccaccagaaagaaacttaggctcaccaaagaacaatctgctttgctagaagaaagcttcaaacaacatagcaccctcaatcctaaacagaagcaagctttgtcgaagcagttaaatctaaggccacgacaagttgaggtgtggttccagaacaggagagccagaacaaagctgaagcagacagaggtggactgcgagttcctaaagaaatgttgtgaaacattaacagatgaaaacagacggttacagaaggagcttcaagagctgaaggcactgaaactggctcagccgttgtacatgcctatgcctgcggcaacactcgccatgtgcccctcttgcgagaggctcggcggcagcgccgtcaacggtgccggcggttcccccaagacatcattctccatggcccctaagcctcacttcttcaaccccttcgccaatccttctgcagcatgttgattgatattgttattataattaggcttttagttttcattaaaaaaaacaaaagacaaccaaagaagagttcccccacaacctttgtatttttttggttgagggatacgtcttatgaaccagtgaaaaaaggctaaaggtgtaattaactaatatactgtagaaatttgtaaccgctgattagaattactttttactcttcctttattaatgtatgtttataaatcgttatagaagacatccatctatgaaggaattaatgactattttttttaatagtccatttttgtaatggt

SEQ ID NO: 27956 - DNA, 751 bp, Glycine max
  Clone ID: TF_LIB4280-016-R1-K1-E12
ccacgcgtccgcaaatcagtgcatgaaaagaagaagaagaagaagaagaagtgagtttaaggggtttgagagacaagtggtttttggcttgttggggtgcttttgttaaatagaaaagtggcttctttgatgagttttgggggttttttagacgacaaatcaggtagtggcggtgccagaatcaacaatttttcagatattccttacaataacaacaacgttaccaacaccaccaccaccaacaacaacaacaacgatagaatgccctttggtgcaatctctcagccacgcctcgtgaccacaactcccactttagccaaatccatgttcaactcaccagggctatctctggcacttcaaacgagtatagatggacaagaagatgtgaatagaatggctgagaatagcttcgaaccgaacggtttgagaagaagccgtgaagatgaacatgaaagcagatctggcagcgacaacatggacggcggttccggcgacgaacacgacgccgccgacaaccctccgaggaaaaaacgctatcaccgacacacccctcagcagatacaagaacttgaagcgttgttcaaggagtgtcctcatccagatgaaaagcaaaggcttgaactgagtagaaggctgtgtttggaaactcgtcaggtgaagttttggttccaaaatcgtcgaacccaaatgaagacccagttggagcggcacgagaacacgttgctgaggcaagagaaacgacagcttcgag

SEQ ID NO: 27957 - DNA, 3860 bp, Glycine max
  Clone ID: TF_GmC13446_1
ccacgcgtccgctctttctcctttctttttctctctttctctacaatctcgagattggtgtgtggagcgtccgaaagaccactgtttcccccctttagtttctcttctaagttggattttgaaggaactgagcagcatctaatgaaggagagtggaggctctcttggagaagagagcctgcccgagactaacaccaagaacagtgaagaagaagaaccaattaactagttcctttttttctttctttctttctcactcactccctccctcccaatcccattttcttcaaatagtgtgcgtgtgtgtgttaagagaagaatagggtgtgtgtgtttagagtgatggcactttctatgcacaaggactcagccaacaaccagatggattcaagcaagtatgtgaggtacacaccagagcaggttgaggctttggagagggtctatgctgaatgccctaagccaagttccttgaggaggcagcaactcatcagagagtgccccatactttccaacattgaacccaaacagatcaaagtttggttccagaatagaaggtgtcgtgagaagcagaggaaggaagcttctcgcttgcagacagtgaacagaaagctgactgcaatgaacaagctgttaatggaggagaatgaccgtttgcagaagcaggtttctcatctggtgtatgagaatggttacatgaagcaacagatacacactgcttctgctggtactaccacagacaatagctgtgagtctgtggaaatgagtgggcacaaccaacagcaaagaccccacacctaaggatcccaatagggaggctaacaacccagctggtccgattcccggcgtcgaccccacgcgtccggaaaggccttgggggctcgtgctcgacgtgtctttgctccgagtgctccgtcctttgccgacggggccctgttgcttccctccgctttccgtgtctttccgctggtgccccttgcagttggtcctgctgcatctaggcctgcagagttacgagcaacaatggaagtaggttctggtaatgctcgtccagctggggaagctgacttgaacggctacaaccttaggtcggtccgtaccactgttctcagtttcatccccgcgggccatgcgcgcgccattgtgcccgcgttcgcgcgcccgtatgcgcctactgctgtggcagctgctcggggcgtcgccacgccgagtgccccttccaggttcaatacccggcgggggccaaagtcactttctggatcacccgaggcccttaccttagcgcgatggatctgtagaagctacagggttcacactggcacagagctttttaaagctgagtccacagctggtgatgcaatccttaagcaactttggcaccatcccgatgcaatcatatgctgttctgtgaaaacaaatgcatctccagtgttcaccttttcgaaccaggctggtttagacatgcttgaaactactcttgtttcccttcaagatataatgcttgataaagttcttgatgaatctggcaggaagattctctgctccgagttctccaagataatgcaacagggttttgcatctctccctgcaggaatatgtgtatctagtatgaatcggccagtcggctcgaggattatttgtttgtttcagtcttctcgccatagctgaggagaccctggcagagttcctttccaaggctactggaactgctgtcgactgggtccagatgattgggatgaagcctggtccggattctattggaatcgttgctgtttcccgcaactgtagtggcgtggcagcacgagcctgcggccttgtgagcctagagcccactaaggttgctgagatactaaaagatcgacagtcgtggtatcgtgactgtcgatgcgtggatgtgttaagtatagtccccactgggaatgggggcaccatcgagctcctgtacatgcagacatatgcgcccacaactttggctgcagcacgggacttctggacactaagatacacgacaagtttggaagatggaagtcttgtgatatgtgagagatcattgacatcctcaactggtggccccacagggcctccttctacaacctttgtacgagctgaaatgcttcccagtggttttctagttagatcttgtgagggtggtggatccattattcatattgttgatcatattgatttagatgtctggagtgtacctgaagtactgaggcccctgtatgaatcatcaaaattcttggctcagaaattgactactgctgcattgcaacatataagacaaattgcacaggaatcaagtggagaagttcattatggtgggggtcgtcagcctgctgtcttgaggacatttagtcaaaggctttgcaaagggttcaatgatgctgtcaatgggtttgtggatgatggttggtcactgatgggtaatgatggggtggaagatgtgaccatagccataaactcatctccaaacaaatttttgggctccaattacaacgcatcaatgtttccagcatttggaggtggggtcttgtgtgccaaggcatcaatgctcctgcagaatgttcctcctgctttgcttgttcggtttttgagggagcatcgatcagagtgggctgattatggagttgatgcatactctgccgcatgccttaaagctagtccctatgcagttccttgtgcaagacctggaggcttccccagcacccaggtcattttaccccttgctcatactattgagcacgaggagttcctggaggtagttcgaatagagggtcatgcattttctcctgaggacgtagcgatggcacgcgatatgtatctattgcagctgtgcagtggagttgatgaaagtgcagttggggcatgtgctcaacttgtgtttgcacctattgatgagtcatttgctgatgatgctctgttactgccatctggttttcgtgtcattccgttggatcctaaatcagatggtccagctccaactaggacattagatttggcatcaacgatggaagtaggttctggtaatgcccgtccagctggggaagcagacttgaatgggtacaaccttaggtcggtcctcactattgctttccaatttacctttgagaaccatacacgggacaatgtggctgctatggctcgccagtatgtgcgtagtgttgtgggatcagttcagagggttgccatggcaattgctccctccaggctcaatacccagttggctccaaagtctcttcctggttcgcccgaggcccttaccttagcccgatggatctttagaagctacagggtgcacactggtacggagctttttaaagctgagtccacagctggtgatgcaatctttaagcaactttggcaccatcccgatgcaatcatatgctgttctgtgaaaacaaatgcatctccagtgttcaccttttcgaaccaggctggtttagacatgcttgaaactactcttgtttcccttcaagatataatgcttgataaagttcttgatgaatctggcaggaagattctctgctccgagttctccaagataatgcaacagggttttgcatctctccctgcaggaatatgtgtatctagtatgaatcggccagtgtcctatgagcaggttgttgcatggaaagtcctcaatgatgatgattctaatcactgcctagccttcatgttcatcaattggtcttttgtatgatggatgaaccatatctagagactactacttattttatctactaatcagatgatactatcacagacagatgtactgatgtcagcttttctttatgccctatgtatgaagtatgctaatgttacttattcgctatatatataaaatatctagttaatttggtg

SEQ ID NO: 27958 - DNA, 1223 bp, Glycine max
  Clone ID: TF_GmC13446_2
tcgtctctttcttcttctctctctctctctcacaatctcgagattggtgtgtgtgtgtgttgggggagataaagaccactgttgcccactcaggtttctcttccaagtttggattttgagggaacttacagcatctaatgaaggagagtggaggctctcttggagaagagagcacccccaccaccaacagcagtgaagaagaagaaccaattaactagttcctttccttctttctctcacccattcccatttttaacctaatagtagtgtaggtttaaagaaatatagtgtgttagagtgatggcactttctatgcacaaggactcagccaacaaccagatggactcgagcaagtatgtgaggtacacaccagagcaggttgaggctttggagagggtatatgctgaatgccctaagccgagttccttaagaaggcagcaactcatcagagagtgccccatactttccaacattgaacccaaacagatcaaagtttggtttcagaatagaaggtgtcgtgagaagcagaggaaggaagcttctcggctgcagacagtgaacagaaagctgactgcaatgaacaagcttttaatggaggaaaatgaccgtttgcagaagcaggtttctcatctggtttatgagaatggttacatgaagcaacagatacacactgcttctgctggtactaccacagacaatagctgtgagtctgtggtaatgagtggtcaaaaccaacagcaaaacccaacacctcagcatcccaatagggatgctaacaacccagctggtcttctcgatagctgaggagaccctcagagttccactggaactgctgtcgactgggtccagatgattgggatgaagcctggtccggattcttcgtacccgcacgtggcgtggcagagagcctgcagcctaagcttagagccctctacttgatagactacactctgttagctgttggagttagtactggattatgtatgctttagaaatgagtaacatctatttctaaacatatagatgtgtattttgaaaagcatgatgagttttaaatctaggatacatctattccaattttataccctttcctatatattcttaacattctctttgtgggctgcatatctctcagtatatgattatgagccttcgatgatgattcatcatcatgactaaagttgctgagatactaaaagatcgacagtcgtggtatcgtgact

SEQ ID NO: 27959 - DNA, 2006 bp, Glycine max
  Clone ID: TF_GmC221_1
ctcgagccgaatcggctcgacggcgcaggttcagtttctggagaagagtttcgacacatacaaacatagtaaccgcttctctctctctctctctctctctctctctttttccatgtccatctgataaccctttcctgattctctttcgtggttgttgctattctgagtgatgggtatgccctgccgctctcccccaaaaactcccgttttctctctctgtttttccatggccatctgatcaaacttttcttgattctctctctcagtttttgctattctgagtgatgggtatgccctgccgctgttcccacacctcccacatcactgaaatcatcatcaccagcttcttccgccacaagtcttaaattacaacaatttccctcaattattcatcaaccaaccaccttaatagccttttccaatggttccttaaagatccaacttggtcggagtaaacatggcggctagtggaagttccttttccaacatcactagcttccttcgcaaccaacaaccctcttcccaacctctcgattcttctctcttcctctctgctccttcaatttttgtttcaggttcgagatccatggtgagttttgaagcagaaggagggaaggggtgtaacggctccttcttccgcgcgtttgacatggacgacaatggggacgagtgcatggatgagtactttcataaacccgagaagaagcgtcgtctctccatgaaccaggttcagtttctggagaagagtttcgaggaggagaacaagcttgaaccggagagaaagaccaagcttgccaaagaccttggtttgcggccacggcaagttgctatttggttccagaaccgtcgagctcgctggaagaccaagacgctggagaaggattacgaggctctgcatgcaagttttgagaatcttaagtccaactatgacagcctcctcaaggagaaagacaacttaaaagctgaggtggcgagcctcaatgagaaggtgcttgcaagagggaaacaagaggggcacatgaagcagcaggctgaaagtgaagaagaaacaaaaagattattgcatttgcaggaacaggaaccaccccagaggcttttactggaatcagtttcggagggagaaggatccaaagtctcttctgttgtcgggggttgtaaacaggaagatatcagttcagccaggagtgatattttggattcagatagtccacattacaccgatggagttaactccgcactgctagagcatggtgattcttcttatgtgtttgagcatgatcaatcggatatgtcacaagatgaagaagataacctcagcaaaagtctctacccttcgtacctctttcccaaacttgaagaagatgtggattactccgacccgcctgaaagttcttgtaattttggattttctgaggaagatcacgccctttggacctgggcatactaagttttcttccatgttcatgtgtgtgtttgtgtcatatgtttttttagtaattagtatttagtatttgcactttttgtccaggcttcaaaaatggctatagctttagctttatcaggaaagaaatgtttgttttctttttgcctcattttgttagtacttgtaatcaaactgttggttccaatgtaattaaataatgtcttctcgttgagaatgtaactatggatttcatttaatttcactaagaaattcaaataagaaacttgatgaaatggggaaaaaaaaatggaagccaattgcttggtagagtggaaaagattgaggcctatagtatttatactatttaagatgactatgattcattgattcttcttcacttgggttctggacttctgggtccatgttgttttgattggtaagcaaccctgcatgacgaagttgacttgcttgcacctttgcaatactttcctacttgagagcatttaagttttgtgacagaaggggtgtcactttcactatgaattggacaaaaatggccactctccattggatgaggatcacc

SEQ ID NO: 27960 - DNA, 1334 bp, Glycine max
  Clone ID: TF_701009968_FLI
cttgttcacccttccccttctccttacttctcactctctttccaaaacactccctttctctttccccttacccttcttctgtgtgtgatgatgtagatagagaataaaaagagaccagtgtgcagtgagaaagagacgaacacagtccgaggaacaaccacgtgtatgggaaggagttccagtccatgctggaaggactcgacgaagaagggtgcgtggaagaagcagggcaccactctgagaagaaacgacgactaaacgtagatcaggtgaaggccttggagaagaacttcgaagtagagaacaaactggaacctgaccgaaaggtgaagctcgcgcaagaactcggcttgcaaccaagacaagttgcggtttggttccaaaaccgccgtgccagatggaaaacaaagcaattggaaagagattacggcgtcctcaaagccaattacggatcacttaaacttaactttgacaccctccaacaagacaacgaagccttactcaaacagataaaggaattgaaatcgaggctggtgcaagaagagaacaacaacaacactgaaagcgatgtttcggtgaaggaagagatgatagccactctgcaggatagtaacccgctctgtgaatccgccattcctggatcggactcgaaggagttgagttacgagtgtttcaacaagagtgatgaggtgggagggggttctgtgttccctgtggatttcaaagatgggtcttctgatagcgactcaagtgcgatcttgaacgaggagaacaacaaccacagccccaacaacaacgcggcgatttcgtcgtgtggggttctgcaaagtcacgggcttttgtcgtcgccttcttcttcgtcgatgaacaactgtttccagttccagaaacagtaccagacgacgacgcagtacgtgaagatggaggagcacaattttctcagcgccgacgaggcctgcaatttcttctcggacgaacaagcaccaactctgcagtggtactgttcagaggaatggagttaagagggaagaagaagaagcttaattaattgagagcgagggagggaatagaaagaataaggcattttgcagggtgtatagtaatgggatggagagagaaacattgtaaaaatgaaatggtcaaggattgaagaagagagggaaattgaagagcttgagagagaggggatggggtcgaagcacgcatggcgtggggtcggagatgagaggttgatgacgataaaaaaaaaggggggtaataataatcatcaacatccgtgcggggaaaggggagtaatttatgaataataataatgattaggtcgtaatgaagtg

SEQ ID NO: 27961 - DNA, 3641 bp, Glycine max
  Clone ID: TF_GmC556_1
gagctacttaaatctaataacgaggggaatgaatctttgctcaagtccttgtggcatcactctgatgcaatattgtgctgcactctaaaggtatgcttgaaatttaattcaatttcatagcgcatgtatctatttcgtgcttataaaaaatatatatatctattttgtgctctgtccataatgcaattcaaattctctaactcataaaggttttactctgaaatagagggtatcattgtatcaacatgggctatatagcctgagtagtagcctagtaaaatatgtgagatgaatttgtattatgctggcctaagttaaatttgccctgacctggtccaagaaaaatttcccccaacctcaactatagacccatttctgggtagtattctgcaaagagctttactggtcacttgtcagcgtttcaagtctattattcattcctcttccaactacagtgcatataagttgtataacccaacatggatgacatgttattctgtactgtctaattttgttctaacagtggaaatggcttgaaaacagtttcaactctagtcaagtgaaagtatctggtttgggtacagagactggacggagtgaatgctcgaaaaactttctaaagtaggcgggtcaagagttgatctagctggtcgatccgctctccctcgtcttctcactttcacacatccatccatgtcttgaaacgatgctctcgcagatcaagcatagtctgattccaattcgcgcaagctcatggacggagatcgctgatgcggcggagcaaatggttgcacgagattccacacatgacactcgatcttagttaggagcagtgctggaaagcagaacctacttggttcttttgaaggtttgatttggatgtggaaagtatgtcctgcaaggatggtagcagaaacggaatcggaatggataacgggaagtacgtccgttacacgcctgagcaggttgaagccctagaaaggctctatcacgattgccccaaacctagttccattcgccgccagcagctcattcgcgagtgccccattctctccaacatcgaacccaagcaaatcaaggtttggttccagaacagaagatgtagagagaagcagagaaaggagtcgtcgcggctgcaagctgtcaataggaagctgactgctatgaacaagctgctgatggaagagaatgataggttgcagaagcaggtgtctcaactcgtctatgaaaatggctattttcgtcaacacacccagattactacgcaggcaaccaaagacacaaactgtgaatcagttgtgacgagtggtcagcagcacaatttgataactcaacatcccccacgggatgcaagtcctgcagggcttttgtccattgcagaagagactttagcagaatttctttctaaggctactgggactgctgttgagtgggtccaaatgcctggaatgaagcctggtccggattccattggaatcgttgctatttctcatggttgcactggtgtggcagcaagagcttgtggtctagtgggactagaacccactagggttgcagaaatcctcaaagatcggcctttgtggtttcgcgattgccgagctgttgatgttctcaatgtgctgcccacagcaaatggtggaaccattgagctgctttatatgcagctatatgcaccaaccacattggctcctgctcgagacttctggttgttgcgctacacttctgttttagaagatggcagcttagtgatctgtgagaggtcacttaaaaatactcaaaatggtccaagcatgcctcctgtgcagcattttgttagagcagagatgctgcctagtgggtacctgatcagaccttgtgaaggaggtggttccatcatccacattgttgatcatatggatttagagccatggagtgtgccagaagtgctacgtccactgtacgaatcatcaacagtactggctcagaagacaactatggcggccctacgtcatctaaggcagatttcacatgaagtttctcagtccaacgtcactgggtggggtagacgaccagcagcactacgagctcttagccaaagattgagccggggtttcaatgaggcactcaatgggtttactgatgagggatggacaacaattggcaatgatggtgtagatgatgttactattctagtgaattcatcccctgacaagttaatgggtctgaatctttcctttgccaatggatttccgtctgtcagtaatgcagtgctatgtgccaaagcatcgatgctattacagaatgtgccccctgccattctcctaaggttcctgcgggagcatagatcagaatgggcagacaacaatatggatgcttacacagctgctgctattaaagtcggcccttgcagcctatcaggatctcgtgttggaaactatggaggtcaagttatactccccctagcacacacaattgagcatgaggagtttttggaagtcattaaattggaaggaatagctcattctcctgaagacacaataatgcctagagaaatgtttcttttgcaactctgcagtggaatggatgagaatgctgttggcacctgtgctgaacttatatctgctccaattgatgcttcctttgctgatgatgccccccttttaccttctggatttcgcatcattcctcttgaatctggaaaggaagcttccagccccaatcgcacccttgaccttgcatctgcccttgacgttggtcccagtggaaaccgagcttcaaatggatgtgctaattccagctgtatgagatctgtgatgacaatagcatttgaatttgcatttgaaagccatatgcaagagcatgtagcatctatggcacgtcaatatgttcggagcattatatcatcagtccaaagggtagcattagcactttctccttctcatttgagttcacatgcagggcttaggtcaccattgggtactcctgaagcgcaaacccttgctcattggatctgcaacagttataggtgctacttgggtgtggagctacttaaatctaataacgaggggaatgaatctttgctcaagtccttgtggcatcactcagatgcaatattgtgctgcactctaaaggcattgccagtgttcactttctcgaaccaggctgggcttgacatgctggagaccaccctagttgcattacaagatataactttagagaaaatatttgatgatcatggacgaaaaattctcttttcagagtttccccagattattcaacagggttttgcatgtcttcaaggtggtatttgtctttcaagcatggggcgacctgtctcatacgaaagagttgttgcttggaaggtgctgaatgaagaagagaatgctcattgtatttgctttatgtttatgaactggtcttttgtttgacattttgttctgagtacagtagtgcttattgtatcctaaagtgttagataaagatttactcaagacacttgtgctttgttggttggtgttttactgtatttgcactaaatacttggattgcacattaaatgactatttgttgtgttattagcttatgtaacttgtttccttattcaacctccagctaatatttaatgcaatcttaagaagtgttgcagctttttatgtgagtgg

SEQ ID NO: 27962 - DNA, 367 bp, Glycine max
  Clone ID: TF_GmC556_10
cggacgcgtgggcggacgcgtgggtgcttggcagatcgttgcacagattcctccatcctagtttagtgctagaaagagtaaagtatgtcctgcaaggatggtagcagaaacggaatcggaatggataacgggaagtatgtccgttacacgcctgagcaggttgaagccctagaaaggctctatcacgattgccccaaacctagttccattcgccgccagcagctcattcgcgagtgccccattctctccaacatcgaacccaagcaaatcaaggtttggttccagaacagaagatgtagagagaagcagagaaaggagtcgtcgcggctccaagctgtcaataggaagctgactgctatgaacaagc

SEQ ID NO: 27963 - DNA, 1080 bp, Glycine max
  Clone ID: TF_GmC556_9
ccacgcgtccgcactcctgagctagctagggtttccactttccccatttcctctctcccacgtcttcgtctttctagaaaagcaaaaaacaattcacactttcacagtgccaaagattctcttctgccaatttcacttcacacatccatccatccatccatccatgtcttgaaacgatgcttcgcagatcaagcagagtcgattcatattcgcgtaaccccatgcacggagatcggtgatccggcggagcagatcgttgcacgagattcatcacgtgagctagaaagcgaaactagaagtagaagaaggtacttggtagttggttcttttcaaggtttgattttggatgtggaaataatgtcctgcaaggatggtagcagaaacggaatcggaatggataacgggaagtatgtccgttacacgcctgagcaggttgaagccctagaaaggctctatcacgattgccccaaacctagttccattcgccgccagcagctcattcgcgagtgccctattctctccaacattgagcccaaacaaatcaaggtttggttccagaacagaagatgtagagagaagcagaggaaggaagtcgtcacggctgcgagaagacgacagaaggggggaatcgttgctatttctcacagttgcactggagtagcagcaagagcttgtggtttagtgggactagaacccactagggttgcagaaatcctcaaagatcggcctttgtggtttcaggattgccgagctgttgatgttctcaatgtgctgcccacagcaaatggtggaaccattgagctgctttatatgcagctatatgcaccaaccacattggctcctgctcgagacttctggttgttgcgctacacttctgttttagaagatggcagcttagtgatctgtgagaggtcacttaaaaatactcaaaatggtccaagcatgcctcctgtgcagcattttgttagagcagagatgctgcctagtgggtacctgatcagaccatgtgaaggaggcggttccatcatccacattgttgatcatatgaatttagagccatggagtgtgccagaagtgcta

SEQ ID NO: 27964 - DNA, 1653 bp, Glycine max
  Clone ID: TF_GmC5011_1
agagaaaacagggtttgtattatttgcggggcaaatgtcatgattgagataactggccttgctgacataagtcatcattgaacttacacaccactcccacccattctctctcctttctatataacctcacacccacacggcccctcctatcactccaaaacctaaactccccttgcttttcttaccatctccttcaattctctctcactctcttttttctctcaccaaaacctttcacccaatatcctcaaactactacttctgataaattgctaatttttataaagctagctagagatgatggttcaaaaggaagatttgggtttgagtttaagcctcaacttccctcatcacaataccccaaatcctcaacatccgagtctcatgtcatcctctactcattcctcttctccttctggttgcaaccctcaaaaaccctcttggaacgaggctttcacttcttcggatcgaaactccgacacatgcagaggcgaaacgcgatcgttcctgcgcggaatcgacgtgaaccggttaccttccgccgtggacaccgaggaggaaacgggagtttcgtctccgaacagcaccgtctctagcgtgagtggaaaacgtagcgagagagaagaaccgaacggcgaagaacacgacatggacagagcctgttcccgcggaatcagcgacgaggaagacgctgaaaccgcaaggaaaaaacttagactctccaaagaccaatccgctatactcgaagaaagcttcaaagaacacaacaccctcaaccccaagcaaaaattggcactggcgaaacagctaggacttcgacctagacaagtggaggtgtggttccagaacagaagagcaaggactaagctgaagcaaaccgaggtggactgcgaagtattgaaaaggtgctgcgagaatctgacggaggaaaatagaaggttgcagaaggaggttcaggagcttagagcactgaaactttccccacagttttacatgcaaatgaccccacccacgacgctcaccatgtgcccctcttgcgagcgtgtggctgttccgtcctccgccgtcgatgctgccacgcgtcatcatcccatggcccaggcccaggcccaggcccagattcggcacaggcccattggcccgtgggcttccgcctctcccattacgcaccggccgtttgatgtcttccaccactgatcttgagggtgttttggtcattgtgaaattattattatttactattctgggcctacttgtaccaccgtgtaggtgtgtaaccccaaaaggagagaaaaattgggggaaacagaaagagtgagggagcggtcgaaacagcgtgctgtggaattgtgcggtctaaggatatggtcattagaagaagggatttggtgggtctccaatgttttgtaccagtttgacctatcatcttttgttttgttgggtatgacctatatattagttactagttaggtgtttttttttattcagtttatagtattacttaacttttccccctctaaacagagactttgtgtaaagtgcaattatctagttaaattatatagggtttggttcccgtggcctatttcacttaattgagatcattatttattattcttttaaaaattaagggcggccgccgactagtagctc

SEQ ID NO: 27965 - DNA, 1067 bp, Glycine max
  Clone ID: TF_GmC294_1
gctataagaagacgacagttgaggataggaactccaataagcaaaagccaattgatacgtgcatatcacaaaactactcttaaacacacacgcaccccaaaaaaatcctctatcaccaaactcacctatttcctcaactcaaggccctatagtcccagcaagtgagtgagcgtcacacaacatggaatatacttattcagcaggtgtagaggcagaaactcacacaagtagcagcaccaccccatcaagatcaaagaagagaaacaacaacacaagaaggttcagtgatgaacaaatcaaatcattggagaccatgtttgaatcagagtcaaggcttgagcctagaaagaagttgcagctggccagagagcttggattgcagccaaggcaagttgctatatggtttcagaacaagagggctaggtggaagtcaaagcaacttgagagagactatggcatactccaatccaattacaacagtttggcttcccgttttgaagctcttaagaaggaaaatcaaacattactaattcagctgcagaagctgaatcatctaatgcagaagccaatggagccaggtcagagatgcacacaagttgaagcagcaaacagcatggacagtgaatcagaaaatggaggcaccatgaaatgtgaagctgagggaaagccaagcccatcaatggaaatatcagaacatttacttggtgttctgtctgatgatgacacaagcataaaggtggaagactttggcctagaagatgaacatggccttctgaattttgctaagcatgttgatggttccttgacttcaccagaagattggaatgcttttgaatccaatgatctattaggccaatcaaccactgatgattaccaatggtgggacttctggtcctgaatgaaacagagcaaccaaaattttgtggaggaaatatttatgcatatgaatgcttcatgtttggttccgcctcggcaactgagttgcgattactgggatccaccttgtttttgctaatatgaaaaaaaaaaaaaaaaaaaaaaaaaaaaaaaaaaaaaaaaaaaaaaaa

SEQ ID NO: 27966 - DNA, 913 bp, Glycine max
  Clone ID: TF_GmC1605_1
caccttttctatcttctctctgcctatgtggtccatcccaacccagtgaagcccttgatcaggccatataagacagatcaattttgccggctgcaagaaacgacagaaggggagacagggaactggagacagatatggattggcatcacggcacaaagccacttgttcctcggccagagaccttaagcttcttctacaactataactacaacagtccatatccaggagtggaagtgaaacaagcagcattgatggagacaggagaagggtcagttccagcattaatggacagcagaaacaaagagaagaagaagcgattaacaaataaccagatagagttattggagaggagttttcaggaggagataaagttggaccctgaaaggaagatgaagctttccagggagctaggccttcagcctcgccaaatcgctgtttggttccaaaatagacgaacaaggtggaagaccaagcagcttgagcacttgtacgatgtgcttaaacaccaatatgatgtcgtctccaacgaaaagcaaaagcttcaagaagaggttatgaagttgaaggcaatgctaagtaaagagcaaggttttgggaagcaaacatttggctgttatacagaaatatcaggggaagaaacagtagaaagcacgtcagagggtctaactctaagaggaaagagtaacattgagcacgttgcagatcaaggctactgttctttcactgtggaggattataacaccactgttttactgcctcctcactgtcactggcctgctgtgccttattagttattaattaatattatccctgattaatcttccacaactttgaacttgaactctgtgagtactcagcttaattaatattatagtgttctagcccaaataaagagggaaaaggagaaggaaat

SEQ ID NO: 27967 - DNA, 1511 bp, Glycine max
  Clone ID: TF_GmC6963_1
aattcggctcccggtgaaaaggctgttacacacactgccaccaaagaggcctttttcctccattttgacgtgccccaaatcagagttttttctttccacacacacacacactggtggttgagtggttcttctcaaaatgggtgagaaagatgatgattttgggttgagtttgagtttgagtttggggagagtgaaccaacaacaacaacaccctcctcctttgaatcacatgcaccagcctcaacaactacaacctgttcccatgaatcacaataagactctctttggtgatttgtctcagttaccagaccggagctccgaaatgatacgaggaatcgacgtcaattcggcggcggagtgcgacggcgtttcctcgccgaacagcgctgtctcgagcgtgagcggcggcgacggcaagcagagcgagagggacgacgataataatgctgccgccgtggccggtgagaggacctcgtgctcgcgagggagcgacgatgacgacggtggtggcagcgatgcctcgaggaagaagctgaggctgacgaaagaacagtccatggtgttggaagaaacgttcaaggagcatagcacgctgaatccgaaacggaagcaagcgttggcagaggagttgaatctgaagcccagacaagtagaggtgtggtttcagaacagaagagcaaggaccaagttgaagcaaactgaagtggattgtgaatacttaaagagatgctatgagaatttaactgaagagaatagaaggttgcacaaggaggtccaagagcttagggcattgaaattatccccacaaatgtacatgcatatgaaccctcccaccactcttacaatatgcccttcttgtgagcgtactcactcctttgcatcctcctccactgccaccatccactcggcggtggcggccacatcgagcaatcgcaaactgttcggcacaaacatccggctgcccgtgtccttcaacactcggccatttgaaggcccaattcctcggccataattggttgaggcctgaggacaatgtgatatttataatgatgtctagacatttttaattactagacatgtatgcatggaaaaaaaatcaaattgcaacggaacaccaatttgtggtttttgttaggaatcaaggatatgagtttggacttggttaagtcttcagtgaagggttgttctattttgtgtatgctataagttatagctagtcaacttcaggatttgtgtagggtagatatgttaccggcgaggtatggtttgagtggggtaagattttcatatgccgaatagtactagcatttattagtttagacttataaaaagaagagaaagagaatccgaatctgtgatgttctcatcaaaatggagattaacgtggaggaatgattgtgatttctcaattggagttttttgtctacctttgcgtagatgtcctagaactacagatgtaaataaataaataaataaacaatttttccttcagattccatgaaggagtagct

SEQ ID NO: 27968 - DNA, 1850 bp, Glycine max
  Clone ID: TF_GmC53_4
agagagctcttgccagattcagattagattcatttcatttctcatttacacgcacacaacacaactctctttcactgttccctctgtcttctttcctttctttcttccttttccccaggttttattggaaaagaaaaaacaaggtctagtccctttccaggtgccgtgactaataacccaactttctctccccccccccccccccctcctcttcctcatccttccttttcatcaacccttctcactccttcatcaacaaccttcttacaccaatttttcttcacttttgttggattcctcaaaataaacctgcatggtttgcactctatgtatgctagatcattttttcttctttctttctttctgttttccacaacatacatgtggctttgtgcaaattggagatatatatatacatatgagagagtaaatattagacctgcttgcttgacttagcagaagagtttttttttttttttttttttttttcagtggagagcatatatatataggtagctagggatggaagatatttacaagatgaaccctctttcatgttccggctttgatgttgttagggaagttaacgttaattccgctactggtgcttctgaattgaatcttggactggtggctaacaacttcttttcggatatttcggatcggttcatcaagtcccagatcgccactcaccctctctatccaaatctagtatccgcttacatagaatgccgaaaggttttggttttgccgcaccagctgccatattaattattttttgttagtttgttagtttttgttagctggaattccaacacctatcccttcctcctttcacccgctgacataatattaccttttgttgttttttttttaattaattggctttcttctcttctatttatgcatttttttattattattgccgaaaggttggagcaccaccagaactggcttcacttcttgaagaaatagcccgtgaaagctacccaacggatgctcttcgtgagataggagatgatcctgaacttgacgaattcatggagtcatactgcgaagttcttcatagatacaagcaggagttgtcgaagccattcaacgaagcgaccttgtttttgtgcagtatcgaatcacaactcagcaatctttgcaagggaacactgacaatgccattggataacaaccactcagatgaggccgctggaacatcagaggatgaattgagttgggagaaggtggaagcagttgaaggtcacgaatcttctggcccacgtccaggtgatcaagagcttaaagaaatgctccttcgtaagtatggtggttatcttagcagcttgaaaaaggaatttcttaagaaaaggaaaaagggtaagctaccaaaggatgcaaggatggtactcatggactggtggaacacccactatcggtggccttatcctacggaggaggagaaagtgcagctatcagaaatgactggacttgatcaaaagcagatcaataattggttcatcaatcaaagaaaacggcattggaaaccatcagaggacatgcgatttgccattatggatggtgtaagtggcagtggctttggaggacctatctaatatatttctggagatggaccgtgttgattcctgctacttgtaccttcctgctcgtgtgatgtgtgtatacgttcttttccacgagatatgtattaattttttgaacctgcatttgtatgctaagtaaataggtccttcagcttatatatatatgcaagagtgtaaaaaacctgtagctaatatacgcgacagtgataatcgatcaatgctactgaatcattatttcatgacaatttacattatagt

SEQ ID NO: 27969 - DNA, 875 bp, Glycine max
  unsure (1)..(875): unsure at all n locations
  Clone ID: TF_GmC189414_1
ccagcgtccggaacgtagaaaagaaaactaggataaggtaaaggacgagaaaaagaaagagaaagagagaaagggactctgtccccttttgtgtgcgtgtgttgtgtcaactgagtgaactctcaagtgaactaacatcaccaaaaaaaccactctcttgcaacctcctcatcacattgctccttctgagacaggtttggctcaactgaagtaaggtttggttatcttattaccttatctctcaccacatttaaaaacacacaaaacacagttacacaagtgaagtgtggttttgggaagcaagaatgtatggggattgccaagttatgtcaagtatgggagggaacgtagtagtaaacccagacaccctcttctcttcctcgatccagaactctagcttcaactcatccccaccatgccctttcaaccttttccttccatgaaagaagaagatgggatcttgcgagggaaggaagagattgagagtggatcagggagtgaacaattagttgaagacaagtcagggaatgaacaagagagtcatgaacaacccacaaagaagaaacgttatcacaggcacactgctcgccagatccaagaaatggaagctttgttcaaggaatgtccacacccggatgataagcagagactgaaactgagccatgaattgggtcttaaaccgcgccaggtcaagttctggttccagaaccgtcgaacccagatgaaggcacaacaagaccgtgcagataatgtgatacttagagctgagaatgagtctcttaagagtgagaattatncgttacaagctgcactgcgtaacgtaatttgtccaaactgtgtggccatgcataatgggtgctgatatgggcttggat

SEQ ID NO: 27970 - DNA, 1692 bp, Glycine max
  Clone ID: TF_GmC1705_2
tacggctgcgagaagacgacagaagggggaagaatctctctttatttctttcactctctcagaaccaaaattttgaaactcctcaactctcatagggtcaaccttctctctctccaaactctcgcacctttctgctctgcccttcaatttattcacctctgacaccctcttaattctgcttccagttcctctgagtggttcaaaatccgtggttgattttgagaatgttaatgggagcagggtgacggataggcccttttttcaagcgttggagaaagaagagaactgtgatgaggattacgaggggtgtttccatcaaccggtgaagaaaaggaggctcacaagcgaacaagttcagttccttgaaaggaactttgaggcccacgacaagctcgaacccgaaaggaaggtccaacttgcaaaagagcttggcttgcagccaaggcaagttgctatatggttccaaaaccgaagggcaaggttcaagaccaagcagctagaaaaagactatggcgtgttgaaagctagttatgataggctcaaaagtgactatgaaagtcttgttcaagagaatgacaagttaaaagcagaggtgaattctctggagagcaaattgattcttagagataaagagaaggaggagaattcggatgacaagtcatctcctgatgatgctgtcaattcttcaccccacaacaacaaggagcctattatggatttattaatttcaaaaaatgcaacaacatctgaaaatggaaccgaagtgtcaacactcccactccctattatggtaacatgcaagcaagaagatgccaattcagccaaaagtgatgtgcttgattcggatagcccacattgcactgattatgggaaccacccttcctcattcgtggagcctgctgattcctctcatgcctttgaaccagaagaccactcagaagacttctcacaagatgaagaggataaccttagtgaaaactttttgaccctcccttcttcttgttgcttacctaaggttgaagaaccctgctatgatgaccctccagaaaactcttgtaattttggcttccatgttgaggatcaaaccttctgtttctggccctactgaaccaaccaaccaaccaaccgcttccaatgttataaaaacttcgcagttgtaaccatgtactagaaatcaataaaaatggtattgttacttctactaaggaataaaaatcagaaggctaatgcaatgcatcatgctatcatcactggtggtgttaatagttagcagtgaaagtgtaacacaatgttactactagctaaaattcaaaaacttggttcaggtgtgcgcgtaggtatcccaaaatttcaggtggggtacagcaaccaatcgttgttttactttcggatgtggaaaatggaaaccctgttttctctttctctctgcactcctctggatcacaccgttgttttactcatgtattaggaagaccctttcatcatgattcacctgtcctcactgctcagcataaagttacagttttatatgcgtcccagtaatcattagagtcatcatagcaaccagagtttgagtagattaaataagatctcacattcaaattttcctgttgttattggacactgagaaaaacttgtgtctaagttgatgatgattatgtaagaaatatttggcatattttaatgaaattg

SEQ ID NO: 27971 - DNA, 921 bp, Glycine max
  Clone ID: TF_GmC4807_1
ttcggcgcgatgtccttttaagaaggagaacattaacatcacactggttttgcgatcaaagagatcgaagccagtgaagagcgagcgagagagctaggaacgtaacataccataccacattgaatcatcgaccacctttccaagaccacatgatgctcatgtctcagttattccctgctgatgcatacactcaaattatttctcaacaaggagagactaataagaagccaagacgccgtcgtaacaagcagcaccgagaagacgaaagaaggggaagcttagtgatgaagaagtggaagcttagtgaggtgcaagttaatttacttgaacaaaactttggaaatgaacgcaaacttgagtccgaaagaaaggataggctggcaatggagcttggtttggaccctcgacaagttgctgtgtggtttcaaaacagaagagcccgttggaagaacaaaaagttggaagaagagtactccagccttaaaaaaaatcatgaagccaccttgcttgagaaatgttgcctggagagtgaggtgttgaagctcaaagagcaactttctgaggcagagaaagagattcagaggctgctagagagtgccgagagagtcccaagcaacagttctagttcgtcacagtcacaatcaatggaagcggtggacccaccattctttggggaatttggagttgatggatatgaggatgatgtgttttacgtgcctgagacccattacatcaacggcatggaatggattaatctgtatatgtaaaactaccaataggaatttagaattttgtagataatgtgaatggtccaatgtatattaattgttcctagctagctaggtagctaagtgtgtttgtttcactatggtttggaaattggaaagtatccattaacataataatttgcaatttgacccg

SEQ ID NO: 27972 - DNA, 850 bp, Glycine max
  Clone ID: TF_GmC1455_1
caagccctgatagcaccaatagcaataacggcagcagaaagaaactgaagctcacaaaggagcaatcagccacccttgaagatattttcaagctgcatagctctcttaaccccgcacagaaacaggcacttgctgaacaattgaattattagcatagacgggttgaagtttggtttcagaacagaagagcaaggaccaagctgaagcaaacagaggtggattgcgagttcctgaagaaatgttgtgagaaactgaccgatgagaatctaaggctgaagaaggagttgcaagagctgcgtgcacaaaagcttggatcaacaccactgtacattcaactctccaaggccacaaccttgaccatttgttcatcgtgcgagaaactgttgaagcccaatgaagggaacaaaggagccattaacaaattgcagaacagtatagagttagggggtatctagagggtataaaataaaactatgaggaactcataatttggtgaagggtattggaatgtcagaatgcaattatcaaacatggatagtttagtttaattaatcagcacaaaaaagaaaagtacacaccctcagtccccacatcgaataatttgtatagccatgtaggactgcttgtggtatatatgctaaggctagaatctagatagttaaggtaacttgttgtctctttctagtttctattcattcaaaatacaaattaatcaaaattaaccccctctatttgctttattttgtttggcttgatttgcaaatgaaaatgtgtgagtgtgtacggacaaaaaaaacgtgtgtttgaatgattgaattaggatgagacaaatatgatgatgattcactcg

SEQ ID NO: 27973 - DNA, 1653 bp, Glycine max
  Clone ID: TF_GmC1443_1
cagcttttatattttaccctttatctatttgttgatattgttttcatcccttgtgccttttcattccttggcgattacgaaattggggtttgatccagagaaagagagagaaaggcataaaatttaaggaagaacagagattgattttccataggaaccctaattttctctttcttgttcttttggggttctgcaatttgttggggttttgtgaagcggtgatcggaaagtctcgatctttgatcggttttcgtcgatggagggcgaggcttgttcagagggagagaataatctgaaaaggggtggctctgatgatgatagcaatgagaataacaacaacaacaataacggaagcagtggcaagattgtgaattctaatgaggggcagagcaagcccaagcgccagatgaaaaccccttttcagcttgaaaccctcgagaaggcttatgctgtggataattacccttcggagacgatgagggtggagctgtctgagaaattggggttgtcagatcgacagcttcagatgtggttctgccacaggaggttgaaggacaagaaggacttgccgtctaagaagccaccacggaaggtgctggcagagccattgccggattcgccaagggacgaccccaggttgagccttgagcttgctaatgaatatggatccgggtccggttcaggttccagcccgtatgcccgagtggagcccctgaatgtggttcctcggtgtgtgcctggttattatgagtccccacaggctaagttggagcttagagcaattgcttgtgtcgaggcgcagttaggggagccattgagggatgatggaccgattctagggctagagtttgatccattgccaccagatgctttggggcacctatagcagcagttacagaacagcagaagctacctagttttgcctatgacagtaaaatatatgaaagacatgatgctagaacaaataaggctttggcaaggacattccgtgacaatcaatttctaccaaacaagtctggcattaggtctgatgcttctggacagttcagccaatctcatttacacgatccaattgaaggttttgtcagaaatcctccttttgcacatggaaatgaacatctacctagaattcatgctactaaaggtcattcttctcgtgttcgtctcttgtctcaacaagacaagcaattgattccctatcaatctccttctcgggatgatgatgctgcccctcaaagggaattgtacccaaacatagctaatgctggaaagaactctcactctactggtcaccaaattgttgggccagaaaatctccatgctctacctagtgtacaagttttgcataacaatgctacatggattgagaagaaacgaaagagtgatgatgcccacgatgttgaagcccacgagatgaaaatccggaaagagcttgagaaacaagacaacctcagacgaaagagtgaagagcggacaagaaaagaaatggagagacaggatcgtgaaagaaagaaggaagaagaaaggttgatgcgtgagagacagcgagaggaggaaagagcaagacgtgagcaaaaacgtgaaatggagcgaagggaaaagtttctgctgaaagaaaatttacaagcagagaaaaccaggcaaagagaaaag

SEQ ID NO: 27974 - DNA, 474 bp, Glycine max
  Clone ID: TF_LIB3242-123-Q1-J1-B9
cggctgcgagagacgacagaagggggaaacaaacatggattggcatcatggcacaaaaccatttgttcctcggccagagaccttaagcttcttctacaactatgacaacaacaactcatatccatgagtggaagtgaaacaagcggcattgatggagacaggagaaaggtcggttccggcaatggaccgtggaaacaaagagaagaagaagcggttaacaaataaccagatagagttattggagaggagttttcaggaggagataaagttggaccctgaaaggaagatgaagctttcgagggagctaggtctgcagcctcgccaaatcgctgtttggttccaaaatagacgtacaaggtggaaggccaagcagcttgagcacttgtacgatatgcttaaacaccaatatgatgtcgtctccaacgaaaagcagaagcttcaagagaagttattaagttgaaggcatgctaagta

SEQ ID NO: 27975 - DNA, 914 bp, Glycine max
  Clone ID: TF_GmC1517_1
ggctcgagcacacactcatctccacttcccacattttaatattcacacaccaccttattgttccaaagcttcaatatgggggatttcatcttctccttcaagacccaaccacaagaccatgctcaccaccaaagagcaaagcacaacaacaacaacaacaagaggctaaccgaggaccaggtcgcgattctcgagaagtgcttcgcctccaacatgaagctcgagccggagcagaagttccaccttgcaaaccaacttggtgtgcctccaagacaagttgcaatttggtatcaaaacaaaagggcacgctggaagacccagagcctcgaggtggaccatggtgtgcttcaggcaaggctagagaatgtagtggctgaaaagaagcagctagagaaagatgttgaaaggctcaaagctgagctgaagaaggctcaagagatgttgttaatcaccaataatgtcaaaagtggagaccaataataataataatgcttcttgtgaattttcaacttcttttgaagaaggagggagttctggggtggtgcttgatgatgccactcatcatcatcatcatgagtgttggcaaagtggtggtgaggttatgcaggttgaggagctctatgcttacttcgtgggtgcaaattatgggacaggcttgcatgagaaagggcataaaatataacaaacttttgctagtttgtacattttatttttgttatgtcattcagcagcagggtcaaaaaattggaatttgttaatttacaattttgtgtcatgaaatatattgtataaatccatgtccatatgtcacggtgatgagacaaaggagactggagagtaccctttaacgggaaaaaaaaaaaaaactaaaattgaataatgagcaattcgatgaccctgcattgcattttggt

SEQ ID NO: 27976 - DNA, 1098 bp, Glycine max
  Clone ID: TF_GmC357_3
ccacgcgtccgcggttcaaaaggaagatttgggcttgagtctaagtttgagcttccctctcctctcctcttctccttccagccacaaccctcagaaaccctcttggaacgaccctattttcacttcttcaggtgaagctggatcattcctccgcggaatcgatgtgaaccgtttaccttctgtggttgattgcgaagaggaagcaggtgtttcatctccaaacagcacggtttctagcgtcagtggaaagcgcagcgagagggaaaccaatggagaagaaaacgacacagacagagcttgttccagaggcatcatcagcgacgaagaagatgctgaaacctctagaaagaaacttagactctccaaagatcagtcaattgtcctggaagagagcttcaaagaacacaacactcttaaccccaagcaaaagttggcactggcgaaacagctgggtcttcgagcgagacaagtggaggtgtggttccagaacagaagggcaaggacgaagctgaagcaaacggaggttgactgcgagtttttgaaaaggtgctgcgagaatctgacggaggaaaacaggaggttgcagaaggaagtgcaagagcttagagcactgaaactttccccgcagttctacatgcacatgaccccacccaccaccctcaccatgtgcccctcgtgtgagcgtgtcgcgttcccccctcctctgccgttgatcctgccacgcgtcaccatcacgtgcctccatctcacccccgggcctttcccattggcccatggccaggcccttcgatgccctccgtcccagatcttagactcgcggaaacaaaatgacaaaattgaaaaaaaagataggaagccatgaattatgtgttcaaagtgtggtctaagatatggttgttaggaaaactgattttgtgggtctctaatgttttgtactagtttgacccttcgtctttcttttggatttcggggcatgacctggtctagttactagttaggttttttagttttataatacttactgcgttactctcgtttctcatgattaaatccgagactttctgtaaagtttactggtcttaattaatagtattatat

SEQ ID NO: 27977 - DNA, 1489 bp, Glycine max
  unsure (1)..(1489): unsure at all n locations
  Clone ID: TF_GmC4674_1
ctcgagccgaatcggctcctctctcttctcttcattctccctcttaattcttttctcttttctttctttcacacaaactcctcttattatgatgggtcttgatcaagatgctagcagcaactctggccttcatcttattctagggttagctttgactgccaccaccaccactactccatcactaccatccatttccaacaagcttgatcatgttgatcatcatcaccatcttataactcttagaccaacaacaaagtcaccctataattcctctgaggctgaaccatcattaacgttgggcttgtcccgtgagagttacctcaaagtacccaaaaacatcataggacaaaacagcaacaacaaagtctcgtcttgtgatgaccctcttgatcacttgtccacacagactaattcacctcatcacagtgctgtttcctccttctccagtggcagggtcaagagggagagggatctcagttgcgaagaagttgtggatgcaacagagattgatcagagggaccatagctgtgaaggaatagtaagagccactgacgaagacgaagacggcaccgccgccagaaagaaacttaggcttagtaaagaacaatctgctttgctagaagaaagcttcaaacaacatagcaccctcaatcctaaacagaagcaagctttggcgaagcagttgaatcttaggccacgacaagttgaggtgtggttccagaacaggagagccagaacaaagctgaagcagacagaggtggactgcgagttcctaaagaaatgttgtgagacattaacagacgaaaacagacggttacagaaggagcttcaagagcttaaagcactgaaactggctcagcctctgtacatgcctatgcctgcggcaacactcaccatgtgcccctcttgtgagaggctcggcggcggcatcaacggtggcggcggcggttcccctaagacaccattctccatggctcctaagcctcacttcttcaaccccttcgccaacccttctgcagcatgttgattgattgttattataattaggcttttaattagttttcatttaaaaaaaaaaaaaacagcaaaaaccaaagaagagttgccccacaacctttgtatttttttggttgagggatacgtcttatgaactacatagctagtgaaaaaaaggttaagggtgtaattaattaactaatatactgtagaaatttgtaactgctgattcagaattactttttactcttcctttattaaaggtattttgatcaagtgaaaaaaggctaaaggtgtaattaactaatatactgtagttttttgtaaccgctgattagaattactttttactcttcctttattaatgtatgtttataaatcgttatagaagacatccatctatgaaggaattaatgactattttttttaatagcccnaaaaaaaaaaaaaaaaaaaaaaannnaagcggccctctagaggatccaagcttacg

SEQ ID NO: 27978 - DNA, 686 bp, Glycine max
  Clone ID: TF_uC-gmflLIB3275P163e04b1
ctttttctctgagagagaaccgtactatactacatgtgtttgaattgtgttttgttagattgagaaactataagcctctccggaaccttaaaagatctatagcaataataatgttccagccgaacctgatggacgcgttggagatgggtcagaacacttccgagagtgaggttcctcgaatcctagaagacgagttcgacagtgccaccaagtccggtagtgaaaaccatgaaggtgcctctggtgaagaccaagaccctcgtcccaacaaaaagaagcgttaccaccgccacacccaacaccagatccaagaaatggaagcttttttcaaggagtgtccgcacccagatgacaagcaaaggaaggaactgagcagggagttagggttagagccattgcaggttaagttttggtttcagaacaagcgtactcagatgaagacacagcacgagcggcatgagaatacaaatctcagaaccgaaaacgagaagcttcgagcagataatatgaggtatagggaggctcttagcaatgcttcgtgtcctaattgtggtggaccaaccgctataggagaaatgtcattcgatgaacatcacttgaggcttgaaaacgcaaggctaagagaagagattgatcgcatctcagcaattgctgcaaagtatgtaggggaagcccgtggtgaacta

SEQ ID NO: 27979 - DNA, 3544 bp, Glycine max
  Clone ID: TF_GmC571_1
gcaaagagagatgggaaccgttagtaacattggcttcctttcagtattcagagttcctctagattcacaacaagcactatcaaagcagatgaagaataaatcatcgtgttgtttcatggttcctcctaatcataactattctattaggcctagtccaatacgttgtaattaactatcagtaagtgggattcagcagaaccccacgaccacaagcacgagcaacacgtcctgaaagaacaaggataagatggatggcaataaaatatactcactgtttttctcagtctacattcatttctctccgctttaacgttgccccagttaagttttcttatgtaaaggcacaccctttgcctctttactagtaccaacaccaaagacaaccttgcctttttatattctctccttcttgtgttacctttgtttagtagtgagtgagtgaaagcatggctatggttgtggctcaacacagagaaagtagcagcagtggaagcattgacaagcacttagattctggtaagtatgtgaggtatactgctgagcaagttgaggctcttgaaagggtctatgccgagtgccctaagcctagttctctgcggaggcaacaattgatcagagagtgccccattctctccaacatcgagcctaagcaaatcaaggtttggttccagaaccgtaggtgtagggagaagcaaagaaaagaggcatctaggcttcagaccgtgaaccgcaaactcactgcaatgaacaagttgttgatggaggagaatgatcggttgcagaagcaggtgtcacagcttgtttgtgagaatggttttatgaggcagcaattgcatactccatcggcaacaactactgatgctagttgtgattcggtggttaccactcctcagcataccctgagagatgctagtaaccctgctggactcctatcaattgcagaggaaactttgacagagttcctttcaaaggctacaggaactgctgtagattgggtccagatgcctgggatgaagcctggtccggattcggttgggatctttgccatttcacaaagttgcagtggagtggcagctcgagcctgtggtcttgttagtttagaacctacaaagattgcagagatccttaaagatcgtccatcttggttccgtgactgtcggagcctagaagtttttactatgtttcctgctggaaatggaggaaccattgaacttgtttacacacagacatatgctccaacaacactggctcctgctcgggatttctggactctgagatataccacaagtttggaaaatggcagtcttgtggtttgtgagaggtccctgtctggttctggaactggccctaatccagctgctgctgctcagtttgtaagggctgaaacactccctagtggctacttgatccgaccatgtgaaggtggagggtcaatcattcacatagtagaccacctaaatctcgaggcatggagtgtgccagaagtgttgcggccactttatgaatcatccaaggtggttgctcagaaaatgacaattgcagcgcttcgctatatcaggcaaatagctcaggaaacaagtggtgaggttgtttatggattgggtaggcagcctgctgttctgcggactttcagccagagattgagcagaggcttcaatgacgctgtaaatggattcaatgatgatgggtggactgtattgaactgtgatggtgctgaggatgtaattattgctgttaattcaaccaagaatttgagtggcacttctaacccagcaagttcccttacattccttggaggaattctctgtgcaaaagcttctatgttgcttcaaaatgtccctcctgcagttttggttcgttttctgagggagcaccgctcagagtgggctgatttcaatgttgatgcttattctgctgcatcactgaaagctggcacctatgcctatccagggatgaggcctacaagattcactggcagtcaaataattatgcctcttggtcatacaattgaacatgaagagatgcttgaagttattaggctggaaggtcactctcttgctcaagaagacgcttttgtttctagggacattcatctcttacagatatgtagtgggattgatgagaatgctgtgggggcttgttcagagctcgtatttgctccaattgatgaaatgttccctgatgatgctccattggttccttctggtttccgcattatcccattagattcaaaaccaggtgacaaaaaggatgctgttgctacaaatcggaccctggatttgacatctggttttgaagttggtcctgcaacaactgctggtgcagatgcatcatcaagtcaaaacactcgatcggtgttgactattgccttccagttcccttttgacagcagtctgcaagacaacgtcgcggtcatggcacgccaatatgtccgcagtgtgatttcctccgtgcagagggttgccatggctatatctccatctggtataaacccatcaattggagctaaactttctcctggttctccagaggctgttacactagctcactggatctgccaaagttatagttactatttagggtccgacttactgagatcagattctcttgttggtgacatgatgctgaaacaactgtggcatcaccaggatgccattctatgctgttcactgaagtcattgccagtgttcatatttgcaaatcaagctggccttgacatgttggaaacaaccctagttgccttacaagatatcacattggataaaatatttgatgaggctggacgcaaggcattgtgtacagactttgccaagttaatggagcagggttttgcttatctgccagctggaatctgcatgtcgacgatggggcgccatgtgtcatatgaccaagccattgcatggaaagttcttactggggaagacaacactgttcactgcttggctttctctttcataaattggtcatttgtatgaaaaatccaattcgtgtgccctgctttttcccacttgaacataaaaatgaaagggttaaaagggagacaagacaagtttggggggaaaaagaagtcgtaaatttttgtataacacatcaggatcaggtttgcatttaattcgatttaatttatttcttatttagtgcagagaccaaattgaattaatcttgtaaattatttagtgctagagtgaagttgagacttttgaatgacacatgttgagtactttgtttttgtcaaaaaaaaaaaaaaaaaaaagtcaccccaaaaacacaagaacttttatgttcaagtgggaacttgcggggcgcgcccggcccccttttcccccttttggcctttttttgcccccccctcccgggccgtgttctgtgtcctcggccccgggaagacccttgggtttccccattttattccctttgcaccaattccccttttccccacttgggttattacaaaaaaggccccccccattcccctttccaaaaatttgcccaccttaatgggaaaagggaaccccccttgtaccggccctttaaccccgggggg

SEQ ID NO: 27980 - DNA, 503 bp, Glycine max
  Clone ID: TF_GmC114_3
cggcattcactgtactttatccctttctgtgagggaattatggtaattgatatcgaggttttgactcatggattctgatcgccccagaaaaccttccaaaaatttagttcactctcgcttcttccttttcggcttctattgctgggattgggagttcttaaccgctctcctcctttttagttgttccccttaatcttgttccttcatatttttatttttttttcttattagatcagattgaacaaaagggttgctctttattttttaatcttgggggaataatagaaatagaaataagaaaagattagtgaggttgaaatgttgcaacaacgatcggtgccggcaccgttcttgacgaagacgtatcagttggtggaggatccggggacggacgaggtaatatcgtggggtgaaagtgggaacacttttgtggtgtggaagcatgcggattttgcaaaggatttgcttccaaaatatttcaagcacaacaacttttccagctt

SEQ ID NO: 27981 - DNA, 458 bp, Glycine max
  Clone ID: TF_LIB3242-385-Q1-J1-H5
tgcgagtgcgatggtgaaatcaaacgagaacggggctgtttacgcttatgtgcctactgacctgaaaacatgttacgagctggttggagagcgcgccactgattctatcataccctggagcgatggcggcgacatggttactcttctacgacattactcacttatacgacacgctccttcctacctattgcagacacaactctttctccagtttcgtcagacagctcagtatctatgggagcaggagaattgagtcggattgctactaattggccagagagaacatagttagatgccaaaagcatatgatgaagacaatacgtagaaagacacattctcacaatacagatcagcaaaaagcattgccactttaagacgattgtgtggaaccatcacaagaagcaccggaccatggtctttggaaagaagtggtgtatctaacacttgataagaatttg

SEQ ID NO: 27982 - DNA, 664 bp, Glycine max
  Clone ID: TF_uC-gmflLIB3275P163e11b1
ttagtctcctctcggaaacttctagaaacaacaacaacctacagctcattttttttccgattccgatcctctttctgcttctccgttcgctgggtgcatgccctctcagtaaccctatcagatagatcaaggggttccggaaggttgtccctgaccgttgggaattcgccaacgactgtttccggcgaggcgagagagctcttcttcgcgacatacagcgccggaaattactgccggttccgcctgcagccgcggcaccggcagcagtcacagccaatacggtgacggtggctgtggcagcaccggcggtgagaactgtgtctccaacgacttccggcgacgaacaggtactatcttcgaactcatctccgattgctgggaataataataataatacagtacaccgcaccacaagttgcaccactgcgcccgagctgttagaagagaatgaaaggcttaggaaagagaacatacaactgagtaacgagttgagtcaattgaagggtttgtgtaataacatactctctttgatgaccaattatgcttctggttttagccgccagcagttagaatcctccacaagcgctgtgaggaccgtgccggggccggacgggaaggcgcccgtggagcttttgcccgcgaaacatgtttcatcggctgatga

SEQ ID NO: 27983 - DNA, 409 bp, Glycine max
  Clone ID: TF_GmC1369_2
tccacacgctttctccagagaccttcttcctagatacttcaagcacaacaatttctcaagcttcgtcaggcaactaaacacttacgttgcagctgttgcttggacaagaatctatggtagtgatagcaatcgttatttactcaagattattcagaagccgtagaatggatacgaattcgaagtagctggtctccaagaatcataactgattgttgcttttgaaccaagatccggttggtggttaaccttgtcggtttgattttttttcccctctatacttttcattgcttgagacttcgtcatgtggcttgaaattccacgtgtggcctcgttttatttcaagccacatgacgaagtctcaagcaatgaaaagtatagaggccacacgtggaatttcataatgttacat

SEQ ID NO: 27984 - DNA, 1439 bp, Glycine max
  Clone ID: TF_GmC1369_1
gcacagggacgcaggcgtaggctcgcgctctggctcgatcaattatggtttccaatttattaattgtgtgttgagtttttgtttttggattttgggtactaaaaattatgtattggggtttaaatttcatagggttttagaaaaattgatccagataggtgggagtttgcaaatgaaggattccttagagggcacaggcacctgttggcaaacataaggagaaggaaacaaccttcttctcagccttcttcttcttcttcttcatcctcttattattattattcttcttcttctcaacaagcacaacaaggtcactgtgttgaagttggtcgctttggacttgatgaagagattgatcgtttgaggcgtgacaagcacgtgttgatgatggagcttgtgaagctgagacagcagcaacagaacaaaggtcataccttcaagcaatggaggagaggctaagagggacggaaattaagcagcaacaaatgatggctttcttggctagagctttgaaaaatccaacctttattcagcagctacttcagcagaaggagaagaggaaggagcttgaagaggccatgtccaagaagaggagaaggccaattgagagagggccaaaccatggggttgttggagaagaatcaagcagtgttaaggttgagtctcttgtgtttggtgatgaatatggttttggagtgtcagagttggaagtgttagctatggagatgcaaggttatggtaagggaaggagggaacaagaggaggagcctgatgaggcactagatcaatcacaagagaggctggagaaagagcttgatgaagggttctgggaagaacttttcagtgagggttttgagggtgaattggatactaatccaactaattcccaagaccaagatgaagaagaagaagatcatgtcaatgtgttggccaatcgctttggttacttgggttcaagtcctaaatgaaaccaaccacatatagtactcaagattattattggttaacattgttcattaatttggttcaagtggaggcactcatgtggtgaatggaggaggaggcatcccatttggcatgatacatgtggaaatgatttactttttggtgtttctaacccccccattatatgatgatgcatgtccttttgtagaacctaaaaaatttctcacttttctctgtttgattaggtaggttgcagctgttgcttggacaagaatctatggtagtgatagcaatcgttatttactcaaggttcagttttatgtgttttttttttttttaaccactcaaattaaaccccctctcctttgtaatgttcatcttaattaattatattatatatcaaccaagctattgctgtaaaaaaaaaaaaaaaaaaaaaaaaaaaaaaaaaaaaaaaaaaaaaaaaaaaaaaaaaaaaaaaaaaaaaaaaaaaa

SEQ ID NO: 27985 - DNA, 2508 bp, Glycine max
  Clone ID: TF_GmC1855_1
gttcccggaatagacccacgcgtccgctaaaaagtaggtaattcgagcaaggcgcaacccaaagagggtgaccacaacctttaattcaatccatttcccctctctctctgttcaaagccacaatctaattaatttcccattcttctccaacaacttagggtttcccttttcccaacaacaatgccacccattccctaattagtaattacgctttttcttttcctattaaattcatttccccgacatggacggcggcgggtccactccggcggcgccgattccgaacgcgaacgcgccgccgccttttctgagcaagacctacgacatggtggaggacccttccaccgacgcgatcgtgtcgtggagcgcaacgaacaacagcttcatcgtgtgggaccctccgcagtttgccagagaccttttgcccaaatacttcaaacacaacaacttctccagcttcgttagacagttaaacacttacggtttcaggaaggttgatccagatcgctgggaatttgcaaatgagggttttttgaagggtcaaaagcacttgcttaggagtattacacgacgaaaacctgcccatggtcaaaatcatcaacagcctcagcaaccgcatggacagagttcatcggtaggggcatgtgtagaagttgggaagtttgggcttgaggaagaggttgagaggcttaaaagagataagaatgtgctcatgcaagagcttgtgaggttgaggcagcagcaacagaccactgataaccagctgcaaacaatggttcagcgccttcagggaatggagcaacgacagcagcaaatgatgtcattccttgccaaagctgtccagagccctggcttctttgctcagtttgtacaacagcaaaatgacagcaataggcgcataactgaagtcaacaaaaagcgtcggcttaaacaggaaggtatggctgaaacagagcatgctgctactccagatggacaaattattaaatatcaacctatggtgaatgaagcagcaaaagcaatgcttaggcagatcatgaaatgggatacttcttgtgtagaatctttgaataaaaattctgataactacgtgattggtgatgcttcatcatcttccagtggaatggacagtagcagctcttcaggctggacttctggagtaactcttaaagaggtctctccagcttcggtgcagtcttcacatgttccagctgcaactgggactcaagggcatgtcccctcaaccgttaaacctgaaattttatctgtaccacaagcagtagcttctgaaaaagttatgaaagatggagcacatgatccaccttctatccctgtgtctcaagcagatgtaatgatccctgatcttcctccaataacagagatggtgacaggaaatattcttgatattcctgaagaaaattatatggcaactgagacagatgagggatacatggattcttcattgggggctggtgggtcatttcccattgatttcgaaggtatttcacctgatgcagacattgatgatttgttagccaatcctatttgggatgaaattttgcaaacttcagttccagaggatatcgataccaatgtggctgaagcatccaaagggaatgaggtccaaccaatggaaaatggatggggcaaaactcaacatatggatcaccttacagagcagatgggtcttctttcttccgatgcaaaaagagtttgatatctatgatatatgattaatcttcatattgtctgaggtagtccctgacccaaacaatacatgactgaagtgatgtctataatatataattagtaattacactcccacttggtcactgaaaaagacaatgtttttcatttggtcttcaatggctttttttagtttgttgtgcataccaaggctaaatccaactttctcacacgtgcatttacattgatttttcattcgacttcgtgttgaaaacaagttatgaacttatggccttgtcatggcatcctcaggaagtgtttgtgatcacaagatcagtttttccaatgttataggcaatctgtcaagttgagttatatgtgaacgattcggttctttcccaattttcaagtttccttgatgaggggaaaaagagaacatgttgggtgatgattgactgctcaaggcgtctgaaaaatgcacattggaagatttgctttttgaacaagggcggcaacaatggacagcagtggtacgatgttaagctgcaggctgtttgcttcttcgtcaattttattttgtcctttccgaggttatgtttcaactgatggaaaatagaaggaaatgaaattgaatgatattagtccccattgttgaaattgttcataacatgatggaattgaacttgatggaatttattccatttctttttatccaatgctcttaccccctaatttgggtatatggtagaactattttattgtttgtcaagcaatctccttaccattctgtttgctttaatgaaatgaaaagttctattacgc

SEQ ID NO: 27986 - DNA, 495 bp, Glycine max
  Clone ID: TF_jC-gmXLIB3563P087Cb01a1
atagaacattatgtgaggttgagatgtgtcatcgatatggtgccggctcctttcttgacgaatacgtatgatgtgctggagagatcacagtgactgaccaagcgataatcgtgtggagaaagtgataacaccttcttgatgcgtggaagcatgccgattttgcataatgattggcttgcgaagtatttcaggtcacaacatcttatcctattatggtcgacagcgtaaatccctatatgattcctagacattgtaccagacaaatgggaattctcgaacgagcatttctggcgagggctcaacgatcttctatccgagatcaaacgccagatgaccgagcctgactcttgctaacatcccacggaggcctgaaagtccggagagggctgcatctatcacgtgaactctggcagcgacgactagggctccaccttaacctggagctcgttctccggctccatgatccagggatcggaggaaacactcacaacggct

SEQ ID NO: 27987 - DNA, 478 bp, Glycine max
  Clone ID: TF_uC-gmropic020d07b1
cggatgcgtgggtggcaacaactctcccagtcccaagcccttggagatggtcaacccggttcctccgattctttctaagaccttcgacctcgtcgacgccccgactctcgacccgatcatctcgtggaactccacgggcctcagcttcgtcgtgtgggaccctctcgagttcgcgagaattgtccttcctcgacatttcaagtacaacaacttttccagcttcgttcgccagctcaatacttatgtaactaggtgtttgtcttcagggattccgcaagattgacacagacaagtgggagtttttcaacgaagctttccagcgagggaagaagcacttgctgaagaacatccaaaggcgcaggtcatctcaatcccagccggttggtagctatattggaatcggatcttctaccgaggcaggggggtcagaggttgagattgagatagaaaggcttaggaaagaaaagactatgctgat

SEQ ID NO: 27988 - DNA, 1819 bp, Glycine max
  Clone ID: TF_GmC2149_1
tatttctcacactcgcaagtctcaagcaactcacacaggaagcggcaaacaaagcacacagaaagtaaaaagcggaaattaaggagcggtggtgacggtggtagtgaataaataaaagcagcaccataccatggggggagaagaagtagcaagagtcaaagcagagttgttcgacgacaacgaaagcgatcgcaacgacgacgacgttttgagcgagagcaaggactcgggagtgacgacggctcacgcagtgaaagaagagatggatgacggcgccgctaactggtcttcgtcgtcgtcgacttcgcccaaaccgatggaagggttgcacgaggtgggcccccctccgttcctgaagaagacgtttgaaatggtggaggaccctcacaccaaccccattgtgtcgtggagccaaactcgccatagtttcgtcgtttgggactcgcacgagttctccaaaacccttctcccaaagtacttcaagcacagtaatttctcaagcttcgttcgccagctcaacacctatggctttaggaaggttgattcggaccgttgggagtttgcgaatgaaggattccaaggagggaagaagcatttgctgaagaacataaggaggaggagtaagtgcaacaaactgcatcagggagcattcaatatgatgaagccagacgtggattctgaagtggagaagctgaagaaagaccagaacattttgaaggtggagattctgaagctgaggcagcagcaggaaaattctcatgttcagctcacaaatgttcaggagagaattcggtgtgcagagatgaagcagtttcagatgatgtatttcctcaccagaatggctagaaggcctgcgtttgttgagcagttagtccataagattaggcgaaaaagagagattgatggtaatgacatggttaagaggcctagattgatgggaaatccgtgccatgtacccttccctaagacaatggaaacaacacctaattttgattatagacaccaacaaggtcataaacaatttgcaacattgcaatctgagctcaatgtgacagaagtgaactccagtaggatggagcacccaactccctctcctttagaagatgaattaggcaactctttgcaagggttaagggctcatggttgttctagagcaagggcacaagatgcatcttcttctgcctatcatgttatgtcagaaaaactaatgagagaaaattctatagttgatgaagaactagatgtgaatgactccaatatctatcttgaattagaggatttgattactaagcctacagattggtctgttggatctgcaagtggattggtggaacaaactagttgaattaatctcactagtggaatagtgccttgtaatggttgcaagagtgtgcttgtgtggatgctctgctgcaacacaagatgaagaacttgatattataaggctcttcgattaccacttatcagtcttgaaagtgtaggacgtagatgctcgccccagctttttatatgatcaagcgagagtgcgagactttccatgtttctgtttggccgggtccaaattgttcatatgttgttgtatatatttccctctccgctttgtgttccttttgttaacttaggatctcaagtcctatattagcatatatagtaggcatagctaagcctcttgtgacgtagtaattaactatgtaaatgtaaagttgtaaatttgtaatgcagaaaatgtttttcagttccctgcttccctttgtctttcccacggaatcaaatcacttttttttttcagtcagaaataaaataactttttttttcagtc

SEQ ID NO: 27989 - DNA, 1611 bp, Glycine max
  Clone ID: TF_GmC1045_1
cccacgcgtccgcccacgcgtcggcccacgcctctctctccttcatccttatatttccaacggaaccttctagaaccaccataacatcattctcccttccctcgcgtttcaacaccgataacccgcaaaaatacccattgatctgcgcctcctcttccatggctccaccgccgccggtggaacacaacggcgactccgccactaccgcctcagcatccgcctccgcgccgcggagtctcagagatccattcccacgccctttctcaccaaaacctttcaactcgtcgacgaccaatccatcgacgacgttatttcctggaacgacgacggatcaacgtttatcgtctggaaccctaccgtcttcgccagagacttgcttcctaaatatttcaaacacaacaatttctctagcttcgttcgccaactcaacacttacggattcaggaaagttgtgcctgatcggtgggagttctcgaacgattatttccgccgaggcgagaagcggcttctttgcgaaattcagcggcggaagatctcatcgccggcgccgtctccgactgcgccgacgacggttacggtgccgatgccgttgaccgcgataccgatcatatcgccgtcgaactctggcgaggagcaggtgatatcgtcgaactcgtcgccgttgcgagcgccggcggagcttctcgacgagaacgagcggcttaggaaagagaacgttcagttaacgaaagaactcgccgagatgagatcgctctgcaacaacatatattctctcatgtcaagctacggaaacaaaaacggaaacagcaacggcagttaccaaactgacggcggcgccggtggagcacagggaagcagggagtccggcatgacggcggtgaagccactggatttgatgccggtgaaacggagctccggcgaggacgcggcggatacggtgccgaaggagataaatctaattccgaatccgaagctgtttggcgtggcgattggagcgaagcgagcgagagagggaggaggaggaagtggaagtggtcgagattgcggaggaggaggaggaggaggagaggaagataccctgctgcgcctgcatcacgtgggttctgcagacgtgaaatctgagccgttggattgccagaaccatcgcgagaatcaggaaacgccgtggttgagtccgtgtcacaggacaaatcaaagggtgtgcaactgacacgcggcgacggctaatcgaatgaaacattttagattagatacgtagtgctgtagggaatccgaaaccggcacgcggagacgtcacgtgcgtcgtttaaccgtttgggaccgattcccagaagtttctcagaagtcagaggaaaacgatactttctaatccttttttcttcgctatctcttttttatttatattatatattcgttaaattggacttggactgtagctttgccattgagggtagtgttgaatatttcattagtcctataaattattttacttgcctgtagaaactcaacattcatacttatgtgaatatatttatagttttattaattacaaagtgcaaaaactcgaaactagttcaataaccttatgtgaatatatttatagttttatta

SEQ ID NO: 27990 - DNA, 1747 bp, Glycine max
  Clone ID: TF_GmC688_2
ctttctcttccaccgccatcatctctccaccctccaccgccctcacacccttttaatatcctcactccccccaccacctcccactcttttcttttcacacccctcctcattcttcttcttcacactaattcagaatcaacatgaacccaaatgatgctaactctcctaagccgttggagattctgcagatgaaccctgttcctccgtttttgtccaagaccttcgacctcgtcgacgacccgactctcgaccccattatctcatggggctccaccggttttagcttcgtcgtgtgggaccctctcgagttcgcgagaatcgtccttcctcggcatttcaagcacaacaacttctccagtttcgttcgtcagctcaatacttatggattccgcaagattgacacggacaagtgggagtttttcaacgaagctttccagcgagggaagaagcacttgctgaagaacatccaaaggcgcaggtcatctcaatcccagcaggttggtagctatattggaatcgaatgttctactgaggcaggaaggtctgatgttgagattgagatagaaaggcttaggaaagaaaggactatgttgatggaagaggttgttgatttgaaacaagagcagcgaagaatggctcaccgcgcaggagaagtgaatcaaaggctccaatccacagaacaaaggcagaaacaaatggtttctttcctggtcaagttaatccagaaccccgcctttttagcccgccttaggcatgaggagcaaaaagaaatagattctccaagagtggtaaggaagtttgtcaagcagcaccaacatgaaactggaacagcagaaactctccaagaagggcagatagtgaggtaccaacatgattggagaaatataggcatgtcttccgaaactccaaaactaagtccagtttccattgaacagtctcctcactacctttcacagggtttggcaggagaagtgagtgtaggcgcagaagatcttactgctcaaatagagaatattgtatcaaatgacttggctgcagtgcacgggatcacagtgtctcaggaaattatgattggagaaggattatctagctttggagctgaagacccccttttcaaagggaaaagtgtcatgagtccaattctagaagttcctccagagtattttgcttccttcccagagggtttgaccaaggggaaagactttcaagatttttctgctcttggaactgaaggcatgataaagctagaagatatatgggactctggccttaatgttagtggtgctgcttcaggtagtgggaatgagctgtggagcaatcatgtcaactatgaagagtttccagaatttggagtcacaagtggtatgtctgactcagacatctgggatattggcttaggaagtttgggaattgataagtggccaactgatgaaccttctcttggtgaaacaaatggtcaagctggtcaaccaaaagaagataggcctaagaattttggtccatagggtttcatttgctcctgcacttgttgccctttggttacttgctatatttatagttcctaggaggcatattattgaatcatttgatttataaatagtattcattcacctgcttttattcatcatttactttcaatttttttattcttttagatgaattctttaactgtccatgtttttcttcgtaaattctaattgtgtaattattgataacttccactcaagtaaatcatacttttcctttc

SEQ ID NO: 27991 - DNA, 558 bp, Glycine max
  unsure (1)..(558): unsure at all n locations
  Clone ID: TF_jC-gmro02910062b09a1
ggctcgaggttgttgttttatttcattccattcgattcgattcgattcgatgtagcacagtctacctttcaattctgtggcgtctcattgattggtattatgaatctcgaatttgcaggttcaaatataccaattcgtgtatgaggaaaccgagattgatgacctttgataaaaatgctttcgattttcccctgtttctgcactgggatttagttgtttaggagttgaagtccggtaagggtttcagaaaggttgacccagatcgatgggaatttgcaaatgaaggatttttaagaggtgaaaaacaacttttaaaaagtatcagtaggcggaaatctgctcatgtaaatggtagtcaacaaccatctcaagtgcataaatcagctgttagagcatgtgttgaagtggggaaatttgggtttgaggaagaggtggaaagactgaaaagggataagaatgttcttatgcangaacttgntaggttgagacagaaacagcaagggactgataaccatttgaaaatgttggcaacgtgtgcagtcaatgagcagcgtcagc

SEQ ID NO: 27992 - DNA, 792 bp, Glycine max
  Clone ID: TF_GmC12036_2
cgctttctctctcgaaactgcatagcgtcagcgtagttgcaaattccaggttttcttcctttagcctagcttttactcattatctctctttctctctctctcagaggttctagaaagatccactccgaaatggacggtgcgccacaatccgccggtgccggaggtccggcgccgttccttctcaagacctacgacatggtggacgatgcctccaccaacgacatcgtttcttggagctccaccaacaacagcttcgtcgtgtggaaccctcccgagttcgctcgcctccttctcccgacctatttcaagcacaacaacttttccagcttcatccgccagctcaatacctacgtaagtttttcgattcctttgtttcgccttcggattcatggcgcgcttccttcgttttaattggattctaattcgttcttctgatttatgtcttccgtttaattgtttgcatgtattgattgtgcctttgcaataaaatgttgatcgccggatttgactaattttttgtaatcgttgttgttggatattggcactgagaatgttagcaatcatagtaggctgcaagcgatggttgttgtacactaatacttgacctatcttaaaatagtggttggtatctattagttccttcgtgtaagcaggtttggatgggtttttgtcactattcactaaccctaggcccctccaaaaggcatattcaatcacaaattcctttgaaaaatcctgtctccttaatactggagttgttattatcacatctttcaacttcatgaaagccat

SEQ ID NO: 27993 - DNA, 1330 bp, Glycine max
  Clone ID: TF_GmC5651_2
tgctcgagccgaatcggctcgaggcgaagacgacaccaccttcgtcgtttggcgtcctcctgaattcgccagagaccttcttcctaactacttcaaacacaacaacttctccagcttcgttcgccaactcaacacctatggttttagaaagattgtgccagaccgatgggagttcgcgaacgaattcttcaagaagggagagaaacacttgctgtgcgagatccatagaagaaaaacggctcagcctcaacaaggaatcatgaaccaccatcaccaccatgctcattctccgttgggagtcaacgttaacgttccaactttctttcccttctccagcagagtcagcatctctacttccaacgactccgacgaccaatccaactggtgcgactcgccgccacgtggagccacctcattggtgaacggtgcagcagcagccaactacaacacttccgtcacggcgctttcggaggacaacgagagactcagaagaagcaacaacatgctcatgtcggaactcgcgcacatgaagaagctctacaatgacatcatctacttcgttcagaaccatgtcaagccagtggctccaagcaattcttactcttcttctttgctactatgcaatacaccttctgccactccaataagtagtgccaataatgtttcaatgatgcaaaggccaatgaaccagcttctggggtattattctactaaccctaaacaaggagctacacaaattactcaacctcagacctatgttgtgaactctcccaccaacacatcaaggagttctataaccatttttgaagggcctgccagcagtaacattaatagctgcaagaccaagctttttggggtgtcgctgcagtccaagaaaagggtgcacccggattgtggatctaatccagagaccaacagggctcgtttggttttggaaaaagatgacttgggcttgaatctcatgcctccatccacttgttagttccactactgatgattaattctaagaaaaagtatgatatcccaagctagctagctacttatattaattttcttttacttgctttgatttgttttcttttttcttttttaactttttaaatcactactctcaagttttgagtcatggaggaggaaaacggaattcatggaaacgtgagtgtgtgtgtgcgtgcgtgggttcgtttgtgtgactgtttttgtgattctgtgtacatataacttagtgccgatattattatctttgctcccgacccatcatctattgatgtaggtgggttttggttagactaaaagatcagaaattaaagcaaaactctaaatgttcttc

SEQ ID NO: 27994 - DNA, 1993 bp, Glycine max
  Clone ID: TF_GmC790_1
ctcgagccgctatttttttataaaaaaaactattaattaaatattcatttattatttacttgaccagcaagttctttttcatttgttaaaactttatgaaattagatatttcattttctgtgaaaaaatcaattcattaaatactgctgaaaatcatggtcagaatttgagcttttggcaactatggacagaaatatgaacttttcgtatttggaggagaagcaatcctttttcggtgtcgttaactttatttttttggaggataagcaatcccttttgtggttcgctgtttccattttcagcttttttcttgtgtttgagcatttgaatctggacaaaggtttcacctttgggtgagtgattcaacaccagctatagctgggggagtgaaggtaaggttgtgagcattaatttgctttaaggggaattattaattggtgtttactgggattaatgaaacctagctagaaaggaaaatgatgggagaacaagggagtgtattttatatatatatatgtaaaaatttgtgtattgtttgtagtggttaaatttgtgaaaaaggtaaaaggttttttctttctttctgggtatacatactaaagggtttttgagagttcagtctgctttgagatttgtgttttggatgatggaggaagctcagggcagttctagttccctgccacctttcctcaccaagatttatgagatggtggatgatccttcaactaattccattgtttcatggagtgccaccaataggagtttcattgtttggaacccaccagagttttcaagggatttgttacccaaatactttaagcacaacaacttttccagtttcatcaggcagctcaacacttacggctttagaaagattgatcctgaacaatgggaatttgcaaatgatgattttgtaagaggtcagccacatcttttgaagaacatccataggcgcaaacctgtccatagccattctttgcagaatatccagggtcaaggggtttcttcgctgactgaatcagaaaggcagagttttaaggatgagatagagaagcttaaacatgaaaaagaacaacttcttcgggagttagagatgcatgaacaggagtggaaaatgtatgaggtacaattacaacactccaatgatcgtttggaaaagttggaaaagaagcaagaaaatttggtttcttctgtctctcaagtgttgcagaaacctgggattgccttaaatctcttgctgttgacagaaaacatggatagaaaacggaggttgccaagaagtggtctctttagtgatgacgctagcattgaagatcatatggaaacttcccaagtattaccaagggaaaatgcagatggtgcttctattttctcatcgagcacagaacggttggatctccttgagtcatccatgacgttttgggagaatattacacatgatgttggtgacgtctttgttcaaagtcatttaaacttggattttgatgaatctacaagttgtgcagatagtccagctatatcttgtgtgcaactagaagttgaagatcagcctaagtcacatggaatcaacgtgaattctgagccagctgtagttgcggctcctgatcttgatgcatcaaaagaacaacctgtcgaaacagctcctctgactactggtgttaatgacatattctgggaacgattcttgacagagaatcctggttcgtcagaaatgcaggaagctcagtctgaaagagaggattctgatggcagaagtaatgccaaattttggtggaacattaggaatgtaaataaccctccagaacagatggggcattcttagcaaagcagagcaaacttagttgcaattgattattccttttagcttgtgatgcccctcaattttcatgtaataaatgtaggtatacatattctatatttttggttaaatgattgcatcctctatagaatttagtcaatttttatactgctcactctcttttagttctctata

SEQ ID NO: 27995 - DNA, 3389 bp, Glycine max
  Clone ID: TF_GmC688_3
tgaacatgaaccccaacgatggcaacaactctcccagtcccaagcccttggagatggtcaacccggttcctccgtttctttctaagaccttcgacctcgtcgacgccccgactctcgacccgatcatctcgtggaactccacgggcctcagcttcgtcgtgtgggaccctctcgagttcgcgagaattgtccttcctcgacatttcaagcacaacaacttttccagcttcgttcgccagctcaatacttatgtgagtatcatttcaatcaaagaaataactgtgttttggttttgttttttgggtaggttggtatgtaatgttttctttggctgtttttgtaatttggtatgtaagtattttttttttattatgggcgaattttagtttgttatgttagattttttttttttttatcaatgttagtttgatagtttgactagaaatttcagcagcttggagattcgaacctcgaactcttctgtctccctttctcgtgggagttttcaattttatatctctgttagtggaagaagcacttgctgaagaacataccaaggcgcaggtcatctcaatcccagcatggttggtagctatattggaatcgattgttctactgaggcaggaaggtctgatgttgagattgagatagaaaggcttaggaaagaaaggactatgttgatggaagaggttgttgatttgaaacaagagcagcgaagaatggctcaccgcgcagtgaaggaatcttctgaatgcgtgtgggtttgtaatggttgggtgtgtagtgtgtttgtggagggaggtagaatgatgcttaactttgtttaaggccttgtttgtttgtttacttatttcaagaatagttttttgtttttagaaatttgtctgtcccagcccttgatcatattgggaagtgtttgtcccatgagcatattttttgttttttaaaagtttgtttttttgagtacttggatagagagtacttgaagaaaaccaaaagatggggaaacatctcctagtttttgccttttgatttttaaaactcttgttttagaaacgattttcaaaacttaatgggttttggatgagaaattaagcgctaagttgtatcaaattgatttagaaaacaatttttaaaacaaatagtgagaagacaatcagacaagccctaagtttcttggcttgtgttttctcatttgttaaaggcagggttggtttcatatttgaataaagattgtaggacacctccactctagttgacacctagagagataaagagagccaagagagaaatatataggtataataggtaatataatataaaaggaagagaaagatagagataaatagtaggtgttaatgaggtgttcctaagggatttagcagtttcgggttattttcttttctttctaacgagtgaagggcattctgcttaaattaagagagttcatcaaccctcaagctagctcgtgccccatatcgtatcgtttgaaatgatggaatgttcacatatcactactctaatattttgttatgttgaatctgctatttgtaattgctatcttgaggtgtacttttttgaatctgctatttgttcctaaggaatatttctcaatgatggaatgttcacatatcattacttatggaattgagtaataagaatatggtttggatgtttaccatttgcattgtagttaggattgagacatgagagactactactattggaagtggcaacaggagaaatattcctcctcttgtagaagggatttcatatttcacaggtagtactgtactactactcagggttctgtgggttgtttgtgtcattttgacttttccttatgtctgtgtaaagcttgctttggatttgcagattgcattaatccaatacaagcttgctctctctattagctcatagtgcctaagtttcagtgtacctaaaccatatatcttgttttgctttgctgatctttcttcccttttccctcctcctcattcttgtcttggggctttctgcttctgctccattcattctcaggtaacttggtgtttgtcttcagggattccgcaagattgacacagacaagtgggagtttttcaacgaagctttccagcgagggaagaagcacttgctgaagaacatccaaaggcgcaggtcatctcaatcccagccggttggtagctatattggaatcggatcttctaccgaggcaggggggtcagaggttgagattgagatagaaaggcttaggaaagaaaagactatgctgatggaagaggtggttgatttgcagcaagagcaacgaagaacagctcaccacgcaggagaagtgaatctaaggctccaatctgcagaacaaaggcagaaacaaatggtttctttccttgccaagttgatccaaaaccccgcctttttagcccgccttagacataagaaggagcaaaaggaaatagattctccaagagtggtaaggaagtttgtcaaacagcaccatgaaactggaacaacaacaacagcagaaactctccaagaagggcagatagtgaggtatcaacctgattggagaaatatagccatgtcttctgaaactccaaaactaagttcagtttccattgaacaatctcctcactacctttcacagggtttggcaggagaaatgagtgtagtaggtgcagaagaccttactgctcaaattgacaatattgtatcagatgatttggctgcagtgcaccggattacgccatctcaagaaatgatgattggagaaggatcatctacctttggagctgaagaccccctcttcaaagggaagagtgtcatgagtccaattctagaagttcctccagagtattttccttccttcccagagggtttgaccaaggagaagaaagactttcaagatttttctgctcttggaactgaaggcatgataaagctagaagatatatgggactctggcctcaatgttagtggtgctgctttaagcagtgggaatgagctgtggggcaatcatgtcaactatgaagagtttccacaatttggagtcacaagtggtatgtctgactcagatatctgggatattggcttaggaagttttggaattgatacgtggccaactgatgaaccttctcttggtgaaacagatggtcaatctggtcagccaaatgaagataggtctaagaattttgatccatagggcttctttggtcctctgcacttgttgccctttggttactttgctatatttatggttcctaggggtcatattattgaatcatttgacttataaacattattccttcacctgctttcattccttatttactttcaatttttcttattcttttagattaattaattctttaattgtccatatttttctttgt

SEQ ID NO: 27996 - DNA, 2895 bp, Glycine max
  Clone ID: TF_GmC1242_1
ccacgcgtccgcagtccgcaacaaaccaaagcaagcatccaaaaacgcacactctcacatcacaatgctctcttcccattcccctcctcctcctcctccttccttctccaccactacttcaacaacaacaaccaccttcacttcttctccatgcccaagaagaatctacctgaataatcccacacagattccaaaaccatacccatacacacacctttttacacatcactcttcattgcttaataattattttactaacatgaatccctcttgtcgcttctcttcaactaaacacacccctttccttcacaactccaaacccacttcccctttcttccttagacactctcactctcattcccaccaagtgaaaccttttcccttatcccctccaataacaacaacaacagcaaagccttatcctttaaacattctaaggctcagaaacatcaaactctctcaccctttggccacgctatcatctttcgcggagggagaagaagagaatcagaaggagggagcagagtcaccaccgaacaacgatgaattgggaggaattgcgaaggccttcaacatatcgtctcggacggcctctgccatatcgatatgcatggcattggcggttctcacttttccgctgttcatgacttctttggggcaaggcatggctctgaagacgaaggtgctctcttatgcgacgctgctgttcgggttctacatggcgtggaacattggggcgaatgacgtggcaaatgccatggggacctccgtggggtccggcgccctcacgctccggcaggccgtgctgaccgccgcggtgctcgaattctccggggcgctgatgatggggacgcacgtgaccagcacgatgcagaaggggattctcgtcgccaacgtgttcaatggaaaggattctttgctcttcgccgggttgctctcgtctcttgccgctgctggtacttggttacagtttgcatcatattatggttggccagtatctactacacattgtatagtgggagcaatggtggggtttggtctagcttattaataatccattatcgaacccacaaacgcctccctttttcctttgctatccactccatgattttagtctcctctccgaaacttctagaaacaactacaacctaccgctcatttttttccggttccgaccctctttctgccctctcagtaaccttatcagatccgatcaaggtaaccaaataatatcacaagttattcttcttcacttatttatatttattttccttttggatttgataatattaagaggaaccaggatagataggtaggttctagcctttctgttatcattttcgaaacaaaccaaattgaaactgtttgagttttgtttagaaggctgttatgaatgaaactttgaagcttagaaaagcggttaggtagctaggtttcagtttcagatctggtagagagcttcatcatgaagccattaccggcggagcaaaccggtgaatcagcgccgacggagttgcagagatccattccgacgccttttctgaccaagacgtaccagctcgtcgatgatccctccgcggatgacctaatttcctggaacgaagatggcaccagcttcatcgtatggcgacccgcggaatttgcaagggatttgcttcctaagtacttcaaacacaacaacttttccagtttcgtccgtcaacttaacacctatgggttccggaaggttgtccctgaccgttgggaattcgccaacgactgtttccggcgaggcgagagagctcttcttcgcgacatacagcgccggaaattactgccggttccgcctgcagccgcggcaccggcagcagtcacagccaatacggtgacggtggctgtggcagcaccggcggtgagaactgtgtctccaacgacttccggcgacgaacagccgccagcagttagaatcctccacaagcgctgtgaggaccgtgccggtgccggacgggaaggcgccgctggagcttttgcccgcgaaacatgtttcatcggctgatgacgccctgcatgtcggtggcgccgccggtgccgcggcgtgcgcgacggggaacgcggcggaagcagaggttccgaagctgtttggggtttcgattggactgaaacgatgtaggacagagtgcgaggccgaaccagaaggagaagatcagaatcagatgcaaacgcgagcacaaacacaatcacaatcgtcgcaagaaccagatcacggttcagatgtgaaatctgaaccgcttgatggtgatgattcggattatcaggatcatgaccctcattggttggagctatagggaaatgaaatgatgctccttcttcttcttgatctctctactaatttggtgaaatgacagtgcgcacttgctgcctgtactattagtgctgtgacgctgccattgggccggcacgtgacttggccatgtatttaactcgcggttggggtgaaaagtgcgaaacattgtactataaggaattatgtattcttctgattgctgggggttaaagaaagattatcatcgcgtcaaaatggagtaactgaagcaagggaaggacagacccctaaaagactcacgtctcggttttttatttcaaggaacatttgttggatacagcaaaatgtgtagatatttgtgtctgacatcattaaattttcgaatttgattcgtgtattgtaatgtttccatcctttgaaccaagtttgttcctaagcttcataattgtagcatgtatgttcttttaatgaaatgaaattctaatattatctaaaaaaaaaaaaaaaaaaaaaaaaaaaaaaaaattaaaaaaaaaaaaaccctaaaaactccaactttagaaacccttaaaagagggaaaatagcccactag

SEQ ID NO: 27997 - DNA, 1438 bp, Glycine max
  Clone ID: TF_GmC1045_2
attctgcccttccctcgcgtttcaacaccgataacccgcaaaaatctccattgatctgcgcctcctgttccatggcaaagctgcctgtggaatacaacggcgactgcgccaccaccgcctcagcatccgcctccgcagccgcggagtctcagagatccattcccacgccgtttctcaccaaaacctttcaactcgtcgacgaccaatccatcgacgatgttatttcctggaacgacgacggatcaacgtttatcgtctggaaccctaccgtcttcgccagagggctgcttcctaaatatttcaaacacaacaatttctctagcttcgttcgccagctcaacacttacggattcagaaaagttgtacctgatcggtgggagttctcgaacgagtatttccgccgaggcgagaagcggcttctgtgcgaaattcagcggcggaagatctcctcgccggcgtcgtctccgacggcgccggcgacggtttcggtcactgcgccgatgccgttgactgcgataccgatcatatcgccgtcgaactccggcgaggagcaggtgacgtcgtcgaactcatcgccggcggagcttctcgacgagaacgagcgactgaggaaagagaacgttcagttaacgaaagagctcgcggagatgagatcgctctgcaacaatatttattctctcatgtcaaattatgcaaacgccaacggaaaaggaaacagcaacggcagttacaaaactaaaggcggcgccggtgtcgcgcacggaagtttagagtccggcatgacggcggtgaagctgctggatttgatgccggtgatgcgaagctccgatgaggacgcggcggagatggcgccggaggagatgaatccgaagctgtttggtgtggcgattggagcgaagcgagcgagagagggaggaggtggtggagattgtggaggtggaggagaggaagatacgctgctgcgcctgcatcacgcgggttctgcggacgtgaaatctgagccgttggatttccagaaccatcgcgagaatcagaaaacgccgtggttgagtccgtgttacaggacaaatcaaagagtgtgcaactgacacgcggcgacggttaagcaaaggaaacattttagattagattacgtagtggcgtagggaatccgagaccggcacgcggagacgtcacgtgcgtcgtttaaccgtttgggaccgattcccagaagtttctcagaagtcggaggaaaacgatactttgtagtccttttttcttctctctctcttttttttttatataaatatattttttttgttgcatgaaattggacttggactgtagctatgcctttgagggtagtgttaaatatttcatttagttctataaattattttacttgccagggaaaactcaagattcatattcatgtgaatatatttaatagttttatact

SEQ ID NO: 27998 - DNA, 671 bp, Glycine max
  Clone ID: TF_GmC8373_1
gaattccgtaaccatactaactagtagtacttgtgttgtgccactcaaactaaactaaactcaatttccaatttccttaatcttgttgtgttgatgtacatggagagaattagagtgaaggaggaagaagcagtgacatgtggtggtggttcatcatcatcatcatcttcgtcttcaagcttttctccacagcctatggaagggttgcacgaggtgggtccccctccgtttctgagcaagatctttgacatggtagaagattcttccacggactccattgtgtcatggagcatggctcgcaacagctttgtggtgtgggattctcacaagttttctgctgacattctgcctcgttacttcaagcacggcaatttctccagcttcattcgccagctcaacgcctatgggtttaggaaagttgatcctgatagatgggaatttgcaaacgaaggttttttggcaggacaaaggcacttattgaagaccattaagagaagaagaaatgtgtcacagagtttgcaacaaaaaggaggaagtggagcttgtgttgaagtgggggagtttggactcgaaggtgagttggagaggttgaaaagagacaggaacattttgatggcagaaattgtgagattgaggcaccaacaactgaactcaagggaacaattgaattc

SEQ ID NO: 27999 - DNA, 1987 bp, Glycine max
  Clone ID: TF_GmC1242_2
gcgatctagcactccatgattttagtctcctctcggaaacttctagaaacaacaacaacctacagctcattttttttccgattccgatcctctttctgcttctccgttcgctgggtgcatgccctctcagtaaccctatcagatagatcaaggtaaccaaaataatcataaattatcattcttcacttattaatattatttatcttctttttggattggataatattaagaagaaccagcgttagctaaggatagataggttctagcctttctgttatcattttcgaaagaatctgtagcagtgtaagtaccaaattgaaatggttagattttgtttagaaagcagttatgaacgaaactttgaagcttagaaaagcggttaggtagctaggttgagttccagatctggtagagaagttcatcatggcgccgttaccggcggagcaaaccggtgaatcagcgccgacggagttgcagagatccattccgacgccgtttctgaccaagacgtaccagctcgtcgatgatccctccgcggatgacctaatttcctggaacgaagacggcaccagcttcattgtatggcgacccgcggaattcgctagggatttgcttcctaagtacttcaaacacaacaacttttccagtttcgtccgtcaccttaacacctatgggttccggaaggttgtccctgaccgttgggaattcgccaacgactgtttccggcgaggcgagagagctcttcttcgcgacatacagcgccggaaattactgccggttccgcctgcagccgcggcaccggcagcagtcacagccaatacggtgacggtggctgtggcagcaccggcggtgagaactgtgtctccaacgacttccggcgacgaacaggtactatcttcgaactcatctccgattgctgggaataataataataatacagtacaccgcaccacaagttgcaccactgcgcccgagctgttagaagagaatgaaaggcttaggaaagagaacatacaactgagtaacgagttgagtcaattgaagggtttgtgtaataacatactctctttgatgaccaattatgcttctggttttagccgccagcagttagaatcctccacaagcgctgtgaggaccgtgccggtgccggacgggaaggcgccgctggagcttttgcctgcgaaacagccatgtttcatcggctgatgaggccgggcatgtaggtggtgccgcgccgtgcgcgacggcgaacgcgggggaagcagaggttccgaagctgtttggggtttcgattggactgaaacgatgtaggacagagtgcgagggcgaagcggagggagaagatcagaatcaaatgcaaacgcgagcacaagcacaaacgcaaacacaatcgtcgcaagaaccagatcacggttcagatgtgaaatctgaaccgcttgatggcgatgactcggatgatcaggatcatgatcctcgttggttggagctaggtaaatgaaatgatgctcctccttcttctaatttggtgaaaatgacagaaggcacgtgacttgggtggggacacgctgtactattagcgctgcgacgctgccattgattgggccatgtatgtaatgtaacattacgctagatggaaagggcggatgaccatccttgtatgtaactcgcggatgggatgaaaagtgtcaaagtcaaagctttgcttgagcgccaaaatttgtaatataaggatttatgtattcttgataagctggggttaaagaacatgtcaaaatggagtaactgaagcaacccctaaaagattcacttctcgttttcctttttaaggaacatttgtgggttacagcaaaatatgtagataaacgtgtctgacatcattacatttttcgaatttgattcgtgtattctaatgtttccatcctttgaaccgagttgttcctaagattcataatcgtaccatgtttctttttaatgaaaaaaaaaaaac

SEQ ID NO: 28000 - DNA, 1849 bp, Glycine max
  Clone ID: TF_GmC688_1
ctttctcttccaccgccatcatctctccaccctccaccgccctcacacccttttaatatcctcactccccccaccacctcccactcttttcttttcacacccctcctcattcttcttcttcacactaattcagaatcaacatgaacccaaatgatgctaactctcctaagccgttggagattctgcagatgaaccctgttcctccgtttttgtccaagaccttcgacctcgtcgacgacccgactctcgaccccattatctcatggggctccaccggttttagcttcgtcgtgtgggaccctctcgagttcgcgagaatcgtccttcctcggcatttcaagcacaacaacttctccagtttcgttcgtcagctcaatacttattctcatggggctccacccgttttagttaggattgagacttgagagactactactactgctggaagttgcaacaggagaaatattccccttcctgtagaagggatttcatattccacagggattccgcaagattgacacggacaagtgggagtttttcaacgaagctttccagcgagggaagaagcacttgctgaagaacatccaaaggcgcaggtcatctcaatcccagcaggttggtagctatattggaatcgaatgttctactgaggcaggaaggtctgatgttgagattgagatagaaaggcttaggaaagaaaggactatgttgatggaagaggttgttgatttgaaacaagagcagcgaagaatggctcaccgcgcaggagaagtgaatcaaaggctccaatccacagaacaaaggcagaaacaaatggtttctttcctggtcaagttaatccaaaaccccgcctttttagcccgccttaggcatgaggagcaaaaagaaatagattctccaagagtggtaaggaagtttgtcaagcagcaccaacatgaaactggaacaacaacacagcagaaactctccaagaagggcagatagtgaggtatcaacctgattggagaaatatagccatgtcttctgaaactccaaaactaagttcagtttccattgaacaatctcctcactacctttcacagggtttggcaggagaaatgagtgtagtaggtgcagaagaccttactgctcaaattgacaatattgtatcagatgatttggctgcagtgcacgggattacgccgtctcaagaaatgatgattggagaaggatcatctacctttggagctgaagaccccctcttcaaagggaaaagtgtcatgagtccaattctagaagttcctccagagtattttgcttccttcccagagggtttgaccaaggggaaagactttcaagatttttctgctcttggaactgaaggcatgataaagctagaagatatatgggactctggcctcaatgttagtggtgctgctttaagcagtgggaatgagctgtggggcaatcatgtcaactatgaagagtttccacaatttggagtcacaagtggtatgtctgactcagatatctgggatattggcttaggaagttttggaattgatacgtggccaactgatgaaccttctcttggtgaaacagatggtcaatctggtcagccaaatgaagataggtctaagaattttgatccatagggcttctttggtcctctgcacttgttgccctttggttactttgctatatttatagttcctaggggtcatattattgaatcatttgacttataaacattattccttcacctgctttcattccttatttactttcaatttttcttattcttttagattaattaattctttaattgtccatatttttctttgtaaattctaattgtgtaattattgat

SEQ ID NO: 28001 - DNA, 616 bp, Glycine max
  Clone ID: TF_GmC92665_2
gagaaagctaggaagagaaaggaggaaaatattaaagctcttgcaattctcatgaactgtggagtcgtgttgggtttctattgttggggttgggagttcttaactgcccttcttctcttctctcatcaaccttattgatcattctcttcttcctcttcttcttcaaaaaccaatttctttttatacaaataaagaagataccaaagaaaaacatagcaaaaaaataaaaataaaaaaatggaaggaacaagcaataaggggttgttggaatgtggaaggaagtgcactccaccgccgtttttgttgaagacttatatgcttgtggaggatccggccaccgacgacgtcatttcgtggaatgccaaagggacggcgttcgtggtgtggcagccgccggagtttgctcgggatctcctcccaacactcttcaagcacagcaacttctctagctttgtacgccagctcaatacttatgtacgtttcggaaagatattgcactctattaggataagcatatgattgcatcaagaaattctgcctaggggtattgctttaacaacttgaacttatattaaggatgtaacctctattaaacaaaaagttgcggacagggggg

SEQ ID NO: 28002 - DNA, 632 bp, Glycine max
  Clone ID: TF_GmC1242_6
gcgacgcaagctcagcggctcgagtttcctatcctctcctctccgaaacttctagaaacaactacaacctaccgctcatttttccggttccgaccctctttctgccctctcagtaaccttatcagatccgatcaaggtaaccaaataatatcacaagttattcttcttcacttatttatattattttccttttggatttgataatattaagaggaaccaggatagataggtaggttctagcctttctgttatcattttcgaaacaaaccaaattgaaactgtttgagttttgtttagaaggctgttatgaatgaaactttgaagcttagaaaagcggttaggtagctaggtttcagtttcagatctggtagagagcttcatcatgaagccattaccggcggagcaaaccggtgaatcagcgccgacggagttgcagagatccattccgacgccttttctgaccaagacgtaccagctcgtcgatgatccctccgcggatgacctaatttcctggaacgaagatggcaccagcttcatcgtttggcgacccgcggaattcgctagggatttgcttcctaagtacttcaaacacaacaactattccagtttcgtccgtcagcttaacacctatg

SEQ ID NO: 28003 - DNA, 380 bp, Glycine max
  Clone ID: TF_jC-gmfl02220076c10a1
gctcggaattcggctcgagctctctcttaatttttctccataggctcttcttctagacaactgtgaaggcattttactctcttaggactcacacaaatcagagcctgctcctttcctcaccaaaacataccaactggtggatgatcccgccacagatcacattgtgtctaggggcgaagacaacaccaccttcgccgctaggcgtcctcctgagttggaaagagaccttgttcctaactacttgaaacacaacaacttctcaagctgagttcgccagctcaacacctatgggtctagaaagatagagccagaccgatgggaggtcgccaacgaattcttccagaaaggagagaaacacttgctgtgccagatccataaaa

SEQ ID NO: 28004 - DNA, 357 bp, Glycine max
  Clone ID: TF_12689193
cttgggaccttctccccaactatttcaaacacaacaacttctccagctacgttcgccaactcaacacctatgtatgtatcatacacccatcatgtctctcttctttttcttaatttctactcatacgttcttccgagacaatcttattcaatacattatgaaacactaaatataagagacagaacttagataccgtttagatgttttttgtttgttgttctattagaattggagtttcttcgataatgtgtctcttccttttgtttttcacattttcttctctgtgaagaggattctgtccgaaacatcattaagagacaattgtaacttagatataattattatatacttttgatg

SEQ ID NO: 28005 - DNA, 1732 bp, Glycine max
  unsure (1)..(1732): unsure at all n locations
  Clone ID: TF_GmC5651_1
ccacgcgtccgctgatcttttcattctgtctcttctcttgaattccgctctcttctctctttacttccctcaatagcaaaagctatggctcttctactagacaactgtgaaagcattttgctgtctttggacacacacaaatcagttcctgcacctttccttaccaaaacataccaacttgtagacgacccttccaccgaccacatagtctcttggggcgaagacgacaccaccttcgtcgtttggagaccccccgagttcgctagggaccttctccccaactatttcaaacacaacaacttctccagcttcgttcgccaactcaacacctatggttttagaaagattgtgcctgatagatgggagttcgcgaatgagttcttcaagaaaggagagaagaacttgttgtgcgagattcacagaagaaaaacccatcaccagcatcatcaacaagtacccatgaacaaccatcaccaccatcataagtttggactcaacgttaacgttcctactatctttcccttccacaataacagactcagtgtttccccttctcatgattcggacgaggtaataatacccaattggtgtgactcgcccccaagaggagcttgccggtgtaaacagcagcagccaactacaacacgcctaacagcaacattaacagctgcaagaccaaactttttggggtgtcgctgcagtccaagaaaagggtgcacccggattatggatctaatccagagaccaacaaggctcgcagaaccatgtcaagcccgtggctcctagcaacaacaacaatttcccttcttttctactctgcagtgataatagtaatatcaacaacaacacatcaccacaaacacaaacacaagcacaagcctctcctatgagtaaggtttcaacggtgcaaaggcaactgaagcagtttgtagggtgctattccaacaacacaaagcaagcgcgtgctgtgaactctcccactaacagttccataaccattgttgaggaagaggctagcagtaacagttgcaagaccaagctttttggggtgtctcttcaatccaagaaaagggtgcaccctgagtacgggtctaacaatgttcttcaaagctccgaaacgaataaggcgcgtttggctttggaaaatgatgaactattaggcttgaatcttatgcccccttcaacttgttaattagttagttaagttagtcctcccaaaattcataaccttagaaccttgctattttctaattttaattgcttcatatatgtataaatatatatatttttcttctttaatcccttaatttgagttttgaagaaggcaaatgctgttgatggaagcttgtgttcgtgcgtgatcctgtgtacatttaacttggtgccgaggttatatccttcgtttttccttaaaaaaagaaaaatccaaacattattgggagaagatccagtccaaaaaaagggagcacccggaatatggatctaatcagatgaccaaacaggctagtttggttttggaaaaggataacttaggcttgaatatcatgcctccatccccttgttagttcccctactgatgattaattctaagtatgatatgatatcccaagctagctatatagctgcttaaattaattttcttttaatacttgctttgatttgttttctattttaacttttaaatcaccacactcaagttttgagtcttggaggatgcctattaannnnttat

SEQ ID NO: 28006 - DNA, 649 bp, Glycine max
  Clone ID: TF_GmC12036_4
gcaaattccaggttttcttcctttagcctagcttttactcattatctctctttctctctctctcagaggttctagaaagatccactccgaaatggacggtgcgccacaatccgccggtgccggaggtccggcgccgttccttctgaagacctacgacatggtggacgatgcctccaccaacgacatcgtttcgtggagctctaccaacaacagcttcgtcgtgtggaaccctcccgagttcgctcgcctccttctcccgacctatttcaagcacaacaacttctccagcttcatccgtcagctcaatacctacggatttcgaaaaatacatccagagcgatgggaatttgctaatgatgagtttctgaaagatcagaagcatcttcttaagaatatatatcgcaggaaacctatccacagtcatagtcatcctccaggttcacttgtagatccagaaagggcagcatttgaggaagaaatagacaaactttcccgtgagaaaacttcttttgaatccaatatttataacttcaaacaacatcagtcaacagcaaagcctaagctagaagattttctgcagcgattagatggtattgagcacaggcagaagcaattgctgaacttcttgagagggctcttcagaatccta

SEQ ID NO: 28007 - DNA, 573 bp, Glycine max
  Clone ID: TF_GmC864765_1
ctttttaggcaacagctagagagtacttttaaattatcaagcatggctgataattataatgtgttagagctcaacattggtttaggcaacaacaacaacagcaaagttggtggtcatgcagggcaatcaccaaggcaaaggtgccctgcaccgtttctgttgaaaacgtacgaattgttggaagaattaagtgagaatgaaaaagatagcaccaaaattgtgtcgtggaatgcagaaggaactggctttgttgtgtggtccccagctgagttctctgagctcaccttgcccagatatttcaagcacaacaacttctctagcttcattcgccaattgaatacatatggatgtaagttattgtcctcctacctttgcgagctcgtgcccggcatgcttcagcgggcctgctggcacagtctagccgaaggcacgaggtgattgtgcctgccatgtgtggtgcctccattcctgatgccttcttctgcgggttttcttccatcgtgtcccgcggaggtattctctgatcgtcgtcctctccgcattgaagttagttatttatcaactttcttgaat

SEQ ID NO: 28008 - DNA, 1561 bp, Glycine max
  Clone ID: TF_GmC403_2
acgcctgcaggtacgggtgcgcagtgtcccggggggaccccgcgttacggctgcgagaagacgacagaaggggacaacaccctctattaacctttctctctcctctctttcctctctcttggaacaaacgacaagttatggtagtatttgtcattcatttcacaaaactggttcacctttggacccatggcttctaaaaactccacgttgttccagtctcgcttcttcctcttcggcttctattgctgggactgggagtttctcaccgctcttctcctctttagttcttcttcctaatcaaataaccttctccaccatacataaacctttttttttttgtcttttgtacttaaatttctcattactacatcaacaaaagaggcatagattttttcttcttttattaaaataatagtttgtgaggtaggtggagggtagatcgggaagaaaaatgtcgcagcagcagcgttcgatgccggcgccgtttttgacgaaatcgtatctgttggtggatgatcccgccaccgacgacgtcgtttcgtggagcgaaggtggcaacacctttgtcgtttggaaacacgccgatttcgctaatgatttgctccccaagtacttcaagcacaacaacttctccagcttcgttcgccaactcaacacctatggattccgaaaaactgttcccgacaaatgggaattcgccaacgagtatttcaagcgaggacaaaaggatcttctcgccgagatcaagcggcggaagacggtgtcttcggtgtccggaaaatccggcagtggcggtaacatttcggcgtcccactccggcggcgatgacatggggtcgacatcgacggggtcgatggaggcggcgacggcgacagtaacaacgactcagtgcgcggatttatcgggcgagaacgagaaattgaagaaggacaacgagaaattgagcgacgagttagcccgcacgaagaaacattgcgacgatttggtggcgtttcttagagactcgctgaacgtgggccccgatgtgatagattgcatcattcggcaaggaacgtgtgggtccagcaacgatgatgcggtgcgttttgatgctactgaaaatcttaataatcataatcatgatgacgacgaaaatgcggtaggtgagtgtgaaccagaacaacccaaaggtgacaatggagaaagtttgaaactgtttggggtttggttgaagggtcaaaatgggaaagagaattcaattggtagctgccgcaagagagggcgccaagaccctattgctgccactgccaaggaattgaagacccttgtctaggacatatcctaaggttgttaattaattaccttataatatttcaagaaacaactattatagtcagatctagaacacaaaaaagaactctctcttggtcatcatggaacatgtatggtcgatagtagttgttgttaattcatggcattttgtagtttggtttggtgatggtgcaagggacttcgtaaattatactaataatgatgatgattaaaaaaaaatgaaaaagcattaatttgtatgattggattt

SEQ ID NO: 28009 - DNA, 1624 bp, Glycine max
  Clone ID: TF_GmC403_1
cctcgagccgaatcggctcgcgtcaccctctattcacttctctctctcaaaacaagttatggtagtatttgtcattcatttcacaaaaccggttcacctttggacccatggcttctaaaacccctaccttattccactctcgtttcttcctcttcggcttctattgctgggactgggaatttctcaccgctctcctcctctttagttcttcttcctaattaattaaattacatacaccttttctttttttttttttacctaaatttctcattactacaacatcaacaaaagaggcataggttttttttttcttttcttcttttattaaaataataatagtttctgtgaggtaggtggagggtagatcgggaagaaaaaaaaatgtcacagcagcagcgttcgacgccggcgccgttcttgacgaagacgtatctgctggtggatgaccccgccaccgacgacgtcgtttcgtggagcgaaggtggcaataccttcgtcgtttggaaacacgccgatttcgctaaggacttgcttccgaagtacttcaagcataataatttctccagcttcgttcgccaactcaacacctatggattccgaaaaactgttcccgacaaatgggaatttgccaatgagtatttcaagcgaggacagacggatcttctcgccgagatcaggcggcggaaggtggtgtctccggtgaccggaaaatctaccggcggtggcgttaacatctcggcgtcccactccggcggcgacgacatggggtcgacatcgacgggatcgatggaggcggcaacggcggcgggcgctgatatatcgggcgagaacgagaaattgaagaaggacaacgagaaattgagcggcgagttagcgctggcgaagaaacaatgcgaggagttggtggcgtttcttagagactcgctgaacgtgagccccgatgtgatagagcgcatcattcggcaaggaacgtgtgtgtccagcaacaatgatgcggtgcgttttgatgctattattaataatgatcttgatgacgacgaaaatgcggtaggtgagtgtgaaccacaacaaccaccacccaaaggtgacaatggagaaagtttgaaactatttggggtttggttgaagggtcaaaatgggaaagagaattcaattggtaaatgccgcaagagagggcgccaagactaccctattgctgccactgccaaggaattgaagaccctagtctagtacaacatatcatattcttgttaattaattaccttttaagaaacaactattgtagccagatctagaacacaaagaaaaatactctcttagtcatcatggaaaatgtatggctctttcatggtatttcgttgtttggtttgatggtgcaagggacctaataaaggatactaatgatgatgattaagattatgtttatagacattaatttgtatgattggaaataaatgtgtcttgtttaaggaatttgacattgacggtctcattattacgtgggacagagctattgtagtaccatgccaattttaattactgtatgactgtgtatgtttgattttccgttataaatagatgtcggtagcaaaaaaaaaaaaaaaaaactcgagactagttctct

SEQ ID NO: 28010 - DNA, 1465 bp, Glycine max
  unsure (1)..(1465): unsure at all n locations
  Clone ID: TF_GmC662_1
nnaaggctcgagcagactttctctctctctctttctcactctctctctctctctctctctgtcacgcacagagaaaaactcagacacccacgttcacacttcgcacacaccatctctcactgttctttcttcttcctctttttctttttttttttcttttctcttaatggaatgatggaacacaacatcatcgtcaacaacaacgtgatcgcaccgtttgtcataaaaacctacaatatggtgaacgatcccaccaccgataaactcatcacgtggggcccagccaacaacagcttcatcgtcctcgatcccctcgacttctcccactccctcctccctactttcttcaagcacaacaacttctccagcttcgttcgccaactcaacacctatggtttcagaaaggtggatccggatcggtgggagttcgcgaacgagtggttcctgcgaggacaaaagcacttattgaggaacatcgtgcggaagaagcacggtggagctgggaggaccaattccaattcgcattattcgcatcccttgaagctggaggagttggacgacgaggctatggtgatggagatagcgaggttgaaggaggagcaaaaagcgttggaggaagagcttcatgaaatgaacaagaggttagagacaacagaaaaacgaccacaacaaatgatggcttttctgtgtaaggttgtcgaggacccgcagattctttctcggattctccgagaaagagaaaagaaacacctgggagagaaaaagcgacgcctcattccgcctccgccgccgacggcagcgacgtcgtcgtcgtcgtcctccggcatcaagacagagttcgaagaagacgaaggtaattataatatcaagtcttcgtcgccggagacagggttggaaatcgacaacaatagtaacaatatttgttcgccgccgccgctggggtgttggggtgaacagggttgttatgggtacaattgcgcctccgtgccggcacctttgacggtggtagcgccggcgtttccgacgatgggaggagggtatttgaggcgtggggggttttggggggaaatggcggcggaggggaatgcggtgccgccttatccgttttcgttgttggaagggggcttttagatttagttttaggttatgaaatgaatgaattattactgccacaaaatttcatcttggattttctgtcgtattgaaagttctatccttttttgtgcgttgattctgtgtaaagaaaaaaggttgggaaaaagagtaaaaaggtagtgggaaaattgttagatatttatagttgtgttcggtttcaggttttttttttcataaatattgtttttaaataaatgctttgcggatggtgtagatcaagtaacatagagttgtttcaatttaatgagtaggatcggattagaatcttgcatatataattatgtaaaatattcaaactgtgagttttgtt

SEQ ID NO: 28011 - DNA, 1750 bp, Glycine max
  Clone ID: TF_GmC114_1
ccaatccactgttgttgttgttgtctaaagcaaaataaagtggctagtgtacgtgtggattcgattttcgtttggtccaaaattaacattaggattttatagtagtgcttctcaaaatttctagaacccacgtcacacttactctgggaaggatggggttggaaaatgtctggttccgtattatataagagtctcgccctagaatcctcgagcagaagaatttaattcactgtactttatccttttgtgtggggaattatggtaattgattttgagggtttgactactcatggattatgatggtatgagaaaaccttccaaaaacttatttcactctcgcttcttcctttttgggttctattgctgggattgggagttcttgaccgctctcctcctttttagttcttccccttaatcttctttcttcacaatttttatttccttccttattagacgtattagatcagattgaacaaaagggtttttctttctttctttcttggggaataatagaaataagaaaagattagtgaggttgaaatgtcgcaacgatcggtgccggcgccgttcttgacgaagacgtatcagttggtggaggatcaggggacggaccaggtgatatcgtggggtgaaagtgggaacacttttgtggtgtggaagcatgcggattttgcaaaggatttgcttccaaaatatttcaagcacaacaacttctccagctttgttcgacagctcaatacctatggattccgaaaaattgtgccagacaaatgggaattcgcgaacgagcatttcaagcgagggcagaaggagcttctctccgagatcaaacgccgcaagaccgtgcctcaatcgtcggcacatcccccggaggccggaaagtccggcggcgacggcaactctccgttgaactccggcagcgacgacgcgggctccacctcaacctcgtcctcgtcctccggttccaagaaccagggatcggtggaaacaaacacaacgccttctcaccagttatcgagcgagaacgagaaactgaagaaggataacgaaacgctgagttgcgagctggcacgtgcgaggaagcagtgcgatgagctcgtggcttttctcagggaccgtctgatggtgggtcccgatcagatcgatcgcatcatgcggcaaggaagttgcggatctgaaaacgcggtaggtgaaggcggtggtggaggacactgtttgaaactgtttggtgtttggttaaaaggggatacactaacagacaaaagaaacaaccacaagagaggccgcgaagaccaaatgggcttcggtgggcctcgcctcaaggagtcaaagcccgttgttgactttagtaggaataggatgatgatgattaatgaaaaaggaaaaggctaagcggtaatcatgtttgggtaaaaagaccaaatgcgctagcctatgcttcctaaacatgttgaggctgtgtaatttttaatgtacgtaggtaaatgcctctatgaatattgattgggaaattaaacaggttttaataatcaatttatggccttttatgtcaatgcatgtaatgcttaaatggcagcattctgtagactgtagtttggtttgatgatatagtggagctgcacgatccctgccaacgaggttctctgccttcattacatatggagaactaaggaatttataatagtgactatgattatatgcacaccacgttagctaaacattttcaaataatagtgggcatagtattttc

SEQ ID NO: 28012 - DNA, 1497 bp, Glycine max
  Clone ID: TF_GmC114_2
gaattccgtggggaattatggtaattaattttgagggtttgactactcatggattatgatggtatgagaaaaccttccaaaaacttatttcactctcgcttcttcctttttgggttctattgctgggattgggagttcttgaccgctctcctcctttttagttcttccccttaatcttctttcttcacaatttttatttccttccttattagacgtattagatcagattgaacaaaagggtttttctttctttctttcttggggaataatagaaataagaaaagattagtgaggttgaaatgtcgcaacgatcggtgccggcgccgttcttgacgaagacgtatcagttggtggaggatcaggggacggaccaggtgatatcgtggggtgaaagtgggaacacttttgtggtgtggaagcatgcggattttgcaaaggatttgcttccaaaatatttcaagcacaacaacttctccagctttgttcgacagctcaatacctatggattccgaaaaattgtgccagacaaatgggaattcgcgaacgagcatttcaagcgagggcagaaggagcttctctccgagatcaaacgccgcaagaccgtgcctcaatcgtcggcacatcccccggaggccggaaagtccggcggcgacggcaactctccgttgaactccggcagcgacgacgcgggctccacctcaacctcgtcctcgtcctccggttccaagaaccagggatcggtggaaacaaacacaacgccttctcaccagttatcgagcgagaacgagaaactgaagaaggataacgaaacgctgagttgcgagctggcacgtgcgaggaagcagtgcgatgagctcgtggctttcctcagggaccgtctgatggtgggtcccgatcagatcgatcgcatcatgcggcaaggaagttgcggatctgaaaacgtggtaggtgaaggcggtggaggagactgtttgaaactgtttggtgtttggttaaaaggggatacgctaacagacaaaagaaacaaccacaaaagaggccgcgaagaccaaatgggcttcggtgggcctcgcctcaaggagtcaaagcccgttgttgactttggagctgtaaatatcatgatgaagagcaacagggtttgcaactgaatgaggctctcacctcgccacgtaatcttttaagcaattaaagaaggaataggataatgattagtgaaaaaagaaaaggctaagcgataattattttgggtaaaagaccaaatgcactagcctatgctttctacacatgttgaggttgtgtaatttgtaatgtacgtaggtcaatgcctctatgaatattgattaggaaattaaacaggttttaatagtcaattatgactttttatgtcaatgcattttaatgattttttttttttctttcgaaaaacgcatgtaatggttaaatggctgcattctgtagtttggtctgatgatatagtggagcttcacgatccgtggt

SEQ ID NO: 28013 - DNA, 438 bp, Glycine max
  Clone ID: TF_11689459
aacatggtgttcactttcgagtctcagaagtcagtgccagcaccctttctgacaaagacataccagcttgtggatgaccctcacactgaccacattgtgtcatggggtgaagatgaaaccacatttgttgtgtggaagccccctgagtttgccagagatcttcttcccaactatttcaaacacaacaacttctcaagctttgttaggcaactcaacacctatgtaagcatccttatcttttcttatgtacttctctacaatccctattcttcatctttgcttcatttcacttcattgagtttgaaggtaaagctctttccatttgagcaaattgaccaaatacttatgttagaagttaaatatgatggaacttaagttctttagtataactagagatctaacattcctttttgttccattatcttgaactacataagg

SEQ ID NO: 28014 - DNA, 1226 bp, Glycine max
  Clone ID: TF_GmC1086_1
gggtttcttggagaaagttcttccttttgtggtggctatgatccgcagccaataatggttgttccccaaccaattgaggggcttcatgaaactggtcctccaccattcctcacaaaaacatacgacatagttgatgacccttccacgaaccatatagtttcctggagcacagggaacaacagcttcgttgtgtgggatccacaggccttttcggtaacccttctccccaaattcttcaagcacaacaatttctccagtttgtcaggcaactcaacacctatgggtttaaaaaggttgatccagataagtgggagtttgctaatgagatgtttcttagagggcaaaggattcttctgaagaacattagaaggaggaaagcaaatcatcatcaatcccatcagcacgcgatgcagcaaggtgtagaagagccttttgttgaggtggggcagtttgaattagatggagaaattgatcggttaaggcgagacaggcaagttcttatggtggagttggtgaagctcagacaacagcaacaaagtaccaaatctcacctccaagaaatggaaggaaggatcaaaatgactgaacagaaacagaaacaaatgatgaatttcttggccagggcaatgcagaatccaaatttcgtgcaacaattggctcagcaaaaggagtgctcgagggagcttgaggaagttttttccaacaagaagaggaggcctattgatcaagggcctaatgttgttgaagttgccgatgacgatgatgagttattaggttgtgctgaagagtgttcagatttcgttaaacttgaaccgcaggaatattacagtgatgacaaggtattagagtttgaggtacctgacttggaccttgctttgaatctcgatgaggagaatattgaaagccagaagagaataatggaggaagaacatgttcaactagaaaatagtagagagagatatattgatgaagtgttttggcaagatttgctcaatgagggtatagaagatcaaggtgtactaggtgttgaagatgtagatgtattggccaagcaactaggttatttggcctaaataggagattatcaaggctgtattttctattattcattgaactagctgggtgacagtatctccttataattccttagatgtatactttctgaccagtttttgtgtagccagactcaatttcttggcccaaatttaaagcacgtggttatcaag

SEQ ID NO: 28015 - DNA, 870 bp, Glycine max
  unsure (1)..(870): unsure at all n locations
  Clone ID: TF_GmC1242_3
ggctcgagccacggacgcccccctttttcctttcctatcctctcctctccgaaacttctagaaacaactacaacctaccgctcatttttccggttccgaccctctttctgccctctcagtaaccttatcagatcgatcaagggaaactttgaagcttagaaaagcggttaggtagctaggttgagttccagatctggtagagaagttcatcatggcgccgttaccggcggagcaaaccggtgaatcagcgccgacggagttgcagagatccattccgacgccgtttctgaccaagacgtaccagctcgtcgatgatccctccgcggatgacctaatttcctggaacgaagacggcaccagcttcattgtatggcgacccgcggaatttgcaagggatttgcttcctaagtacttcaaacacaacaacttttccagtttcgtccgtcaacttaacacctatgggttccggaaggttgtccctgaccgttgggaattcgccaacgactgtttccggcgaggcgagagagctcttcttcgcgacatacagcgccggaaattactgccggttccgcggcgtgcgcgacggggaacgcggcggaagcagaggttccgaagctgtttggggtttcgattggactgaaacgatgtaggacagagtgcgaggccgaaccagaaggagaagatcagaatcagatgcaaacgcgagcacaaacacaatcacaatcgtcgcaagaaccagatcacggttcagatgtgaaatctgaaccgcttgatggtgatgatttcgattatcaggatcatgaccctcattgttggagctatagggaaatgaaatatgcntcttctttctcttgatctctctactaattg

SEQ ID NO: 28016 - DNA, 1621 bp, Glycine max
  Clone ID: TF_GmC802_1
gccaccgccttctcatcctttataaactcataccttgccttcgtcttccctcgagccgctcgagcccatgaactcgtctccgtcttcttcccagttaccttcatcaagcgctgattttgacaagtttaatagtttgccgcgcttccgcccacttgaatgcttgcaagggaacccggttccggcgttcctgtccaagactttcgaactcgtcgacgatccctcgctggatccgatcatatcctggggctccaccggtgttagcttcgtggtgtgggatcctaccctgtttgcaagacacgtcttgccgaggaatttcaagcataacaatttctccagttttgttcgccagttaaatacctatggattccgcaagattgacactgaaaaatgggagtttttcaatgaagctttccagcgaggaaagagacatcttctgaagaacatccggaggcgcgggccacctcagtcccatcaggttggtggcaatattgtgccttattccgatgcagataaggccgggcttgaatttgagctagaaagtctaaggaaagaaaggagtgtgctaatgcaagaggtggttgagttgcaacaacagcagagaacgacacttcaacgtgcgagacaggtgaatcagaggcttcaatctgcagaactgatacagaaacaaatggtttctttcttggcaaggttatttgaaaagccagcatttttaaccagtctccagcatgcgaaggaacaaagagatttagggtgtcctaaagttagaaggagatttatcaagcagcaccaaggccaaacagaaatatcagattttttaaatgaagggcagattgtaagataccaacctgattggagaaatgtaaccacctcttctgaaatacaagaaatgtatccagtttcacttgaagagtctccaaattacctttctcaggctttggcaaaagaatttagtgaaggcacagagaatctgatatcagatgaagtcatgtcaattgctgacaccatggggtttaagtcatcaagctttggacttgatggtaaccttttcaaagggaaaaatgtcatgagctcaaacgaaggtcttcttgcagaggagtttgtgtctttcccagaggatttgaccaaggagacaggatttccagagttttcacctcttggaactgaaggcatcatcaagcgagaagataaacggaacaccaactttgatgttagtggtgctgattcaagctctgggaatgaacagtggggaaatcctatcaattatgaagtgccagaatttgtagtcacaagtggtatgacagacatgtgggatattaactatttaactcacagcaagtgacagaaagtatcccaactgatgattcaacacttgatgaaaaagaaagataatataaataagaatatggatgcatcgggcttcatctgcttctgcacatattgtgctgtgtttagttcccaggggtccaattattaaataaattgatttgtaactggtgctcattcactaatcaccaggtttcattcttttagattagttgtgtagttgttcatgctagtagttatgaaccaaattcttaatttaaatatgttaagatttaaagaatttgtgaaactttatatc

SEQ ID NO: 28017 - DNA, 860 bp, Glycine max
  Clone ID: TF_GmC790_2
ccttctatcaatctccttcaaaatggtaatttaccttattttattgtatttctagttttttattaaaaaaactagtaattaaatattcatttattatttacttgacctgcaagttctttttcctttttaaaactttatgaaattagatattccattttctctggaaaaaaaaaaccaattcattaatactgtcgaaaaacatggtcagaatttgagcttttggcaactatggacagagatatgaactttccatatttggaggagaagcaatcccttttgtgtttcgctgtttccattttcagcttttttcttgtgtttgagcatttgaatctggacaaaggtttcacctttgggtgagtgattcaacaccagctatagctgggggagtgaaggtaaggttgtgagcattaatttgcttgaaggagggtttgtgaattgaattggtaaaaagggtctctgttttatgggaattattaattggtgtttactgggattaatgaaacctagatagaaaggaaaagggggaagaacaagggagtctattttttatataaatatgtatattgttttgtagtggttaaatttgtgaaaaggtaaaaggtttttttctttctttctgggtatactaaagggcttttgagagttcactttgctgtgagatttgtgtttttgatgatggaggaagctcagggcaattctagttccctgccacctttcctcaccaagacttatgagatggtggatgatccttccactaattctattgtttcatggagtgccaccaataggagtttcattgtttggaacccaccagagttttcaagggatttggtaccccaaatactttaaagcacaacaac

SEQ ID NO: 28018 - DNA, 438 bp, Glycine max
  Clone ID: TF_GmC5805_1
gtttcgtggagcagaggaaacaacagcttcgttgtgtgggatcctcaggctttttccatcactcttctccccagatacttcaagcacaacaacttctccagctttgtcagacaactcaacacctatgggtttagaaaggtagatccggataagtgggagtttgctaatgaagggtttcttagaggacagaagcatctattgaagaacataaggagaaagaagacattaactaatcaacaacaagctcttccaatagaccattgtgttgaagtggggaggtttggatcattagatggtgaagttgatgcattgagacgtgacaagcaagttctcatggtggagctagtgaagctcagacaacaacagcagaacacaagatcctttctccattccctttgttgaaccaattgttgcaagaagttggggttcctagatcgc

SEQ ID NO: 28019 - DNA, 414 bp, Glycine max
  Clone ID: TF_GmC1855_4
ggatgctaaataggtaattcgagcaaggcgcaaccccaaagagggtgaccacaaccttgattcaatccattcccctttcttctccaacaaattagggtttcccttttcccaacattgccacgcattccctaattactctttctttcttttcttttccacttaaatttaatttcttgatatggaaggcggcgggtccactccggcggcgccgattccgaacgcgaacgcgccgccgccgtttctgagcaagacctacgacatggtggaggacccttccaccgacgcgatcgtgtcgtggagcgcaacgaacaacagcttcatcgtgtgggacccacccgagttcgccagagaccttttgcccaaatacttcaaacacaacaacttctccagcttcgttagacagttaaacactta

SEQ ID NO: 28020 - DNA, 255 bp, Glycine max
  Clone ID: TF_LIB3139-119-P1-N1-A12
agaaatgatttttgaggacgaaatgacatatcgtgcgggtgtttttttctatcttgaccaacacttatcattatgttgtaagatcattttacggaccaagtgatatcatggtgtgaatgttttaacatttttttttttgtttaagctagcttattatgcaaaggatttgttttcatattatttcaagcacaacaactttttcagttttattcgacagttaaatacctatggatttttaaaaattgttccatacaa

SEQ ID NO: 28021 - DNA, 2071 bp, Glycine max
  Clone ID: TF_GmC1065_1
ctcttcacccatcaaaaaaaacactcaatgaagggagttacagtgaaagttgaagaaacaatggcgtatgctaatgctgcttcaactagcccaacaacatcttcaaacctctccccgcaacccatggaagggttgcacgaggtgggtccccctccgtttctcaccaaaaccttcgacgtggtggaagacccatccaccaacgacatcgtttcgtggagcagatcccgcaacagtttcgtcgtttgggactctcacaagttctctaccaccatcctgcctcgctacttcaagcacaacaatttctccagcttcgtacgacaactcaacacctacggttttagaaaaattgatcctgacaagtggtagtttgcgaacgaagggtttttggcggggcagaggcaattgttgaagacgataaagaggaggaggcacgtgacagtgacacagacacagtcacacgagggaggaagtggggcttgtgttgaattgggggagtttgggttggaaggtgagatggagaggttgaggagagacaggacagtgttgatggctgaaattgtgaggttgagacaacaacagcacaactcgagggagcaattgggagaggttgaggagagacaggacagtgttgatggctgaaattgtgaggttgagacaacaacagcacaactcgagggagcaattgttgtccatggagactaggttgcaagccactgagaagaaacatcaacagatgatgaattttctggctaaagcactcaacaaccaggcttttattcagcagtttcttcaaaggaatgctcagaacaaagagttgcaaggtgcgagaagaaagaggagactaactgctaccccaagtgtggagaatttgcagcaagatcatttcgctttgtcaattgaagaaggatcggctactattgagtcacagatggagtcttttttctatttgggggagatgggtgattctgattgagaggacttgctgaaacaagacttggttgctggggtccctgaagagggagttgtgattggtgatttttcaaaagttgctgttcctgtggaggatttgattgcggatgctgatgagtggagtcctgaagaggaagttgtgattggtgatttttcacaagttgatgttcctgcgtagtggtaaggaaggattttcattatctagggggttcagataaaactttccctggatcacatgggttatcttgggtccaaaccgtagtggaaaggaaggattttcattatctagggggttcagataaaactttcccctttgaaccgtggtggtattatttcataaggcttcattgtttttttgttgatatttgtcgtttgataatttctgtgattgtaattgatgtagaatattggatggttctatatgcagcagcgaagatggtaatactagttgaagaagtggtcgacagatattgcctcattatccgtatcctttgtaaagaatatgatgttttgtgaatagctgagtattcgttgtgctagtgatgatgctatttttactcttctgttgcccagtttataactacattgtacatttttgcagggtaggttactcaaaagcagatgttcaatggggtgtgatcgactgggaaaagaagtagtattagtctaatcataatttgttggattctcaaattttcagtgttgagggaggttgtagtaagatcatttgattgattcttgtacggtggctgattccatagtggaacatcaattaacaattctttgcttaccagtcatctcacctgatttaatagaggaataagcattcgtctcccttttcaacttttattttgttcaattatttgtaatcattgagttctgttgctctttctgttaaaaggttatgttgggtacttttttttttttttttttactgaatgttgggtaatttctgagatattactccatctctatctatgaacatttcaattcttctaattaccaagtcagtccttaagttcatgtaaaaaaaaaaaaaaaaaaaaaaaaaaaaaaaaaaaaaaaaaaaaaaaaaaaaaaaaacaaaaaaaaaaaaaaaaaa

SEQ ID NO: 28022 - DNA, 567 bp, Glycine max
  unsure (1)..(567): unsure at all n locations
  Clone ID: TF_11413503
gaacacaactcccttcacttgttctccccttacacaatcattcaatcccccactttctccatgtcttctgataaacttaaatcaaaatctaaaaacaaattcgcagttgatgactctattccaacattcatccgtaaaacctatgaaatcctcgaagaaaacaaattccctgatataattgactggaactacgaaggtcttgctcttatcattaaaaaacctgctgaattttgccaaaaggtccttccactctacttcaaacacaataatctcacttcatttattcgtcaattaaacatgtacaatttccataaaagaagaactcaagacgttgaccacatctactgccatgagcttttccaacgcggcaaaaagcaccttctcaaagacatcagacgcaaaaacaacgagcacagtctcacaatccanaaaagcatggacatgcttgaaaacatcangaactccaatgacaacactggccttttacaagagaaccaacttctcaagatacttaataaagaagccgccgttaaagtctcgacctatgaaaagaaaatcaaggacctt

SEQ ID NO: 28023 - DNA, 2251 bp, Glycine max
  Clone ID: TF_GmC58_1
agtgactgattttgcaacccaatatcaaggcattactcccagcccacggtattgcccttcaaaacctacagcaccattaagcactactacaagtatacatgctgaggacaattggagtgtttcaaacttcaagtcaccaaagtcgaggtcttcaacactgaggatgaagctagctgaagatgatgacttcaatcaaaatggtttgacccatgatggaattggaaggaattctagatttaaggctatttgcgctattccaacccaacccaaaaaaatgcttagtaagttctggtctactaccaatagaactgctgctgccacttaaaagaattgagtgaaatatgtttggaacataagttgaaacaagttccatagagcttcatattctctggagggaagtggaagctagtagtccgtttcagcgtgtgtgatactttcctttcatcttcttcttctctctgcgataaaagcaaaacctaaaatttggtttaggcataggaatctgttgtagagttgatctacctggaatggagggagcatcgtggaatagtagtgtttgtgtggcaccgtttctgagcaagacctacgacatggttgatgatccttccaccgacttagtggtgtcgtggggcgaaaacaacaactcctttgttgtttggaacgttccccaattcgccacagacatcttgcccaatcattttaagcacaacaacttctccagcttcgtcagacagttgaatacttatggttttagaaaggttgacccagatcgatgggaatttgcaaatgaaggatttttaagaggtgaaaaacaacttttaaaaagtatcagtaggcggaaatctgctcatgtaaatggtagtcaacaagcatctcaagtgcataaatcagctgctggagcatgtgttgaagtggggaaatttgggcttgaggaagaggtggaaagactgaaaagggataagaatgttcttatgcaggaacttgttaggttgagacagaaacagcaagggactgataaccaattgcaaaatgttgggcaacgtgtgcagtcaatggagcagcgtcagcagcaaatgatgtcattcctggctaaggccatgcagagcccaggcttcttagctcaatttgttcagcagcagaatgaaagtagtaaacatatccctgggagcaataaaaagaggaggctccagcgacaagaagaagatagtttagccaccaaggatctccatagttctcttgatggacacattgtcaagtaccagagttccataaatgaggctgcaaaagcattatttcgccagatattgcaaataaacaattctacaacacaatcatcaattaagaaccctgatgttttccttattgatgatattccttctgccattgcatcagatagcagtagttcatccactcaggtttctaatgtgatggttccacctatatctgagctgacgtctatggaagtaggatcacagtttcctctcagttgtatgcccagtaacatatctgaggtgcagtcttcacctgctgttttgggtttctgtagaagtcaggggatggagacagaaagcagtttattgaatcatgagctgaatgttatgggggctgatactaggaacatgggggagatagatatgatgtcaactgttttagatgaggcagacgaagctgatcatttttcacctgacacagatggaatttctaaactcccagaaatcagtgatgaattctgggaactgtttttaaggccaagcccacttacagaagacacagaggaaactaaatgtagctctctaggatgtggtttgactgaagatcagggtttgccttcagaaatgggaaataagcaggaaaattttgatacaatacaacatgttgactgtcttactcaacagatgggacttcatgcattggagtactgattgtgtgtatatatgttactcacaactgaaggttgaggtcccctttgctactgagcagacaaagccatcttacttatacaacaaagaaacctgacagatccaacaacttgatcggtgcttttatccgcttgtaatgtcgtcgtgtgttctgtttgtcattgggggcttaaaaacatacaagttcacgaaacttcatatatctccatgtattttgaattttaataactatgcccccgtttccaatgcgatgatatttttgtggggatgttccgtataattggatcataactcttgaattgctgttgaataactactgtttactgaaaaaa

SEQ ID NO: 28024 - DNA, 354 bp, Glycine max
  Clone ID: TF_LIB3065-001-Q1-N1-A6
aaactcaattataaaaacaatgcaaaaaagaacaaaaccgaatattatagaaaaccaaaaaaatggaggacgatgcctacaaccaacgacatcaattaataaaggtctaccaacaacaactgtcctcgtgtgccaccctatcaagttcggtcgggtccttgtagggacctattttaagcacatcatctgctccatcttaattcggcatctcaatacctacagatttcgacagatacatacagagcgatgggaatatgctaatgatgagtttctgccagatcctaaacatgttattccgaatatacatagcaggaaacctatccacagtcataggcattctgcaagttcacttgt

SEQ ID NO: 28025 - DNA, 524 bp, Glycine max
  Clone ID: TF_jC-gmro02910071a08a1
ggctcgagctctctctctctcatccttatatttccaacggaaccttctagaaccaccataacatcattctccgttccctcgcgtttcaacaccgataacccgcaaaaatacccattgatctgcgcctcctcttccatggctccaccgccgccggtggaacacaacggcgactccgccgctaccgcctccgcctccgcctccgcggagtctcagagatcaattcccacgccctttctcaccaaaacctatcaactcgtcgacgaccaatccatcgacgacgttatttcctggaacgacgacgggtcaacgtttatcgtctggaaccctaccgttttcgccagagacttgcttcctaaatttttcaaacacaataatttctctagcttcgttcgccaactcaacacttacgtaattatttcaattcaactctttggtttggtttttttttttttttttgcttaggtttcgatgattttgaattttatttctaaaatttgtttataattttgcttgatttgcaggga

SEQ ID NO: 28026 - DNA, 1651 bp, Glycine max
  Clone ID: TF_700891365_FLI
gggtgaaaagggattgaaggattgttgttcttttctattggggttatatctgtgctttatgggaagccctatctgtcttcttgttgttttatttcgattcgatgtggcacattctacctttcatttctgtggcgtctcattgattggtattatgaatctcgaatttgcagggttttagaaaggttgacccagatcgatgggaatttgcaaatgaaggatttttaagaggtgaaaaacaacttttaaaaagtatcagtaggcggaaatctgctcatgtaaatggtagtcaacaagcatctcaagtgcataaatcagctgctggagcatgtgttgaagtggggaaatttgggcttgaggaagaggtggaaagactgaaaagggataagaatgttcttatgcaggaacttgttaggttgagacagaaacagcaagggactgataaccaattgcaaaatgttgggcaacgtgtgcagtcaatggagcagcgtcagcagcaaatgatgtcattcctggctaaggccatgcagagcccaggcttcttagctcaatttgttcagcagcagaatgaaagtagtaaacatatccctgggagcaataaaaagaggaggctccagcgacaagaagaagatagtttagccaccaaggatctccatagttctcttgatggacacattgtcaagtaccagagttccataaatgaggctgcaaaagcattatttcgccagatattgcaaataaacaattctacaacacaatcatcaattaagaaccctgatgttttccttattgatgatattccttctgccattgcatcagatagcagtagttcatccactcaggtttctaatgtgatggttccacctatatctgagctgacgtctatggaagtaggatcacagtttcctctcagttgtatgcccagtaacatatctgaggtgcagtcttcacctgctgttttgggtttctgtagaagtcaggggttggagacagaaagcagtttattgaatcatgagctgaatgttatgggggctgatactaggaacatgggggagatagatatgatgtcaactgttttagatgaggcagacgaagctgatcatttttcacctgacacagatggaatttctaaactcccagaaatcagtgatgaattctgggaactgtttttaaggccaagcccacttacagaagacacagaggaaactaaatgtagctctctaggatgtggtttgactgaagatcagggtttgccttcagaaatgggaaataagcaggaaaattttgatacaatacaacatgttgactgtcttactcaacagatgggacttcatgcattggagtactgattgtgtgtatatatgttactcacaactgaaggttgaggtcccctttgctactgagcagacaaagccatcttacttatacaacaaagaaacctgacagatccaacaacttgatcggtgcttttatccgcttgtaatgtcgtcgtgtgttctgtttgtcattgggggcttaaaaacatacaagttcacgaaacttcatatatctccatgtattttgaattttaataactatgcccccgtttccaatgcgatgatatttttgtggggatgttccgtataattggatcataactcttgaattgctgttg

SEQ ID NO: 28027 - DNA, 2391 bp, Glycine max
  Clone ID: TF_GmC58_2
ctgacatctatggaagtaggatcacagtttcctctcaattgtatgcccagtaacatatctgagttgcagtcttcgcctgctgttttgggtttctgtagaaatcaagggatggagacagaaagcagtttattgaatcatgatctgaatgttatgggggctgatactaggaacatgggggagatagatatgatgtcaactgttttagatgaggcagatgaagctaatcatttttcacctgacacagatggaatttctaaactcccagaaatcagtgatgaattctgggaacttcttttaaggccaaggtgtgatactttcctttcatcttcttcttctctctgcgataaaagcaaaacctaaaatttggtttaggcataggaatctgttgtagagttgatctacctggaatggagggagcatcgtggaatagtagtgtttgtgtggcaccgtttctgagcaagacctacgacatggttgatgatccttccaccgacttagtggtgtcgtggggcgaaaacaacaactcctttgttgtttggaacgttccccaattcgccacagacatcttgcccaatcattttaagcacaacaacttctccagcttcgtcagacagttgaatacttatgtgggcatcacatcactttttctcccatcattatcatcttatcttatttcttcttcttcttcttcttcttcttcttcttattattattattattattgctttttgcttatgctaaacccctctttttctattatggggtgaaaagggattgaaggattgttgttcttttctattggggttatatctgtgctttatgggaagccctatctgtcttcttgttgttttatttcgattcgatgtggcacattctacctttcatttctgtggcgtctcattgattggtattatgaatctcgaatttgcagggttttagaaaggttgacccagatcgatgggaatttgcaaatgaaggatttttaagaggtgaaaaacaacttttaaaaagtatcagtaggcggaaatctgctcatgtaaatggtagtcaacaagcatctcaagtgcataaatcagctgctggagcatgtgttgaagtggggaaatttgggcttgaggaagaggtggaaagactgaaaagggataagaatgttcttatgcaggaacttgttaggttgagacagaaacagcaagggactgataaccaattgcaaaatgttgggcaacgtgtgcagtcaatggagcagcgtcagcagcaaatgatgtcattcctggctaaggccatgcagagcccaggcttcttagctcaatttgttcagcagcagaatgaaagtagtaaacatatccctgggagcaataaaaagaggaggctccagcgacaagaagaagatagtttagccaccaaggatctccatagttctcttgatggacacattgtcaagtaccagagttccataaatgaggctgcaaaagcattatttcgccagatattgcaaataaacaattctacaacacaatcatcaattaagaaccctgatgttttccttattgatgatattccttctgccattgcatcagatagcagtagttcatccactcaggtttctaatgtgatggttccacctatatctgagctgacgtctatggaagtaggatcacagtttcctctcagttgtatgcccagtaacatatctgaggtgcagtcttcacctgctgttttgggtttctgtagaagtcaggggatggagacagaaagcagtttattgaatcatgagctgaatgttatgggggctgatactaggaacatgggggagatagatatgatgtcaactgttttagatgaggcagacgaagctgatcatttttcacctgacacagatggaatttctaaactcccagaaatcagtgatgaattctgggaactgtttttaaggccaagcccacttacagaagacacagaggaaactaaatgtagctctctaggatgtggtttgactgaagatcagggtttgccttcagaaatgggaaataagcaggaaaattttgatacaatacaacatgttgactgtcttactcaacagatgggacttcatgcattggagtactgattgtgtgtatatatgttactcacaactgaaggtaaactttttagcttgcagcctctcacttatgcataactttataagcatactggctcaattagttccctgaaatgaaaccagtgtaaaatctcctttcattatcatcatacccaattgctgccattaaagagtgagaacagtgagggagtaaatcaggagtgtttaaaacaattacattgaatgtctacaaaaatgtctgatgtattatgatcatacatacacattattaagatagaaatttactacgtaac

SEQ ID NO: 28028 - DNA, 532 bp, Glycine max
  unsure (1)..(532): unsure at all n locations
  Clone ID: TF_GmC1855_3
gcgttcgcccacgcgtccgctctattcctctgacttcccatagaccacaatacactcaccccaggcaaaaaatttcgtttcaaaattgtgatatggacggaagagcgagcagcagcgtgggcggagaagcatcgccagctccagcaccggtgccgataacgaatgcgaacgcgccgccgcctttcttgagcaagacatacgagatggtagaggacccttcgacggactcgatagtgtcgtggagtccaacgaacaacagtttcgtggtttggaaccctcccgagttcgccagagatctcttgcccaaacacttcaagcacaacaacttctccagcttcgttcgccaattaaacacctacggatttaggaaggtagatccagatcgctgggaatttgcaaatgagggatttttgaggggtcaaaagcacttgcttaagactataactcggcggaaacctgcccatggtcataatcaacaggcacagcaagcacatggacangagtcatctgttngggcttgtgttgaaagttg

SEQ ID NO: 28029 - DNA, 1202 bp, Glycine max
  Clone ID: TF_GmC92665_1
ctaggaagagagaaagaaggaaaatattgaagctcttgcaattctcatgaactgtggagtcgtgttgggtttctattgttggggttgggagttcttaactgcccttcttctcttctcttctcatcaaccttattgatcattctcttcatcctcctcttcttcttcaaaaaccaatttctttttatatatatacaaataaggaagacatcaaagaaaaaaatagcaaaatatttttttaaaaatatggaaggaacaagtgaaaaggggttgtgggaatgtggaaggaagtgcactccaccaccgtttttgttgaagacttatatgctcgtggacgatccggccacggacgacgtcgtttcatggaattccgaagggacggcgttcgtggtgtggcagccagcggagtttgctcgtgatctcctcccaacactcttcaaacacagcaacttctctagctttgtgcgccagctcaatacttatggatttcgtaaaattgcaacaagcagatgggagtttttcaatgaaaggttcaagaaaggtgaaagagaacttctacatgagattcggcgaagaaaagcttggaccagcaagcaacaaccaaatgcaccaaaccaagcaacactccaagactctgatgaagatcaaaggtcctcatcaatctcatcatcttctggttacactacccttgtggatgaaaacaagcgactcaagaaggagaatggggtgttgaactctgagctcacaagtatgaaaaggaagtgcaaggaacttcttgatttggttgccaaatattcatcacatgcaaaagaggagaaagaggatgaaaggccaatgctgtttggagtgagattagatgttcaaggagagagggagatgaagaggcatagagctgagatgagtgaaagcgcaagcattatgttgtctcagtcatgcaaatagctagacatgttattatacatagaagcttaagagtattcagtatagatactgaaaaagtaataatcaaatatttggaagtcataatttattgattaattaatggatagttaggcttgcaaagagtattttcgccctagtttgtagttactttggatatcatattggatgcatcaaggaactaattaagacacctcaagcatatatagcatatgctgtaattatatatgtagtgtgattcagaaccgatgaaacataatttatgt

SEQ ID NO: 28030 - DNA, 752 bp, Glycine max
  unsure (1)..(752): unsure at all n locations
  Clone ID: TF_GmC62779_1
gtaccgcccctgcaggntaccccggtncggctcgagtccccatttggaatcacccagaaacagaaaaagagctcttctttctcttcaatgcgatttctcatctttctctcctcgctttcctttttcaggtgcaaggcttcaataacgtaactgccatttttatttttaatttaattatcgttgctttacgtgcaagcttctacattttttcccgtccagggaaagaagaatccctagttatcatttttggggaaattcaacccatgattctgtgagatttgtttgagtgtaaacgttgcttgtttgggtatttggggtcacagaggagagaaagctgaaaactttttatgccttgtgattttgttgatttcatgggtttagtgttgttctcatcagacaaatggggtttttaaatgataggctattattaattttgctctaagtgtaatttttttttttgggttttgtctaggtcagatttggaaagaaaaaaaagtttctttttttgaggggtgttctatgtaaagtcccagtggggattgagggttgacttcttttgaaagtttggaaattgattggtgattgggttttgaattggggaggttgagatttgtgagtagggttgattgaggtttggtttgagcgatggatgatgcacagggtagttcaaattctctgccccctttcctggcaaagacttatgagatggtggatgatccttncacggattcggttgtttcgtggagtgtcac

SEQ ID NO: 28031 - DNA, 490 bp, Glycine max
  Clone ID: TF_jC-gmXLIB3563P024ab12a1
aatttctcacactcgcaagtctcacgctgctcacacaggaagcgtcatacaaatgcacacagaaagtaaaaagcgggagttaaggagcggtggtcacggagagggagaataaataaaatcatcaccataccatggggggagaagaagtagtaagagttacatcagagtggttcgacgacaacgaaagcgatctgaacgactacaacattttgagcgagatcaaggacttgggagtgacgacggctcacgcattgaaagaagagatggatgacggctgccgctaactggacattcgggtagtcgacttctctcaaaccgatgtaagggttgcacgaccgtgggccactctccgatcctgaagaagacgtctgaaatggtgtacgaccctcacaccaaccctattgtgtcgtggagccaaactcgccatattttcttaatttaggactcgcacgagttctgcaaagcccttatctcaaagtacttcaagcac

SEQ ID NO: 28032 - DNA, 1105 bp, Glycine max
  Clone ID: TF_GmC1873_1
cctcgagccgaatcggctcgagggcaacccctttgggtctagcactagcagccccttgtgttgtctatctgataatgctcctgcaggcatacagggagccaggcatgctcaaattggaatatctttatcagatctccaccttaacaattaagctgcagttggggttgcttcctgactaacgtccaccagcttaatttgcacactgggatttgtaatggcaacatcaccaaccatggtaagagtaaagaaagtctatcatgcttgctgaccatgggaaattctaacaagagcttggagatatctgatcatggtgaacgagacaaccaatatttctgcttgatcggaacaacagagaacgtcaccggggctacaaatcactaaatcttcaagtggtgtatggtctcaaaatttctacatgttaaacaaggaatgagagttgaatcaaataagacgggaagggatttcttagtgactcccagtcttcagtttcaccaggaaagttatcttctactgccgagttctcttggcaagtcggttctgataccagtcattgcaaggttttcatggagtctgaagatgtaggacggacacttgacttgtcctgcctttcttcttatcaagagttgtacatgagactcgctaacatgtttggaatagagaggtctgatatgttgagtcatgttctctactgcgactcatccggtgctcttaagcaaattggagaggaacccttcagtgagttcatgaagacagcaaaaagattgaccattctgacggattcaaacaacaaagatagtagaagtctgttttgcagggtttggatcacaggaactcgaaatgctgaacatggattggatgctgcatcaaataagacaggtcctctcagtatatttgcttaatatggtgtggcatggcatcggagacattgtttttagatatgaaaagttgaaggacatagttattactcagttgtaagagatgctaatatgaactgaaaattccatcaatattggcgtctttgttttcgatgtccatttgtagaaaataatgatttttcctgtatgatggacaattactattctaatattaattaattaattaacct

SEQ ID NO: 28033 - DNA, 411 bp, Glycine max
  Clone ID: TF_jC-gmle01810073g03d1
aaaataacaaattctagtacattcattcattacagacattacttataaattgtacattgctgtctaatcttcaatgttgaaaggaaccacaatgtcgaatataaacactcttcggtcttcacatgtcaggatggaaaaaaacctcctatcgattaatgcttcattaataattgccgggtcaagggagaagctagtcttgcttactaccaagggtaaaagcacgaggattagaactcttcaacaccctcagactcttcactgttgacacaaacatgtgccacggtacatctccaacaagcatcctgactccttcgttaacctcataaacaagagtatattgcccacttccaaccaagagaacccgaattggatgtcgtgttactgatcccttgcttagaattccaccagcac

SEQ ID NO: 28034 - DNA, 202 bp, Glycine max
  Clone ID: TF_6725509
ttctgcttttgcatttttccatatgtcttggcgcaagccccatcgcttttgatcccttcatttttcgcaaacgcgttggtgactcaacagacatctcccatggggcattacccacgaacattcagtcaccattcttatcttcatagcttggcgcatactcacagctgttgagaagaaccatcaacttgctcttattcatgaa

SEQ ID NO: 28035 - DNA, 232 bp, Glycine max
  Clone ID: TF_10709975
tggcgctctctttgtcatggtcatcatggatggtgcttcttatctcaggaaggttgatcttaaaagttatacatcatatcacgtactatctactgcctttgagaagatgttcctaacctgtcctaccctaagtcagagtggctcccatggagctccacgaggattactgttgagggatagaatgctgatggatcttttgcctggtccttagtgtgtactatcttatgaagac

SEQ ID NO: 28036 - DNA, 562 bp, Glycine max
  Clone ID: TF_LIB4200-008-Q1-N1-G8
ctaacagacagacaatccattagagagggaaaatcatacttgtttacatgctgatggcactctaggattaaaaaaaaagaagatattcacaaatataagtacctaaaatccaactgcactacctattgctttcatattatataataagtccacttaaactagcccactaatctgcagttgctgtgaaagttcattaaaatggagcaacctatgccatcagatatatttcccttcccagaccccaaaaaaaaaggaaaaaaaaaaaaaaaactaagttgtctaaggcatgtgagactgttgagtctcatccctattctgggaatctggactcaatagaacctcttcaacctctgatgaaaaagcaggtagcttgcagcatttcatcttcttcaagtcctcccgtgaacaaatgaaaatcctcttcaccatgttgcagaactccctgcatgttaggtggcacgagaaaataaataaataggagaaaatagtttcccctatgaccattaaaaaaaattacattctcccatgatcataaattaacatgtgtgataaatttattatt

SEQ ID NO: 28037 - DNA, 709 bp, Glycine max
  Clone ID: TF_GmC1873_2
ccgagttctcttggcaagttggttcggataccagtcattgcaaggttttcatagagtcagaggatgtgggacggacccttgacttgtcctgtcttggttcatatgaagagttgtacatgagactggctaacatgtttggaatagaaaggtctgagatgttgagtcatgttctctaccgtgacgcagctggtgctcttaagcaaactggagaggaacccttcagtgagttcatgaagacagcaaaaagattgacaattctgacggattcaaacaacaaagatagtagaaggtgggagaaagaaaattaatgaaattatgtataggatgtgcttccggggaagatactattgtatgtgcaagtgtaactgttccttcctctttgtgacttcaaagtctgttttgcagggtttggatcacaggaactcgaaatgctgaacatggattggatgctgcatcaaataagacaggtcctctcagtatatttgcttaatatggtgtggcatggcatcggagacattgtttttagatatgaaaagttgaaggacatagttattactcagttgtaagagatgctaatatgaactgaaaattccatcaatattggcgtctttgttttcgatgtccatttgtagaaaataatgatttttcctgtatgatggccaattactattttaatattaattaattaattaacctagatttggttccc

SEQ ID NO: 28038 - DNA, 238 bp, Glycine max
  Clone ID: TF_7285393
atataaagaactatattatgaccttgagaagatgaaccaaaactgatataccataagtgaaagtggttcccatggagctccaggaggagaaatgttgagtgaaagcaaggtgagggatgttgtgcatggatctgagtatgtgctcagttatgaagataaagatggggatgggatgccttgcggggatgtgagatgggaaatgtgcctagatatttgaaataagatgaagttagtaagg

SEQ ID NO: 28039 - DNA, 295 bp, Glycine max
  Clone ID: TF_LIB3242-736-P1-J1-A7
ttctcaattctttttaagaacttattttttttcggagggggggagggacaacagaatacttggcttttgatttataccacctattcaaactaatactttggggcagacacacgcaccattaacaccatggggggacatttccaaatgggagtcaaatagtttcacttccattagtgagtatcactaaacgccgaacacttcctataaaggattgccatggaacatgtcctacttgaaaacattccccttgttttttggaaaaggtgaacaaggaactttctacaacttcctcaaa

SEQ ID NO: 28040 - DNA, 1009 bp, Glycine max
  Clone ID: TF_GmC234576_1
caccgaaaaacttctccttggtaacacttaaacttggaaaatagtatactatatatccaatatcaatgtttttctgtcgttgatatcgataacatgtctgctaatggtatcaatacatttttgcttgattttcaatcaaaacattaattctaactattatgaatgaatcgatagggctttgatttggttgagaattagaaattaattaaggtgataggtaggtaggatgcacttgcctccatggtacatcttgggcgagaagccagtcaccttctttgtccagataagcaagttcatagttgtttgattgttgatgatgacctgttaatttgaactcgactaattaataaattaactggaattgaacaagggcatgcatggatgaactttgtcatatatagtttatacttacattttccaaacatgtccatcaaggtttccttgagcgtgtgaaatgattgatgcatactgagatcaaccttccgtgcaatccccacaccctccatcttcaccttcacgtacagagtattcgatgaatatccttggagactatgagtttgacgatgatcaacccataccatgtgatcaatattattattattcccgacaacctcttccacatgaagtttcttcctccaatggtttactggtggccaacccactacaccctcctcctcctcatccttggtgatgttagagcattggctatggtgatcatcaacaacatggtggcttggagttaaagggaggagagacagagtaggaagcataacatggtgtggtggtggtgcatgttccatcatcatgagttgggagaaggtacgttttttgtggctgaaaggctggtcgtaggcacgagaatgggttgagagagcgagacccagttgaagctccattcaacgcaagcaaatgatgcaatgtgttgttgttagtatggtctggaacaataagaagaagaaaagagagagagtgagggctggggatgagggttttaagttggcctggcggg

SEQ ID NO: 28041 - DNA, 193 bp, Glycine max
  Clone ID: TF_12689612
tttggaaaacatgttcaattgcacatgtggttgatattcggtaagggaagggattaatggattctaatatgctccgacttatgaaaaccaggatggggataatatgctggttggatatgttccgtggtacctgtttgtgtcaatcggcaatacgctcatgatgactattggtataaagcctaaggggtatggt

SEQ ID NO: 28042 - DNA, 822 bp, Glycine max
  Clone ID: TF_GmC31466_2
ccacgcgtccgggcaacaatcacaccacccttttgtgaacatttattcacaagttcctgctgaagtgaatgattgcagcaacgatcatagcagcttctttgtgaaggtgtacatggaagggattccaatcggaaggaagctcaatatactagctcatggaggctactatgagttagtcaggactcttgaacacatgtttgacactaccattctttgtaagtctattgttttatatcctctcattttgttgaatattaacaacacattttttaacatgagcttcctaactcgcaagattttgtaatttataagacagagagtgttgaatcagcaaaataacaatggaatgttgtggtgtgttaacagggggaacagaaatgaatggagtgcaaccagagagatgccatgtgctaacttatgaagatgaagaaggggatttggtcatggttggagatgtcccttgggagtaagttaattgactcttttttgtttttttttcttatctgagaaacaaaagcattatatgttccattttgtgaattgatgtggtatttgttttgatggtgtaggatgttcttatcgacggtgaagaggttgaagatcacaagggtagacacattcgggtgttaagtgaagaacatgacactgcctcttccttcaccggtgattttagattttgtcctctagagtgagactctaatgaggtcgctgatcagaaaatttagaaaaatcttagtgaagtatatgcacagataggtgatgtatatgcatagctcactctgctctttctttcaagataaaaaaccacccggccaacccaag

SEQ ID NO: 28043 - DNA, 973 bp, Glycine max
  Clone ID: TF_GmC6795_2
aattcggctcgagcaaaattattagatggatcttccaagtttgtgctcacttatgaagacaaggaaggagattggatgcttgttggggatgttccctgggggtaagtaattggtccacaaacatcaattttattttagcatcaaatatgcgatgttaaaactgatactgcagtacaaaaatgtgttgccaattaattgtcaaatagtacatgtaatgttttcatcaggcaataaagagattggtaaaaatatttggtgctatactctaaaagctacatgtcaaatattggtgctatactctatcctattaagagattgatagggtcatgtcttttttcttggacaaggaaaaagatttcatatttgtagtttcatttagcttgtctttttatgatttaacactggttatgaggatctctgttcctctgctttgatattcatctatcttgctctttcaaattgctatcaggatgttctttagctcagtgaggaggctaagaatcatgaggacatctgaggctaatggacttggtaagcaaatgctttatttttccaaacacaacttacccatgtttttcttttgctaatgcatacttgtttgcagcaccgagattggaagaaaacataaaaaagagatgcaagcccatatagattccgttttcatggctaaggacatgaaaaacctgtcaaatagatgaagaggaaaaaccgaaacagaaaagtataggaatactgcaaatgtatgaagttttgagatttgaatgataaaatctcacacttttgcttaattaattcagtttgtttgtttaatttggtatctttgttgcggcctctctattcatctcacttggagggtgcaggcatcatagattttcatgcaatacaactaatcatacaagtcagactgcttgttagtgttgtaaatgtggaatgtttgctaactatttcagctataaagttttgtttgaacttt

SEQ ID NO: 28044 - DNA, 500 bp, Glycine max
  unsure (1)..(500): unsure at all n locations
  Clone ID: TF_12487451
gaaaacgtaccttctcccaactcctcatgatggaccatgcagcaccaccagaaagcaccctcaccgaccatgttatgcttcctactctgtctctcctccctttaaccccaaaccaccaccatgatgatgatcaccacagtcaatgctctaacatcaccaaggatgatgaggaggaggagtctgtagtgggttggccaccagtaaactatcattggaggaagaaacttcgtgtggacgaaggtgttaggaataataataataataatcacatggtatcggttgctgatcatcgtcatcatagtgtttacgtgaaggtgaagatggagggtgtgggaattgcacgggaggttgatctcagcatgcaccaatcatttcacacgctcaagcaaacccttgatggacatgtttggaanatgtgatatttaacaatcaacaactatgaactgggctttctggacgaagaaagtgactggcttcttccacaagattacccatggaaa

SEQ ID NO: 28045 - DNA, 373 bp, Glycine max
  Clone ID: TF_LIB3242-504-P1-K1-C5
gaaaacaatacactgattgcaacatacattcaacttatccaaacaaacatgttcctataaagattacaagctccacacttactaatattcaaggtcgcttcataaggtattatagttgaaacaagtgtaacacaaacaaaagaccacgactctcttatgatacttgtaaccatagacaacatcttgaatagcagctaaccatcaaaacccggcattcaggcatttatatcataagttcctggtacattgtataatttgttagatctaccttcctcaaatagggagcgccatccatgctgacctttacaaagagtgccgctgcacccggttttccatctactggatcattattctttgaagcggggggccatga

SEQ ID NO: 28046 - DNA, 454 bp, Glycine max
  Clone ID: TF_jC-gmst02400037e07d2
ggggggaataaagtttgaattaaaattcaaggttttttagcacacaacaattttgacagcatggaagggtcacatttttaacaagcccgactttttaggttaagtttattggtttttggccattacaaatgccccattgatcgggtccttaaaattaaaagttgaattttttttccaacaaaacaaaaaacaccggacacattcaaggttacaacactccgctccatagtctcggtgaagggcttcatatttatatatatattttttgggccactttgggacgggatttcatcgaacattgttttaggcccgcttcaacttctgcttttgcatttttccattgcttttggggcaagcccaatcgcttttgatccctttattattcgcagacgcttgggtgactcaacaaacatttcccatggggaatcacccacgagcattccatcaccatcct

SEQ ID NO: 28047 - DNA, 139 bp, Glycine max
  Clone ID: TF_6964391
ggaatacaaggacggagattgtatgctggttggtgatgttccgagggagatgttcactgattcttgcttgaggctgaagataatgaagagtttggaaacaattgagcttgcacctagagccatggataagtgcaaaagt

SEQ ID NO: 28048 - DNA, 932 bp, Glycine max
  Clone ID: TF_GmC573_11
ttccttttcgtccgagagcacaagtagtgggatggccaccggttcgatcatataggaagaatactctacaacaaaagaaagaggaacagggtgaagggtctgggatgtacgtgaaagttagcatggcaggtgcaccttacttaaggaagatagatctaaatgtttacaagagctacccagaacttctcaaggccttgggaaatatgttcaagtgcacatttggtaagaacctagaacaagttttaaataatctcttattattttttttggctttcttaagattaatttggcatatatatgtgtatgttgaaaggaggaataaagttgtaattgcttgtgatccaggtgaatattcagaaagggaagggtacaatggatctgaatatgctccaacttatgaagacaaggatggggattggatgctggttggagatgttccatggaagtaagtttcttctcctaaatctgttctttgaattaactagtagtaattatttgttgttattatatatatattaaaaggttgtgtttttgctaagcttatgttaattattattgtagcatgtttgtgtcatcctgcaagagactgagaattatgaaagcatcagaagcaaaggggttgggttgtttttgaccaaaataaaaaaacaaagcaggaccatcatgcatgcccatatccaaaacatggagcaaagcaattttcagtgacgtcatccaagagaatttcttctgtttggaatatgcaagagctaggcacttggcctctgtgaaatggttatatttagcttattaaaaagagagatgcacatacacgattttattttccctttatttgtttatttcaaaagctaggtgactttttagacctgcttaattaagtatactattccaaattctcaatgcctaaaccagaattgaaaactgtaatgatg

SEQ ID NO: 28049 - DNA, 1607 bp, Glycine max
  Clone ID: TF_GmC1078_1
gcgcgagccgatgggcagagaaggttcttttctgcatcaacaaaaccaactcctggacttgctgtcaataggagcaggctgttttgtgcatcaacaaaaccagctcctggacttgcttgcatactctctctgttctttctattcaaagatctgtaaatttatatattatcttttatcatatatagtattagtatagtccacttgtttaaaccacctgtgttgcatattctgaatcctatcatcttgtggctttgatgtctagagcattggaacatgattacatagggttggcagagaatccgtcaatggatggtaaaaactcatcatcactgaacttgaaggagacagagctgaggcttggcctccctggttgcgagtctccagagagaaaatcaggttctgcactctgtctttttggcaaagagttgcagaacaacaataacaatgtttgttctttgaaggctggggccaagaggggcttctctgatgccattgacacctcttctgtcactgagggatctcaaggagcttctgctttgttctctccaagaggtggcaatgttgggaagcctcttattggtttagacactcaaactaacaccaccatcaaagaggttggtgcagttcctcaatcagccaaaccggttcaggaaaacaatgatcagtttgctgcaacaaatgcccatgcaattgctcctgctgctaaggcacaagttgtgggatggccaccaattcgatctttccgaaagaacacgatggcctctaatttgacaaagaacaatgatgaagctgagggaaaatcaggatttggttgtctctatgtgaaagtcagtatggatggtgccccttatcttagaaaggttgatctcaaaacctataacaactatatggaactttcctcagctcttgagaagatgttcagctgcttcaccattggtcaatgcaattctcctggacttcctgggaaagatggactaagtgagagctctttgagggatcttctccatggatctgaatatgttcttacatatgaagataaagatggagactggatgcttgtgggtgatgttccttgggagatgttcactgattcatgtcggagactaaggatcatgaagggctctgaggcaattgggctagctccaagggccatggaaaaatctaggagccaaaactaatgcagaaaaaaccccattagaccaaagcggggggtattcattgaagcatataaagatttccaagggtgtttgagtttatgattctgttcaaaatcaaaaacatatgctattcagtgtctcagtttttgtgcattaatatatatagtatgacaagttttatcagtagaattcaactggagacatccagacaatatatacacatattttgtttgtttctctattttgtgtatctttggattctagttgctgtataaaagaattgcttgttgtgcttttcccctctataactattctgaattttctccatgtatttgattttcaatatacatactgaacctttgtattttgttattaaatggtaataaccatatctcttggtcctataatgttagtccccagtaataaccatatctcttggtcctaaaaaaa

SEQ ID NO: 28050 - DNA, 1241 bp, Glycine max
  Clone ID: TF_GmC1078_2
ccacgcgtccgcggttctgttgggcatcaacaaaaccaactcctggacttgctgtcaatatcacaccataactgctattgaagctctgctctctgacttgcttgcatactctctctgttctttctgttcacaaagatttgtaaatttatatttatcataccatatatactatataatatattgtatgctccacttgtttgaagctgtgttgcatattctggatcctatcatcttgtggctttgatgtctagagcattggaacatgattacatagggttggcagagaatccgtcaatggacggaagctctgacaaactgtcttctgaggatggtaaaacctcatcactgaacttgaaggagacagagctgaggcttggcctccctggttgcgagtctccagagagaaaatcaggttctgcactctgtctttttggcaaagagttgcagaacaataacaatgtttgctcagttgtaagccctttgaaggctggggccaagaggggcttctctgatgtcactgagggatctcaaggagctgctttgttctctccaagaggggccaatgttgggaaacctattattggtttagacactcaaactaacacccaacaacaggctaacaccaccatcaaagaggttggtgcagttcttcctcaatctactaaaccggttcaggaaaagaatgatcaggttgctgcaacaaatggccatgcaagtgctcctgctgctaaggcacaagttgtgggatggccaccaattcgatctttccgaaagaacactatggcctctaatttgacaaagaacaatgatgacgatgagggaaaatcaggatttggttgtctctatgtaaaagtcagtatggatggtgccccttatcttagaaaggttgatctcaaaacatataacaactatatggaactttcctcagcccttgagaagatgttcagctgctttaccattggtcaatgcaattctcctggacttcctgggaaagatggactaagtgagagctctttgagggatcttctccatggatctgaatatgttcttacatatgaagacaaagatggagattggatgcttgtgggtgatgttccttgggagatgttcactgattcatgtcggagactaaggatcatgaaaggctctgaggcaattgggctagctccaagggccatggaaaaatctaggagccaaaactaatgcagaaaaaacctgtttgaccgaagctggttattact

SEQ ID NO: 28051 - DNA, 142 bp, Glycine max
  Clone ID: TF_21676827
tgagaacgaagagggcgattggatgcttgctgagaaaggtccatggaagatgatcaccgactcttgcgagaggttgaggatgatgaagagtgctgaatcactaggactatctccaaaagccatggaaaaatgcaaaagtcgc

SEQ ID NO: 28052 - DNA, 663 bp, Glycine max
  unsure (1)..(663): unsure at all n locations
  Clone ID: TF_uC-gmroLIB3259P227g10a1
gggaaaaaaattatttaatgaataaaaattaaaaataaaaagcctataacctgtcacaactaatatccaaccagattttaataaccttacccaaagcatttgctgacccattttcaaacccgtaaaatgaaataatgtctgttcaagatttaaagaaaaacatgaaagaaaagaatgggcgagtgatgtaaatcacaaatatagtgttagaaccgtatgttggctgtaacagatgttcaatttgtccaaaacaaacagattcctacaatgattacagactccacaaacactaaccttccaatgtagcttcatatgatattatagtggtaacaaattaacataataccacgagaaactcttaagggccataaaaacaaataacagcagaagggcgataaaccaccaatgcccgggaattcagtcatatcatcatcctttgcttttccctctccggatccaacaataaaactttgatcagacaacaagcagtccaggatagcctaactcctgcttttggacttttccatggccctgggagctaaaccaatggcatcagaacctttcataattttcagccttttgcaagtgtcaatgaacatttcccatggtacatnccctacaagcatccaatctccatctttatcttcataagtgagaacatac

SEQ ID NO: 28053 - DNA, 683 bp, Glycine max
  Clone ID: TF_GmC573_15
tgcgacacgcagagtaggtggagcagcagggtgatggaagtggaacgtatttgaaagtgagcatggctggtgcaccttacttgaggaagatagatctgaaggtttacaatagctacccagaactcctcattcggctgcaagttaattctgatatatatccaggtgaatattcagagagggaaggttacaatggatctgaatacgctcctacttatgaagacaaggatggtgactggatgctggttggagatgttccatggaacatgtttgtatcctcctgcaagaggctgaaaataatcaaaggatcagaagcaaaggggttgggttgtttgtgaccaacaaaacttgcaaaagcaaatcaaatcaaaatagtcacatgaggtcttcaaagacaaataccctttgtgttgtgcaagcaaatacatggtgtttatgagaactcatatatatatatatatatatatatatatatatatatatatatattaggaaaatagatggatattatctatgtatacattatttttgctttattaatttcagcagaggcggctttgaggtctgctttctaaattatatgtaatcctctaaaaaagaaagagaaagaaaatataagaaaagctaatgctatttcaattgtacagataaaaaatataataataataataatctcactttgtctt

SEQ ID NO: 28054 - DNA, 630 bp, Glycine max
  Clone ID: TF_uC-gmroLIB3258P131f02b1
ctgcaccaaccaaccaactgctttgggtgcttctgttctcaaggaaactgttccacactctccaaaaccattacatgagaataagccccagatttctgctccagctgcaaaggcgcaagttgtgggatggccaccaatccgttcattcaggaagaactcaatggcttctcagcctcagaagaatgatgctgctgctgatgcagaagccaagtctggatgcctttatgttaaagtcagcatggaaggcgccccatatttgaggaaagtggatctgaatagttttaccacttacaaggacctctctttggcacttgaaaagatgtttagttgttttacactcaaatatgttcttacctatgaagacaaggatggagattggatgctagttggtgatgttccgtgggagatgttcactgagtcttgcaagaggctgaggataatgaagagttctgaagcaattgggctagcacctagagccatggaaaagtgcaaaagtcgctactagctagtgcaatgctgtatgcttttgtcttctaatcctgaaagatggaagaccacatttaagcatataatacctgagtatttcttacgtataattctatatacgagattgggtgtcataaacctttt

SEQ ID NO: 28055 - DNA, 1490 bp, Glycine max
  Clone ID: TF_GmC166_1
cttcaatgtaattgggctaaagccatttctctcctacttaacatagcagcttcattcacttattcactaacttaacatatactatctttctactgtggagttgtgattataagctaccatatatgtagttgcgattcttcaataccatatattctctttttctttcttgatttgtgttgtgaaacagttaaaagtggtcttgatgtctgaggcattggaagaggttgttccttcaatgaaaggagggtgtgaagaagaagggttgaacctgaaggctactgagctgaggcttgggttgccagggtgtgagtcaccagagagggagggtgtgtttaagagtgtggtggtgtctggggccaagaggggtttctctgatgccattgatggaaactggaatggtggaggatctgaaaaagatgccgctgccttgttttctccaacttcaaggggtgctgttagtgttagtgttagtgctgccaagtctctcactctcactgcaacagactgcaccaaccaaccaactgctttgggtgcttctgttctcaaggaaactgttccacactctccaaaaccattacatgagaataagccccagatttctgctccagctgcaaaggcgcaagttgtgggatggccaccaatccgttcattcaggaagaactcaatggcttctcagcctcagaagaatgatgctgctgctgatgcagaagccaagtctggatgcctttatgttaaagtcagcatggaaggcgccccatacttgaggaaagtggatctgaatagttttaccacttacaaggacctctctttggcacttgaaaagatgtttagttgttttacactcagtcaatgtggctcatatggggtttctagtcgggaaaatttaagtgaaagtagattgatggatctccttcatggttcagaatatgttcttacctatgaagacaaggatggagattggatgctagttggtgatgttccgtgggagatgttcactgagtcttgcaagaggctgaggataatgaagagttctgaagcaattgggctagcacctagagccatggaaaagtgcaaaagtcgctactagctagtgcaatgctgtatgcttttgtcttctaatcctgaaagatggaagatcacatttaagcatataatacctgagtatttcttacgtataattctatatacgagattggggtgtcctaaactttttagtgggaaatatatattgatgacagcatattagttttgttgtagtagccgtctatatcattgatgtagacgtttaaggtttaaggttttaggttttaggttgttctcccacacttcaattactgccatcatggcttaccgtagtttgtaaattttgcatttctgtaagcgagcattttgtttgtcatggcaagccaagaaaagaaatatcatactttctttatgtgtccactcttacatgtaaagttaaatatttatttttaaattagagtcatttt

SEQ ID NO: 28056 - DNA, 822 bp, Glycine max
  unsure (1)..(822): unsure at all n locations
  Clone ID: TF_GmC166_3
gcagattccaagtctggatgcctttataggtaaagtcagcatggaaggcgccccatacttgaggaaagtggatctgaatagttttaccacttacaaggacctctctttggcacttgaaaagatgtttagttgttttacactcagtcaatgtggctcatatggggtttctagtcgggaaaatttaagtgaaagtagattgatggatctccttcatggttcagaatatgttcttacctatgaagacaaggatggagattggatgctagttggtgatgttccgtgggagatgttcactgagtcttgcaagaggctgaggataatgaagagttctgaagcaattgggctagcacctagagccatggaaaagtgcaaaagtcgctactagctagtgcaatgctgtatgcttttgtcttctaatcctgaaagatggaagaccacatttaagcatataatacctgagtatttcttacgtataattctatatacgagattggggtgtcataaactttttagtgggcaatatatattgatgacagcatattaggtttgttgtagtagccgtctatatcattgatgtagatgtttaaggttttaggttgttctcccacacttcagttacagtcatcaaggcttaccgtagtatgtaaattttgcatttctgtgagcgagcattttgtttgtcatggcaagctaagaaaagaaatatcatactttctttatgttcactcttacatgtaaagttaaatatttatctgtgagcgagcattttgtttgtcatggcaagctaagaaaagaaatatcatactttctttatgttcnnaa

SEQ ID NO: 28057 - DNA, 1524 bp, Glycine max
  Clone ID: TF_GmC2301_8
agtctatattgagaagcacccttgtggggaaacaaagctatctgagccaaagaccctctttgtttgtcaaagtctatatggaaggaatccccatcggaagaaaattgaatctgatggcacattatggctatgatggactagtgaaaactcttggccatatgtttaggacgaacattctctgtcctaactctcaaccacttaattctgggaattttcacgtgctaacttatgaggatcaagaaggggactggatgatggttggagatgtgccgtgggagtaagtgataaatatatgtctcaaaattgaactcttaaatcttattagctccatttttcagtgtatttttttaacccttttgtatttgatatatttaatacaggatgttcttgaacagtgtgaagaggctgaagatcacaagagctgacagatgctagttaatttaataataaactgatggaggtttcaagcctacactgtccaaggttgaaatgaacgtagcatggcaacaaggaaatctgagaaaattctgccaagagaaaggaattcatgtgagtgcatggtcccctttgggagctaatggtgcttcatggggttctcttgctgtgatagatagtccagtcctaaaagacattgcaattgcaataggcaagagtgtggcacagatcctgaaaccgttctatgaactaatcaagagtgaaacaacgatgatgagaactgcttctcagaaatggggctacattcggatcatggctggtacaatctttggaggcatccttggattctatgtcatgcaccgccttgaaactaactacaaggaataaaatccaagatagtaaactaactctcaaagagcttgaaactacgcacaacaactatatgaaaagacaagaggagttagataatgatatgaggaagtgcaaggaagagttcaaagagtttgagaggattgcttgatgaggagaaggtcttagaagaaatcacagagagttccaaagcaaaatatgatgttgcaatatcaacagcatgccatggacttgattatattgtggtggaaacaactaatgtagctcaagcatgtgttgagttacttcgtagagagaatcttggtgtcgctactttcatgatattggtatttttttattttttatattaatcaacttgtttttgtctctaaatggctgtttaatattttgaatggcatgaattaaatatgttcacttttacttctggacccttggatttgtataactgtgactgagttcatgctctacgatatatttgctaatttaaggacatgttggtataagagtgttttctgtttcaatttttgtttattttcacctatagtgacaaaaatgtgataacaatttcaccattttttgtttttaaagattttatatgaaaattgtgaaatcactcattaacttccaactaacagcttgagtttttggcatggttggccacttgagtttttgaaggggaaattataaatttcgcaaaaataataaaaaaaaaaagaaaaa

SEQ ID NO: 28058 - DNA, 1082 bp, Glycine max
  Clone ID: TF_GmC371_5
attgatggttctgcaaataataataacagtgcaccagctaccaaggctcatgttgtgggatgggctgctataagatcattccggaaaaattcattggcaactacttcaaagaacaatgaagtagttgatggaaaaaagggggttggtgcactgttcgtcaaggtcagtatggatggtgccccctatttaaggaaagtagacttgaagaattactctacatatccagaattatcttctgctctagaaaagatgttcagctgttttactataagtaagaaagaattagtttaatgtggaaaaattttacctttcaattatttatgcatggacagtctgtctggatccagttactgcttgttttggtatgatttcaggtaaatgtggatctcatggaattctgggcagggagatgctgaatgaaaccaagctgaaggaccttcttcatggatcagaatatgttcttacatatgaggacaaagatggcgattggatgcttgtgggtgatgttccctgggagatgtttattgaaacatgcaagaggctgaggatcatgaagagttctgatgccattggtctagctcccagggctgttgaaaaaagtaagagcaggacctaggcagtacctgtgttcctctctatccatctaactgtctgcgggactaaaagcttctgggctatcagggacgaacaaatcagaacatggttgtcttggaagcaagaaatgaaggcattttggactggatagaatctcatactatgctgccttaatcctttttttttattatgtctgttttatgttgtcgtggagtttatgttttagtaagcttcttttcaagatgatgttaaaacttaacaaaactccaagaacttgactatgggagtaccgatattttatgtatgcgagattgagaagagttaacgttgtggttgaaggatctgtgatgtgttaattttgcagcgtaccttcaacggggtgtcctatgtttgtgtgaaaaaaaaaacaagttgtatgtcagtatgtcccttgccataactgtatcaaagtcattaaccaaaaagagcatactgttgtcaggacacgg

SEQ ID NO: 28059 - DNA, 1661 bp, Glycine max
  Clone ID: TF_GmC183_2
tttcctccccacgcgtccgtacggctgcgagaagacgacagaaggggactccaaagcttatttgttgctttgtgcttaatggaaggcccttgagcttttctttctttctctgctctcttttcttttaggtttccactctcacacactctccctcttctctttctctgcaataatctctcttctcttcttcactctctcaactcctgccaaacccccatttccgcagttcttaaatttggagtctgatgtctccgccattgctggttaccgaagatgaagggcagtgccatgcctcgatggtagcatctgcatcttcaccatccctgaactgtttctccctaaatgaggccggatttaaagaatgcaattacctgggattgtcagattgctcttcggtggacagttctactgtcccgaatttgtctgatgagaaaaaggagaatctgaatttgaaggctactgagttgaggcttggccttccgggatcccagtcacctgaaagggagacagaacttttctcgttgagctcaacaaaacttgatgagaaaccactgttccctttgcttcctacaaaggatggaatctgctcattgtctcaaaaaactgtggtctcgggcaacaaaagaggttttgctgacacaatggaccctgagtttcctggcaatgcagggataaacatgatgctatcacctaaaccttctggagttcagcctaccacagtgaaagaaataccaagcaaggtgttacaagaacttccttcagcggcaaatggaactggtcataaccatacatcaggagcttctatcagtggcagtgcaccggctgctaaggcacaggttgttggttggcctcctataagatcatttaggaaaaactcattggccaccacaactaacaagaacaatgatgaagtggatgggaaaccaggtgttggcgcactctttgtgaaggtcagcatggatggtgctccgtatcttaggaaggtagatctaagaagttatacaacttatcaggaactatcatctgcccttgagaagatgttcctaagctgttttaccctaggtcagtgtggttcccatggagctccaggaagagaaatgttgagtgagagcaagttgagggatcttctgcatggttctgagtatgttctcacttatgaagataaagatggagattggatgcttgtaggggatgtaccatgggaaatgttcattgacacttgcaaaaggctgaaaattatgaaaggttctgatgccattggtttagctcccagggccatggaaaagtccaaaagcaggagttaggctatcctggactgcttgttgtctgatcaaagttttattgttggatccggagagggaaaagcaaaggatgatgatatgactgaattcccgggcattggtggtttatcgccctctgctgttatttgtttttatggcccttaagagtttctcgtggtattatgttaatttgttaccactataatatcatatgaagctacattggaaggttagtgtttgtggagtctgtaatcattgtaggaatctgtttgttttggacaaattgaacatctgttacagccaacatacggttctaacactatatttgtgatttacatcaaaaaaaaaaaaaaaagggcggccgctctagaggagtcaatg

SEQ ID NO: 28060 - DNA, 1858 bp, Glycine max
  Clone ID: TF_GmC1199_1
caagttttgttttgcctgcgaaaggttgaagaattacgtagaatgataaaaaccatgagcacgcccctatacctcaccccacttactattattattgtacaacacaaccaggtccctgaatgctttttagagagagaaagggtaataagaataaggtagaagaaaaagatattagaagagaaaaaaaaagagaagaagaaaaagaagaagaaaagaaagaatgaggaggatggggggtatggagaaacggagtgaaggctgggactgccctggaacacgtaggaggcactgacactgacagaagtgctcggtcatgaagagaggtttctctgagactgaaactgaaactgaggaggatgagtctgctaccactgtggatttgatgcttaatctttcttctaagtgaagcacaaatcaattaactgaatgcttagagagagaaagaggagaaggagtagtgataaggtgatcatagagcatattataagagagtgaaaactaatggaggttggcctcaagaaggagaacatggggtttgaggaaactgagttaaggcttggactgcctggaaacggaggcactgaagaagtgctcatcaggaagaggggtttctctgagactgaaactggtcatgaagatgagtctgccaccactgtggatttgatgcttaatctttcttctaaggaggccgcaaccactgctgctgctgctgcagatccaactgataagcacaagactttgcctaaggagaagacccttctgccagcagatcctgctaagcctccagccaagacgcaggtggtgggttggccacctgtgcggtccttccggaagaacatgttggctgtgcaaaagagcgttggagaagagagcgagaagaacagcagccctaatgcaagctttgtcaaagttagcatggatggagcaccttaccttcgcaaagtggacttgaagatgtacaagagttaccgagagctctctgattctttaggcaaaatgttcagctccttcaccattggcaattgtgaatcccaaggaatgaaggatttcatgaatgagagcaagctgaatgatcttttgaacagctctgattatgtcccaacctatgaggacaaggatggtgactggatgcttgtcggtgatgtcccatgggagatgtttgttgaatcatgcaagcgtttacgcatcatgaaaggaaaggaggctattggtcttggtcttgcaccaagagccatggcaaaatccaagaacaggagctagactagtcgcacaattcatgacctgccccatcctttgtaattgtggtgcccagttggcttagtaactaaagtaaggataatagctgcagcagacacggatggacattgcagggtgttgaattatagttaatttgtgtatcattatggtttgttataatatttcaaacaaaacaatgagatgcatgtctaattaagtactaattatgaacaggaacataatgactctcaatcatgttgttagacttggctttcttatatatcgatctttgcttgttttgtgtgagtgcttgcttaataataattttaagatgtgtttgtctgttgtagttgtagcgacatgttatcatgctttacatttaaaattgtcttgtaaaggttttccttatcattatgagattccttggtattaatcatttttcatataataacaaaattgtatttattacatttacgttagtttttgttgtgatcatcaagagccgaatatatagtactggaaatgttccctgaacatggtggatgggaaacaagaacatgtgcgtgttcatcaaaaaaaaaaaaaaaaaaaaaaaaaagaaaagagaagagaagaggaaagg

SEQ ID NO: 28061 - DNA, 1022 bp, Glycine max
  Clone ID: TF_GmC2301_5
ctgcgagaagacgacagaaggggagtctcgatcagtttcattcattggaagatatgggaacattagaacaaattgatgcccctcaaaccaggtcatcatcatcttcatcttcttccattgatagcaacaaccacccttctaggactaggactccaccaccctcttccccttcatcaagtgcctgcagaaacagaactgatttgagcactgacctcagacttggtcttagcatctctccttcttctcaatctgaattacccttcaattcaacaccaagggaggaaagttttgactggccaccaattaagtctatattgaggagcacccttgtggggaaacaaagccatctgagccaaagaccctccttgtttgtcaaagtctacatggaaggcatccccataggaagaaaattgaatctgatggcacattatagctatgatggactagtgaaaactcttggccatatgtttaggactaacattctctgtcctaactctcaacctcttaattctaggaattttcacgtgctaacttatgaggatcaagaaggggactggatgatggttggagatgtgccgtgggagatgttcttgaacagtgtgaagaggctgaagatcacaagagctgacagatgctagttaatttaataatgtatacaatctctctcacaacacaagctcctcctcaattttcattgttcataaatttttgctgtagatctagttattaattagtgggttggtgaaactcgttgaagtatttcaccaaaaagaatggatcccgtgattatcatatatctaatagctttatacaccgaaaaacaatatagatgtgtaacttcttacctaattctcaattcagtacatagctgcagtattcctagtctctctgtttgatgatggagtcatctaattttcctctttgttttggaactagctccattattttgtagtcatttggaacaatgcatgtcccttttgtcttcatacctttaatgcatgatgtttcttggtgtctctttt

SEQ ID NO: 28062 - DNA, 777 bp, Glycine max
  Clone ID: TF_uC-gmroLIB3259P204h02a1
catataaacatcttctatattatttcttgtccctaacgaatttccaactattttctcattcgtataatacacatataagaaaattacagagacacataataataataattataattaaactcttattcctaaaagagactcgatcttgctcgagtacatttgcttccttgtgacacagatgaacaaccaagccgattgttgtggccgaaccctaaaatcacttcagcttctgttcttgcacttttccacggctcttggtgcaaggccgatagcctcagaacctttcattatgcgaaggcgctggcatgattcaacgaacattctgtgaaattgtgaaaaagagtagtataagggaatgataaactaaagaaagaaaaagggaaacaagggaatgaagaggggaactgactcccagggcacgtcaccgacgagcatccagtctccgtccttgtcttgataagtgggtacataatcagagccgttcaaaaggtctatcaatttggtctcattcataaagtccttcatcccttgggacccacatttttcaatcgtgaaggaactgaacatcttagccagcgcatctgacagctcctggtagctcttgtacaactttatgtccacctttcgtagatacggtgcaccatccatgctcaccttcacgaaagctgcttcctcttcattcttgttcctttgaactatgttctttctaaatgacctaactggtggccaacccaccacttgtgcctttgcaggtggttttgcagggtcgttggctcg

SEQ ID NO: 28063 - DNA, 501 bp, Glycine max
  Clone ID: TF_uC-gmrominsoy311g10b1
cttttataagatcttttaggaaaaactcgatggccacgacatctaacaagaacaatgatgaagtggatgggaaaccaggtgttggcgcactctttgtgaaggtcagcatggatggtgctccgtatcttaggaaggtagatctaagaagttatacaacttatcaggaactatcatctgcccttgagaagatgttcctaagctgttttaccctaggtcagtgtggttcccatggagctccaggaagagaaatgttgagtgagagcaagttgagggatcttctgcacggttctgagtatgttctcacttatgaagataaagatggagatctggactgcttgtagggggatgtaccatgggaaatgttcattgacacttgcaaaaggctgaaaattatgaagggttctgatgccattggtttagtttgcttaagtagatcttcttggctcacagctcccagggccatggaaaagtccaaaagcagaagttaggctatcctggact

SEQ ID NO: 28064 - DNA, 1747 bp, Glycine max
  unsure (1)..(1747): unsure at all n locations
  Clone ID: TF_GmC435_4
ggactggtgatccgtgtgtttcttaaagttataactcataagactcataaccatgactaatttttagttgcataataagtgataggtacagggattcatgtgaggatacactgttatacacaagtgatagtggaaaatgagacttagaagattgtaaaactgtatatagtttaggaatagtggtgtccaaatttgataattatgcagtagggtaagatgcaatcatagctatgtcacagagtccttcctcagattttacagctgctttacttcctgttctaaacaacctaacggaatttttatgagaacccacgcgtccggcattgtgctctaattccgttcctgttttgtgttcttgggttggttggccaaggggaatctctctggtttttatcacacctctgtctcttttttttttaacctctctccttaaaaagaggaaagacatagatagagagagatagagagagaaagagagcaggagaacccactaagcgtgcaaataaaagacttaaagcaaagctaagattacaatcccatgctattatagctccctccacctttgctttgcttttcgggtgtgtttttattttttattttctcttcctttctctcttggtggggtttccattgagctgtgataatacttgtgtgttcctccttctgctacctcagtctatccaacgttttgcagtggccaaaaccttaaaacccttttatttttaaggtttcctctgtaggtccttcttgctgttcgctcagactctcgcacttgttgcaaggaagcccttgtttctcacaactacaagatgtggtatttatcggatttaagctgcggttagactttgggggattctagagtttgtttttgtttcttgcatacatatatttggtgagtgatatttcagcaaggaggaatcttcctttggagcgtggtgtgaacagaagatggatgaaaggtcaagaaacgaggcatctcctcagctgttagatttgatctcaaacgagagagagtggcagatgaacaagagaaacgaaggaaaatcctcagaagaaagaaagcttgaactgaggcttggtccacctggtgaagactggtctctgggcggtaaaatgaagaacacagaaagagaagaatctcttctctctcttggttgcttctctcctaacaatgggttccagagcaaggcttctccatggccaaactaccaccaccaccaccagggtaacaacaacaaagcctcttcttcatcatttcttcagtgccctaaggttgtggtagagttgcagaatggtggtgatggcaaagtattctctccctcttctgcaaatacagctgtgtcccagcccaacacctctcagaaaagaactgctcctgctccagtggtggggtggcccccaattcgttccttcaggaagaaccttgcaagcagcagcagtgcttctaagccacctcctgagtctcaggctgagcagcacaacaaggttgctggtaaaaaacctgttgacaactatgctaataataaaggtttgtttgtcaagatcaacatggatggtgttcctatagggagaaaagtggacctcaatgcctatgacagctatgaaaatctctcttccgccgtggacgagctattcagaggtcttcttgctgctcaaagagattcctctgctggtggagttcacaacaagcangaggaagagaaagcaattacggngttattggatggaagtggagagtatactcttg

SEQ ID NO: 28065 - DNA, 1130 bp, Glycine max
  Clone ID: TF_GmC1825_3
ccacgcgtccggccaaacaaaccaagcaacattataatagaaagaggacacaagagaaagaagggggagctatagccataaggagaaaaactttcaaagaagtgaaagcaaaaaagagttgttcttttcctttctgctgataagctgtgtgagtgagttcattgacaagcctgaaatgacaactatgctgacaaatgagcatggtctgagtttgaacctcaaggagactgagctttgcctcggtttgcctggcgggggctctgaagtggaaactccaagggccactgggaagagagggttctctgagaccgttgatctgaagcttaatcttcagaccaaggaagatctgaatgagaatctgaagaatgtctcaaaggagaagactctccttaaagatcctgctaagccgccggctaaggctcaagtggttggttggccaccagtgagatcatacaggaagaacatgatggcagtacagaaggttagcaatgaggaagtagctgagaagacaacaagcagcactattgctaattctggggcgtttgtccaggtttccatggatggagcaccttaccttcgcaaggtggacctcccaatgtacaaaagctacataagacttatctgatgccttggccaaaatgttcagctccttcaccatgggtacctatggggccctaggaatgatatattcatgaatgatagcaaattgatggatcttcctcccagctctgagtatgtgcccccccatcaaaatactgatggtgactggatgctcgtgggtgatgtcccatgggagatgtttgtggtggtcatgcaaccgcctggcgaaattatgaatggatcagaaacgattggtccttgcgtccaaaacattggaaaaatgcaaaagcagaaggggaagctggcccaatacaacgttctacgagagatcccgtacgccactggacctatggaacaaattatatcacccacttcagctacactatggagcggaatgttgttggttgaatgtgtctggtgtttggcgttttgttcgtataaagattgtgtagtgtaaaacaacggtgccttaacctatacggtctggcgtgtttaggatgtgatcgtccaggctgtccggatggtatttg

SEQ ID NO: 28066 - DNA, 1514 bp, Glycine max
  Clone ID: TF_GmC870_1
ccgcggccccccagggcgccgaacgcggcgcggtggtgacagccattgttttaacacgagatctctcttaatagtagctgaaaccggattcaggtctgcgtttccctatctacggacctcaagggcattgctgcccattcggcttgtaggtacacaacctcggccatgagggcgggttgcttttctcagaacgttactcttgtgaagaagtgcttaaatatgttctctttcgtaggtttggctttgagggacagctggaggatcggcaatggataggttggggactatgctaggagcaatattacttatgccaataacatttagagccaaataggaatgccactgaatccagattcactcttaaccaaaggcacattaaggttcgggaggtaattttctaaaaatttctcttcagatggcatgctttgaaattgagaaaataacagagatgctcagcaagaactttcgtcttcaatggtttcacagacatttggtgtccctgatatggccttcaattcaattgattccacaatagatgatagtaacttcttgaacagtggtccgtgggctccaccaccagcaccgccacctctgccaccagcacagtttcagcggatgaggacatataccaaggtatataaacgcggagctgtgggaaggtccatagacataacacgatattcaggttatgaggagcttaaaaaggatctagctcgtaggtttggcatagagggacagctggaggatcggcaaaggataggttggaaacttgtctatgtagatcatgagagtgatgttcttctagtgggagatgatccttgggaggagtttgtgaactgtgtccgctgtattaaaatactttctcctcaagaagtgcagcagatgagcttggacggagattttggcaatggtggccttcaaaatcaagcctgtagcagctctgacggtggcaatacttaaatgaagttcagtaatacgctaactattcttccgtattgttaacttagattatttctgggagatgcattattgtcctaattccgaaaggcaattattatgccactgcggacttctgtgtccaccatcaggacttgaaaggagaagttttgtctatgttccggacatgcaaatttgaagagccaaatgagggcggagaagtgagctgctgctctggtttaacattgagcggtaattttgaatgtataaagtcttaggcagctagattttgcggaagctttcatgatcttccatccttggaggcaccttattattttttagccaatatgactgtgaagtagagaaacttcaaatgttgtaaggtcaagtgcatactgttgcattgtttgcttgaagcgtaagtactaaaaatgttggagttatttgactgtacaggagatcaattactagtatttgacacatgaatctaatgttcatcatcgactccctcttattctaattcagtaattgaaaagaaaaaaaaaaaaaaaaaaaaaaaaaaaaaaaaaaaaaaaaaa

SEQ ID NO: 28067 - DNA, 1068 bp, Glycine max
  unsure (1)..(1068): unsure at all n locations
  Clone ID: TF_GmC1199_4
ggctcgagcttgtcccgcccctgcccctataccatagtacattagtacccccacacacccctctatccggctctattgttgccacacacaaatcaattaactgaattcttagacagagaaagaggagtagtactagtgataaggtgatcataatagagcataatataagagagtgaaaactcatggaggttggcctcaacaagaaggagaacatggggtttgaggaaactgagctaaggcttggactgcctggaaacgtaggaggcactggcactgaagaagtgctcatcaggaagagaggtttctctgagactgaaactgaaactgaggaggatgagtctgctaccactgtggatttgatgcttaatctttcttctaaggaagctgctgctgctgcagatccaactgataagcacaagactttgcctaaggagaagactcttctgcctgcagatcctgctaagcctccagccaaggcacaggtggtaggttggccacctgtgcggtccttccggaagaacatgttagctgtacaaaagagcgtcggagaagagaacgagaagaacagcagcagccctaatgcaagctttgtcaaagttagcatggatggagcaccttacctccgcaaagttgacttgaagatgtacaagagttaccctgagctctctgatgccttgggcaaaatgtttagctccttcaccattggaaattgtgaatcccaaggcttcaaggatttcatgaatgagagcaagttgatggatcttctgaacagctccgactatgtcccgacctatgaagacagggatggcgactggatgcttgtcggtgatgtgccatgggagtaatttttttttttctccacttgatgacccgatcgaaattattttggttgcaataatttgaccttgtaatagtttcaatgaaaangaatatggaacacaaaaggcagaaaaaagaagacaggagcttgatatgcacatcacaatgttacttcaaaactagtccttatccaagaaactttgcgtaaaatattatgcatgttctaaggaaatcatgggttatcatctt

SEQ ID NO: 28068 - DNA, 681 bp, Glycine max
  Clone ID: TF_GmC183_4
aggtcagcatggatggtgctccgtatcttaggaaggtagatctaagaagttatacaacatatcaggaactatcttctgcccttgagaagatgttcctaagctgttttaccctaggtcagtgtggttcccatggagctccaggaagagaaatgttgagtgagagcaagctgagggatcttctgcatggttctgagtatgttctcacttatgaagataaagatggagattggatgcttgtaggggatgtgccatgggaaatgttcattgagacttgcaaaaggctgaaaattatgaagggttctgatgccattggtttagctcccagggccatggaaaagtctaaaagcaggatttagggtatcctggatttcctcttttgtctaatcaagtgtttattgttggatcctccggaatgggaaaagcaaaggatgatgactgaaatcctggcattggtggtttaacgcccttccacttatttgttttcaagtccctcaagagtttgtcatggtcctgtgttaatttgttaccactgtaatatcatatgaaagctacaatgaaatattagtatttgtggagtctgtaatcattataggaatccgtttgttttggaagaattgaacatctgttacagccgccaccatacggttctaacactatatttgtgatttgcgtcccctgcct

SEQ ID NO: 28069 - DNA, 940 bp, Glycine max
  Clone ID: TF_GmC590_3
ggagaaaataaaccaatattattccacaaaacaaattaaagttcgtgagagtttaatcaatttgatacacgtacccttatggccaaagaaggtcttggacttgaaatcaccgagctaaggttgggtctacccgatgcggagcatgtaactgtggtcaataagaatgagaagaagagggccttctcgcaaattgatgatgaaaatagctcctccggcggcgaccggaaaatcaagaccaataagagtcaagtggtggggtggcctccggtgtgctcttaccggaagaagaacagcatgaacgaaggttcaaagatgtacgtgaaggttagcatggacggtgctcctttcttgcgcaaaattgatttgggtctccataaggggtactcagatttagccttggctttggacaagctctttggttcctatggaatggtggaggccttgaagaatgcggacaattctgaacacgttcccatttatgaggacaaagatggtgactggatgcttgttggagatgtcccttgggaaatgtttatggagtcatgcaagaggctgaggattatgaagaggtcagatgccaagggcttcggtttgcaaccaaaaggatctctgaagggattcatagaaagcgcggcaaagtgaaacattatgttaggcttctaattaatgtcgtgcacattttgacgatcatcaatccaagtttatgttgtcgttttattatatttgagaaatcatgcatttttagtttgatatatgaatcatacttttgtttatgtcaagtattaatgaatgacatataggaccctatataactaatagggaaaactcattgttttagattaattaatgctttgccatgcttgttaatttgcattcaattgcaatataagttattgtaccagtatattgttttattactgatgatttcaatttgttaatt

SEQ ID NO: 28070 - DNA, 753 bp, Glycine max
  Clone ID: TF_GmC183_3
agtagatggaaaccggggtgcagcagcactctttgtcaaggtcagcatggatggtgctccctatctgaggaaggtagatctaagaaattatacaatgtaccaggaactgtcttctgcccttgagaaaatgttcagctgtttcactctaggtcaatgtggttcccatggagctccaggaagagaaatgttgagtgagagcaagctgaaggacctcctgcatggttcagaatatgtactcacttatgaagataaagatggtgactggatgcttgtcggagatgtaccatgggatatgttcattgacacatgcaaaagactgaaaatcatgaagggttctgatgccattggcttagctcccagggccatggaaaaatccaggagcaggtgctagttggtattggaacatgaagagtgtggaaagagaacttatgatataaatgactgaatgccgggttttgatggttaactgctattcaagatgttgtctatggttacaagtatcataatagtgtcttggtcttttgtttgtgttacatttgtttctactataataccttatgaagctaccttgaatattagtaattgtggagcttgtaatctttataggaacatgtttgtttggataagttgaatgtatgttgcaatcagtgtattgttttcaatgttttgctattccttagcctttctttcttttgtcttgaaagggcattttctcatgcctaccaagatgattcaaatgattccttagagccc

SEQ ID NO: 28071 - DNA, 409 bp, Glycine max
  Clone ID: TF_jC-gmle01810061b03a1
ggtttctctgtttctctcttctcttgatctcatactttcactctcactcactattcttcatggatcataatatgtgctcacatatgaggacaaagatggcgataggatgcttgcgggtgatgttccctgggacatgttgattgaaacatgcaagaagctgaggatcatgctgagctctgaggccattggtctagctgcgacggctgtacgcaaaaaggcagagcatgaccttggcagctcctgtgttgctgtctatgcatctaactgtctgcgggactaaaagcttctgggctatcacggactacctaatcagaacgtggttgacttggaagctacaaatgacagcattcagggctgcatagaatctcatactatgctgccttaatgccttcatgcctgattatgactg

SEQ ID NO: 28072 - DNA, 502 bp, Glycine max
  Clone ID: TF_LIB4366-010-R1-N1-F12
aaaaaaaaggaggaaatttttttttttagctggccaggacaaacaaaaggcccgctcacagaaaggcaaaatttacatcctccgggaagccttggggacggaaacggaagtgtgggaaaacaccctaaaaccttaaacatctacctcaaggatatagacgggtcccacccccaccctaataggcgggcatcaatatatatggcccactaaaaagtttaggcccccccaatctcgtttatagaattatccggaaaaaacccccgggttttataggctaaaagggggcctcccctctttcgggattaaaaaacaaaagcctcccgcattgccctagctaggagcgacttttgcccttttccagggctttaggggccaccccaattgcttaaaaactttttattatcctcagccttttgcaaaactcagggaactttccccccgggacatcaccaactagcctccattctccctccttggcttcaagggaaaaaacattttctga

SEQ ID NO: 28073 - DNA, 513 bp, Glycine max
  Clone ID: TF_GmC435_6
ttcctcgcgtccgggacaagataccacttgactcagcaatgaaatgaacatgtgccatggcacatgtttgtatcaacagtgaagaggctacgagtgttgaagagttctgagctttctgcttttacccttggcagtaagcaggacaagataccacttgactcagcaatgaaacggacgcgtgggcggggcggtttgaggttttgatcacctgctgaaaacttgaagactcttcctaatttgacgttttggttctattgtctgatgaaaagaacatggaatgaagctagttgcgtacattacaactaagtaatgtgatgaatgtgtcttttttttttttttttttctaaatgaagatttgaaatgcctgtagacagatgcaaaggacctgaaaatttctgtcaactttttacttaagttgcttgattcgcactttccctctcaactctcggtgatatgaatctaaatttcattaaccaaaaaacttaccaccacactaacaaaaaaaaggggggg

SEQ ID NO: 28074 - DNA, 1575 bp, Glycine max
  Clone ID: TF_GmC1129_1
gttcattctcccaggatggaacatcccagttacttaacttgagtggatccaattccgttatgtcttctgcagccatgctacccaagcaaataaccactgaacctcctcagcttccatctgctgctcctcagtgtgtattgcctcaggtggaaaacttgggaacatcacaatcaaatgtgtctgaacttgctgctttgcctccatttgctggaagagaacattctgcataccatgctgctgctgatcctcagagcaatcttttatttgggattaacattgacccctcttctcttatgctgcaaaatggcatgtcaaacctgagaaatataggcaatgtgaacaattcattatcgttgccattttctgcttcaaattgtggtggtgcttcaggcactgatttccccttaagttcaaacatgacaacttcgagttgtgtggatgaatcaggtttcttgcagtcttctgaaaatgtagaccaagcaaatacaccaactggaacctttgttaaggttcacaagtcagggtcctttggcaggtcactggacatttccaagttcagcagctatgatgagctcattagtgagcttgctcgcatgtttggccttgaaggccaactagaggaccctaagactcagagatcaggctggcagcttgtatttgttgaccgggagaatgatgttcttcttcttggtgatgatccttggcaggagtttgtgaacaatgtgtggtacataaaaatactatctccactagaagtgcaacaaatgggcaaaggtcttagtccttctacttctgccccaggtaacaaactttctactcctgccaactcttgtgataattatgtgagtcaacaagagttgagaagttcgagaaatggcatggcatcaatgggatcttttcactactaggacactctcccatgtaaggaaatattagttgagaaattatggtggcagaattttatgttacaagttttcttatgtatggattggcccagcattcttgtacacattaatggttgacatgtagtgattttgcaaggtctaaatagatcaacagcaaatgactgtaaattataataggtggccttttttctgtaatggttagttgcttatagcagttattaattattactgtatctcttaactactgtgataattaagagagtgaacaagagttgagaagttcgagaaacggcatggcatcaatggggtcttttcactactaggacactctcccagtcccatgtaaggtatattagttgaaaaattatggtggcagaattttatgttacaagtttcttatgtatggattggcccagcattcttatacacattaatggttgagatgtagtgatttagcaaggtctaaatagatcaacagcaaatgactgtaaattataataggtgaccctgtttctgtaatggttagttgcttatagcagttattaattattatctcttaggtgggaagtatatgtaaattatattaggagggagactggaagtcgaggccataagtagaaattaaagttactagattaaatgaccatcagtcatatacgtcgttacatag

SEQ ID NO: 28075 - DNA, 2637 bp, Glycine max
  Clone ID: TF_GmC22_1
gtccaaccaagccttcgttacggctgcgagaagacaacagaagggggactcgaagtgtaagcactgagcagttgaggaaatgggaacccttgggagagcgatctacagcgttggtaactggattcgagaaactggacaggccattgatcgtctcggttcccgtcttcagggcggttactacttccaagagcagctctctaggcatcgaactctgatgaacatatttgataaggctcctgttgttgataaggatgtatttgttgcgccaagcgcctccgtcattggagacgttcaacttggaagaggatcatccatttggtatggagttgtcttgagaggtgatgttaacatcatcagagttggaaatggaactaacattcaggacaactctctggtgcatgttgcaaagtcaaatttaagtgggaaggtgttgcctacaattattggggataatgttactgtcggccacagtgctgttatccatggttgtactgttgaggacgaggcttttgttggtatgggtgcaatactacttgacggtgtagtagttgagaaaaatgccatggttgctgctggtgcccttgtgagacagaatacaagaattccttctggcgaggtatgggcaggcaatcctgcaaagttcctgagaaagctcactgacgaagagatagctttcatctcccagtcagctaccaattatactaaccttgcacaggtccatgcggccgaaaattcaaagtcctttgatgaaattgagtttgagaaggtgctacgaaagaagtttgcacgcaaagatgaggagtatgactctatgctgggtgttgtgcgtgagatcccaccagagcttattcttcctgataatgtcttacctgataaagcagaaaaagctcttaaaaaatctggtatttaaaagcagtgtttttctattccaatcttgaaatgacatcatgggactctattggacggctgcgataagttcacagaaagtcacaaaccgaaccacttattatctctctctctctgtttcgctttcaccgaaagaataacttgactttcccgaactccacctgagaacaaagatcacccttaattcgcaggcgcgtcttgtgttggacaacaaccacaagatgattaacttcgaagaaaccgagttggcgactcggcctaccctggacaacgactcagcactcaagggataagtgctgtccaagagaggcttcgttctgaaactgcttctcttgatttgaagcttagtctttcttcttgcattaacgactctgcctcggattcaccctcatctatgtctacagagaagcccaaagagaacaagactaccactgatgaacctcctcaagctaatgatccagcaaaacccacctgcaaaggcaccaagtggtgggttggccaccagttaggtcatttagaaagaacatagttcaaaggaacagcaatgaagaagaggcagagaaggagcacgaagaatgctttcgtagaaggtgagcatggatggtgcaccgtatctacaaaagggtggacataaaagttgtacaagaagctaccgatggagctgtcagatgcgctggtctaaagatgttcagttcctttacgatttgaaaagtgtgggtcccaagggatgaaggattttatgaatgaggacctaatggctctggactatgtacccacatatgaagacaaggacggagactggatgctcgtcggttgatgtgccctcgaggagatgttcgttgaatcatgcaagcgtcttcgcataatgaaaggctccgaggcaatcggtcttgcgccaagagccgtggaaaagtgcaagaacagaagctgaagaagtgatttcatctgcgtcacaaggaagcaaattgactcgagcaagatcgagtctaatataggaataagagtttaattatcatgtgcctttgttatcttttttgtaattttcttatatgtgtattatatgaatatgagaaaatagttggaaattcgttagggacacgaaataatatagaagatgtttatatgatcccgtttttgtttccaaagtaaaaaatgtgactttgtctattcagatgctagcttgattatcttatgtgagtattaatggtatagaagaattttttgcaattccatggatgagggattctttacattcccaataattcctaacattttctgcgatagaattgtagctccttacggtccaggaagcaattgttccataaattccgaactctgttgtctaatttgggaaaggcaagtgccatgtaggatatcgtatgctgatctttagtgtttgatgtatccaatgcaagtgatttcacattccccccccttactttttttatgttcaagttgttgttcgtcaacttggtgcataagttctcgttgacatctttattaatgaggacactgacgctaatgtttttgttttaccacctgcaaagtcagttcttcttctccttatgctttcccttgatttcaattccatgtgtttcttcccatagaaaatttggttctttttttttttttttttttgttggtatgaaaagttttagtttgagacaaaaatttgaggattctatattctgctatgctgctggcaactactcatcactcaagggaagtgct

SEQ ID NO: 28076 - DNA, 447 bp, Glycine max
  Clone ID: TF_uC-gmropic110e02b1
tttaccttttgtccgcccaacatcactgccggcgccaagagagctgctgctgattctcttgttgccaataaccgtcccaggatcaaatggtgaggattatggcattattatcggaggagaaagacattcaaaattgttggatggatcttccaagttcgtgctcacttatgaagacaaggaaggagattggatgcttgttggggatgttccctgggggatgttccttagctcggtgaggaggctaagaatcatgaggacatctgaggctaatggacttgcaccaagattggaagaaaacatcaaacagagatgcaagcccatatagatactgttttcatggctaaggacacgaagaacctgtcaaatagatgaagagaaaaaacagaacagaaaagttaaggaatattgcatgtatatgaagttttgagatttgaatgataaaatctc

SEQ ID NO: 28077 - DNA, 684 bp, Glycine max
  unsure (1)..(684): unsure at all n locations
  Clone ID: TF_GmC224473_1
gtcgacccacgcgtccgctactacccaaaatttgcagaactctgctaaaaggagctgcacaaaggttcacaagcaaggcagcttagttggaagagctattgatctttcaagactgagtggctacaatgatctgctgagtgaactagagagactgtttagcatggaaggccttctaaaagatcctgataagggatggaagatcctctacactgacagtgagaatgacataatggttgtgggggatgacccatggcatgagttttgcgatgtggtgtccaagatccatatatacacccaagaagaagtggaaaagatgacaattgagatgatcagtgatgatactcatagctgtttggaagaggcaccagtgattatggaggcttcaaagtcttcctcagtgggtcagccagattattctccaacagcagttagggtctaaaggttttcagggttgtctgaaatatttattatgtttggtcctgtctctgtacaagataaatctacatgtttttatgctgtttggttactaccctacccttttgagtttgtaggcccagcaaaaattgcatggtcagcactagaaaagactgacaattgagtgcattaaactaactaaataagggctagccttggcatcatataataaaccattattatgggttttgttacgtactctngaataat

SEQ ID NO: 28078 - DNA, 1091 bp, Glycine max
  unsure (1)..(1091): unsure at all n locations
  Clone ID: TF_GmC26770_1
atcccaataactttgagaaagctagctagagagctatatctaactttgaaaatttgcccaatatacatgttctactttgcctattgcaacatatcctatagttagcttcttagttcttacattacatacatggaagttgacttagttcttgctctccccactcaaaattccgttgaggaattcaagcttaacaagtcgaaacagatagtgagtttacagttatggagagccagttgcggttcagaaagcgaaaaacgtgtcaaacacaataagcgcagcttcgaagagtcctttggacattttttgaaaccttttcctttactagtttggagtggacagccaaatgaagaagaagaccgtagtgaaaaggtgcaaagaaacattcacacaccaaacaagaatggtgatgaagaaaaccatttggtggggtggccaccagttaaatcatggaggaggaaagagctccatcagcagcatcctgcgagaggccaaattaggaacgataggattcaagctaatgagaatcaaagtagaagaccaaactctttatatgtaaaggttaacatggaaggggtagccataggaaggaaaatcaatttgaggcttttcaattcttatcagacacttacaagcagcttgatcagcatgtttgctaaatgtattctaaattttctttgttatgctcggtaccaaaaatttgaggaagttggagaaagttacacactcaactttcaaaacgaacaaggggattggctgcaagtaggacatgttccatggcagtatgtgcatattttataattaactataaatagattacatactttcagtgacttgcttcagctttgattctttttaataattttgtattgtttcaatcacaagtaacctgatcgaactttcaaatttcaacatctgccaaataatcagcaaaatttacccatgatcgtgaaattgagagcaatggtttaatattaaaacttgtacttgttaagtaatctgcaaggcacttttatagctataattaagcagttggtggggnnnnntaaggatgtggctgtgcatgaagaaagcatgaactaatcaaagtctat

SEQ ID NO: 28079 - DNA, 930 bp, Glycine max
  Clone ID: TF_GmC570_3
gggatatgatgaactccggcatgatttggctcggatgtttggaattgaaggacagctagaagatcctcaaaggaccgagtggaaactagtatatgtggatcatgaaaatgacattcttcttgttggtgatgacccttgggaagaatttgtaagctgtgtccagagcataaagatattgtcatcttctgaggtacagcaaatgagcttggatggggatttaggtcatgttcctgtcccaaatcaagcttgtagtggaacagataatggcaatgcgtggaggggacagtatgatgataattctgcagcctcatttaatcgataaggatgccaagtattgacattttggagcagtcaacttgtatattttgagacatggagaactaacttaacccttaaaatttcttgttggtgcttttatatatatctctagtggaaagaagacatattcattgcagaacttgcaagagatgcagttgatggggtagtgtagaagagggttgatacatagctgcatcctgtttagtggcaagagagtttagatccctagatgtaccaagatccggctcctttactaaaatgatgcagattgcagattctatcttgggatctgctttttctattggctggtagtgtatgcttaggaattttttcctttctttttggcaaggtacagccatataggtcagctggtgtacaatatatgattgttcttatataaagaaaacgttttactttctcttgtaaatcttgttatggttaaagttgtatacggaagtttggtgtccaagtaatggctcagagcctcagacaatgaagaatgcatgccaattctagctcttgtatagtgcctacgatgttacgacgtttacacggtggccattttggaaaagtttagttcattatggatggaagaaaacaaagtttcttttt

SEQ ID NO: 28080 - DNA, 1060 bp, Glycine max
  Clone ID: TF_GmC624_1
gaaatagaggaacgaattttattttattttcaaaatatttgattgaaatttaaattgaaaagacgggagaataaaatctatcaagatgaggttttgagttgattaattcttgttgataattatcttctcatgttactatgttagcctctagtgttggagaagctgataactcttttctatgtaatttaggggatgttccttctatgggaacaagttgtgggatggccaccaatccgttctttcagaaagaactcaatggccactcagccacaaaagaatgatgataatgcagaagccaagtcggtatgcctttatgtgaaggtcagcatggatggtgctccatacttgaggaaagttgacctcaaaaactttggcacttacatggaactgtcttcagcactggaaaagatgtttagttgttttacaatcagtcaatgtggttcccatggagtttgtggtcgagataagttgactgaaaatagattgatggatctcctccatggttcagaatatgtgctcacctatgaagacaaggatggtgattggatgcttgttggtgatgttccatgggagatgttcaccgactcttgcaagaggttgaggataatgaagagttctgaagcaattggactagcaccaagagccatggaaaaatgcaaaagtcgcaactagcaagatggtgttgatacagaaagatgaattattattattacctttaaacacgtacatcatacaagagtccagaggcaagtgcagggcacaagctggggcttttcttgcttgaatatgtatgatataatcctacatatgggatccaagtatcctagactttttagtaggcaagatatgtttgttgtagacatttaaggtttcttaggcttgtttcccctcacttctcttcaatcactgtcactgtggacttcataagactgaagctacgtcgttactatgtaaattttgtaacttaagtctcatatatagattagtttgagatggttaattagagaatattaaaaaaaaaaaaaaaataaattaaaaaacaataaaaaaagaaaagagg

SEQ ID NO: 28081 - DNA, 1032 bp, Glycine max
  Clone ID: TF_GmC573_13
cggctcgagctcacattattattcatatctctctctctctcccccaagaaattcaacagagttttgattaacttgaaattgttcaacaagaaatggagaattcattgggaaagtacggaaaagagcttaatctcgaggctacagagttgaggttggggttgcctggaagcgatgagcctgagaaacgttctgctgttagaagcaacaagagatcttcaccagaagcaagtgaagaagagtgcataagcaagggcaacatgaattcttctgatggttctgatatcacaagtgatgaccaagacaacgttgtgccacctgcaaaggcacaagtagtgggatggccaccggttcgatcatataggaagaatagtctacaacaaaagaaagaagaacaggctgaaggggctgggatgtacgtgaaagttagcatggaaggtgcaccttacttgaggaagatagatctaaaggtttacaagagctacccagaactcctcaaggccttggaaaacatgttcaagtgcacatttggtcaatattcggaaagggaagggtataatggatctgaatatgctccaacttatgaagacaaggatggggattggatgctggttggagatgttccatggaacatgtttgtgtcatcctgcaagaggctgagaattatgaaaggatcagaagcaaaggggttgggttgtttttgaccctaaataaaaaaacaaagcaggaccatcatgcatgcccatatccaaaacatggagcaaagcaattttcagtgacgtcatccaaaagaattttttctgtttggaatatgcaagagctaggcacttggcctctgtgaaatggttatatttagcttattaaaaagagagatgcacatacccgattttattttccccttatttgtttatttcaaaaggtaggtgcctttttagacctgcttccttccgtaaaatattccaaattttcaatgccgaaaaaaaaaaaaaaaaaaaaaaaaaaaaagcggccgctctcccggccccaagcttacgt

SEQ ID NO: 28082 - DNA, 498 bp, Glycine max
  Clone ID: TF_LIB4167-012-R1-N1-A10
cttctttttttttttttttttttttttttttttttttttttttttttttttttttaaaaaaccccctatttttaaaaaattggaaaagttttaaatttccaaaaaaggggaaaaaaaacattattaaacccttcattttttttcttccattcccttcccttttttcccttggatttggctagctctaaagaccccttcccttaccaatatccaaacatcctttaaaaaaaaccaaccatccctttgtttcaggaccagaatcccctaatatggactctcactctataggactaatttggaagccccaggaaaggcaaacctttttcatatgtatgcttttatcccccgaaggcccccacccttgggatcttcaacctttttacaggggaaaaaaacactccccaagggacatccccacccaaaacaaaatccccttctcctatcttaaaagtaaaaacatgacatcttttgggtggccccccctccttttaagccccc

SEQ ID NO: 28083 - DNA, 1155 bp, Glycine max
  Clone ID: TF_GmC960_2
tatcgtcatcatctcacaagggatacaatacaataccaagaagctacctagctacaagagactccactcatcaccacctcaagcaactaattaactagcatagggtgttttggattatagattgtacttggaagaagatggaaaacactactgtgacatatcaaactgatctcaacctcaaggcaacagagcttagactggggcttccaggaacagaagaaagtgaggagaaaacattgtcagcaggtgctagaattaacaacaaaagacctttaactgaaacctctgatgagtgtgcttcaaatggtacttctagtgctccacatgagaaaactgaaacagcccctcctgccaagactaagatagtggggtggccaccaatcagatcctataggaagaacatccttcaagagagtgaaggtgctggaatttatgtgaaagtgagcatggatggagccccttacctcagaaagattgacttgaaagtctatggaagctacacacaactgctcaaatctctagaaaatatgttcaagttgaccataagtgagtactctgaaagagagggttacaagggttctgaatatgcacctacatatgaagacaaagatggtgactggatgctagttggagatgttccatgggacatgtttatgacttcctgcaaaaggctaagagtcatgaaaggctcagaagctagagggttgggttgtggtgtgtgacaaacagttaatttactatggctatgatgaggagattaaatcattctttcatcaattcagttcttggaactaagggattttgaatcaatgcttagctatctgtctatctatcaccatgccaatctgggaggactctaaagtagggatatggaaggctctttctacaagttttgtcaatatttctggttattaattttagcatatgtgattgggggtgctatatgctattatttccattgaaccctttcaagaggaacctcagagaaatttgtcttaaacgaagtttgtggacaagagagataaaagggattgatttgttcatccaaggttttttttttttctttttctttttatctcacacaaaaatatagtgtaatacatcaaatattcatgtaatactttgcaattcaatggacacaaaataaactaaaaa

SEQ ID NO: 28084 - DNA, 488 bp, Glycine max
  unsure (1)..(488): unsure at all n locations
  Clone ID: TF_LIB3242-425-P1-N1-E9
gtagacttgaagaattactctacatatccagaattatcttctgctctagaaaagatgttcagctgttttactataagtaaatgtggatctcatggaattctgggcagggagatgctgaatgaaaccaagctgaaggaccttcttcatggatcagaatatgttcttacatatgaggacaaagatggcgattggatgcttgtgggtgatgttccctgggagatgtttattgaaacatgcaagaggctgaggatcatgaagagttctgatgccattggtctagctcccagggctgttgaaaaaagtaagagcaggacctaggcagtacctgtgttcctctctatccatctaactgtctgcgggactaaaagcttctgggctatcagggacgaacaaatcagaacatggttgtcttggaagcaagaaatgaaggcattttggactggatagaatctcatactatgctgccttaatccttttttntttattat

SEQ ID NO: 28085 - DNA, 522 bp, Glycine max
  Clone ID: TF_GmC1078_3
ggctcgaggtgagagctctttgagggatcttctccatggatctgaatatgttcttacatatgaagacaaagatggagattggatgcttgatgttcactgattcatgtcggagactaaggatcatgaaaggctctgaggcaattgggctagctccaagggccatggaaaaatctaggagccaaaactaatgcagaaaaaacctgtttgaccgaagctggttattactgaagcatataaagatttacaagggcgtttgagtttatgattctgttcaaaatcaaaaacatgtcattcagtgtctcagtttttgtgcattaatagtctgacaagttttattagtagaattcaactggagacatccagacaatatatacacatattttgtttgtttctctattttgtgtatctttggattctagttgctgtataaaagaattgcttgttgtgcttttcccctctataactattctgaattttctccatgtatttgttttcaatatacatactgaacctttgtattta

SEQ ID NO: 28086 - DNA, 684 bp, Glycine max
  Clone ID: TF_GmC274615_1
gataggggaatcttggatgggatgccactatttttactccagaaaatcgtttattacattacatagtgccaggcaatatatgatggattgtggtatcaacagatgtgcaaaatagtatttgatcatatagcatagaaacagggttaacaacacaatacttaagacaactctgaaactacattctaaccactgttggagaagaatctggctgacccacagaggaagactttgaagcctccaccatcactggtgcctgttccaaacaactctggctatcatcattgatcatcatcccaattgtcatcttctccacctcatcttgtgtatgtatatgaatcttggataccacatcacagaactcactgcagacaaaaggcaaaatgcaatttttttcagtgtatttcacctaaaatgttatgttacataggatggaacaggtgtgaggttctattggtcccatcaattaattttgtagaataaggagatgatggccaacgataactaaaacatgaaaaagctaaggaagatgactacttactgccacggatcatcccccacaaccataatgtcgttttcactgtcagtgtagaggattctccatcccttattaggatctattagaaggccttccatgctaaatagtctctctagttcaatcagcaggtcattgtagctgctcaatct

SEQ ID NO: 28087 - DNA, 195 bp, Glycine max
  Clone ID: TF_uC-gmflminsoy007a12b1
ccatgggagaagatggttgagtcatgcaagcgtttgtaaataatgaacggaacagaagcgatgggcatggcgccaagagcaaaggaaatatgcaaaagcagaaagctgaagcggtcccaaatacaatgtacaatgaaataccgaaccaaagaggacgctataaaaatatatatatacatatatatgaagcacttt

SEQ ID NO: 28088 - DNA, 2924 bp, Glycine max
  unsure (1)..(2924): unsure at all n locations
  Clone ID: TF_GmC371_3
ctcaataatcacttttatcatttcaaacaaagaaagttgttagtgcttaacattcctttgaatattaaactaagttcaatttttatttcttaccattagcgtgacatgaaaaaataaatttattaattccaatatatattggtggtataaagcacttccatatatgattggtcacaatttttttttacttagattccatcttcattgaaaaaagttaaaacacatgaaaaattaattatttcagttaaattaattcctttcactttttaaatatattctttatttgggtaaaataattcctttttgttatgtgtgagtttgaaattcttttaatttaatatatttgtaaataaattattttgacctaatatattgtaaatcaattcaaaaatagaatttactgtctaaagactcattattcaaccaaacgagagagttgtgttattctatagtgacggagcaacagaaaggttaagaatgtagcataaccaaaacaatgaaacaggtgatgtagaagatcatgctgtgaacggaggtagcaatggcgatgatgctttgactataaataagttgctatccgatctagcaaggcaggaagactactttgataaaagcttacaatggcgggagagtcagggcaagaagcgcaggagacaagatgacaattggtggaatatgcggaaggacctgttattggagtagatggaatggggggagttggaaaaacatccctggcaactcatttcaagaatgagattaaaagaaaggggactttcaaggatgtcttctgggtcactgtttcccatgatttcaccattttcaaattgcaacatcacattgcagaaacaatgcaggttaagctttacggagatgagatgaccagagcaacacttttgacgtcagagttggagaaaagagaaaaaacactgcctatctcggatgatggttgggaatatattgatctgcanaaagtggtcggattcccgggtcgacccacgcgtccgcggacgcgtgggctttgtgacaaatggagggtccttagttctgtttctctttcttctctctgtgctttcaaccaagttctcaaatcactcttcttcttcacccttctgatctgctaattctcaagcgctttctttctcgttggagggtttttacttgatagtgaattcattcaacctcctgttcggccccatggaaggtccttagttttctctctcttcatctcaaagtttcactctcactcttcttcttcttcttcttcatcctttctgatctgtgctgttttttcagggtacaacaaaattgggtgctttcggttaaactgtgatgtctccgccagtgctgagcataggggaggaggagggtaaaagcaatgtcactttgttggtttcctcatcaaccaccatggaaagtgtgtgtctcaagagcttagaatttaaagagcgcaactacatgggattatctgattgttcttctgtggacagctcggttccgtccttctctgaagagactaaaagtaatctgaacctgaaagccactgaactcaggctcgggcttccaggatcacagtctcctgatagagattctgatctttgcttaagaagctcaactcaatttgatgaaaaaactttgtttccgttgcgtcctttgactgatgatcaccattcttcagccaagactgctgttttgggaaacaaaagagggttctctgatgccatgaacggcttctcctcagaggggaaattcctagttgattcggaggccgccaatccgatactgtctcccaggcctgcttctaacttgggattaaaacctggttctacacttgagaaggttggagttcagcaaaccaaaatgaaagaagtagcaacaacaaaggccaatgaagctagacccactattgatggttctgcaaataataataacagtgcaccagctaccaaggctcaggttgtgggatggcctcctataagatcattccggaaaaattcattggctaccacttcaaagaacaatgaagaagttgatggaaaagtgggggttggtgcactgtttgtcaaggtcagtatggatggtgctccctatttaaggaaagtagacttgaagaattactctacatatccagaattatcttctgctctagaaaagatgttcagctgttttactatgagtaaatgtggatctcatggaattctgggcagggagatgctgaatgaaaccaagctgaaggaccttcttcatggatcagaatatgttcttacatatgaggacagagagggcgattggatgcttgtgggtgatgttccctgggagatgtttattgaaacatgcaagaggctgaggatcatgaagagttctgatgccattggtctagctcccagggctgttgaaaaatgtaagagcagaacctaggcagtaccagtgttcctcttcgaacatggtgtattggaagcgagaactgaaggcatatgggactggatagaatctcatactaagctgccataatccttctattgtttattatgtgtccgttttatgttgtcatggcgtttatgatttagtaagcttcttttcaagattgttgtgataaaacttaacaaaactctaagacttgactgtgggagtagctatattttatgtacccgagttaatgttatggttgaaggatctttgatgtgttaaaaatgcagcgtctcaacggggtgtcctatgtttggaaagaaagaaaaatgtatgtcagtatgtccctttgccaaaagcactgcttattttggatgatgtttgggaatatattgatctgcaaaaggtggggattcctcttaaagtgaatggcattaaattgattatcacaactcgtttgaaacatgtgtgtctacagatggattgccccccctataatataataacaatattcccctttg

SEQ ID NO: 28089 - DNA, 1233 bp, Glycine max
  unsure (1)..(1233): unsure at all n locations
  Clone ID: TF_GmC22_2
actcccncgttccggaatttccttttcgaccgcacgcgtacgcccacgcgtccgcccacgcgtccgtccattttctcattctctgtttcgctttcaccgagtaacttcactttccccaactccacctgagaaaaagatacccataattcgcacgcacgcacgcacgcacttgttctgactcagtgcttgtgttggacgcagaagaaccagaaaagaaaaacaagcacgaggagatgattaacttcgaagaaaccgagttgcgactcggcctccctggcgggtctgcgagtgatcacaacgagtcaacaacggtcaagggcagtggtggaaagagaggcttctctgaaactgcttctgttgatttgaagcttaatctttcttccagtgatgactctgcctcagattcaccttcatctgcgtctacagagaagactaccactgctgcacctcctcctccttctcgagccaacgaccctgcaaaaccacctgcaaaggcacaagtggtgggttggccaccagttaggtcatttagaaagaacatagttcaaaggaacaagaatgaagaggaagcagctttcgtgaaggtgagcatggatggtgcaccgtatctacgaaaggtggacataaagttgtacaagagctaccaggagctgtcagatgcgctggctaagatgttcagttccttcacgattgaaaaatgtgggtcccaagggatgaaggactttatgaatgagaccaaattgatagaccttttgaacggctctgattatgtacccacttatcaagacaaggacggagactggatgctcgtcggtgacgtgccctgggaaatgttcgttgaatcatgccagcgccttcgcataatgaaaggttctgaggctatcggccttgcaccaagagccgtggaaaagtgcaagaacagaagctgaagtgattttagggttcggccacaacaatcggcttggttgttcatctgtgtcacaaggaagcaaatgtactcgagcaagatcgagtctcttttaggaataagagtttaattataattattattattatgtgtctctgtaattttcttatatgtgtattatacgaatgagaaaatagttggaaattcgttagggacaagaaataatatagaagatgtttatatgatcccgtttttgtttccaggtaaaaatatgtgactttgtccattctattgcctgcttaatgataatgtcaatgtttccagtt

SEQ ID NO: 28090 - DNA, 4073 bp, Glycine max
  Clone ID: TF_GmC371_1
ccttattggattctcaaatattcaggcagtgtcataatcggttggacttggacactagctgcttcttcagctagctccgttcctcctccatctcattctcattctcccaaatcttcattcacaagacaaaatgggttgtcatggtagcaaggagaaaaaaatcaaacacttcctatggatcagcagccactggtagtggtagtggtagtggcagtggtggtggttacaacactgttcagccatcaccacctactaccgatcaggttcaagcatcagcacagactccagaaaaccgaaaagcttctcctacagtgcagaagaaagcagacacaagcatcgtggggaaaccctttgacgacataaagaaatactacagtatagggaaggaattgggaaggggccaattcgggataacgtatctgtgcacggagaattcgagcggggggacgtacgcgtgcaagtcgatactgaagaggaagctggtctcgaaggcggacagggaggacatgaagagggagattcagatcatgcagcatttgtcggggcaacccaacattgtcgagttcaagggcgccttcgaggaccgcttctccgttcacctcgtcatggaactctgctccggcggggagctcttcgatcgtatcatcgcccagggtcactactccgagagagccgctgcctctctctgccgctccatcgtcaacgttgtccacatttgccacttcatgggcgtcatgcaccgcgatctcaagcccgagaatttcttgctctctaccaaggacgaccacgccaccctcaaggctactgattttggtctctctgtcttcattgaacaagggaaggtttaccatgatatggttggcagtgcttactatgttgctcctgaggtattgcgtcgtagttatggaaaggaaatagatatttggagtgcaggcatcatattgtatattcttctgagtggtgtaccacctttttgggctgaaactgaaaagggaatatttaatgccatattggaaggtgaaattgattttgtaagtgaaccatggccatccatatcagacagtgctaaagacctagtcaggaagatgctgacacaggatccaaacaagcggattacttcttctcaagtccttgaacacccatggatgagagaaggtggagatgcatctgataaaccaatcgatagtgcagttctatccagaatgaaacaattcagggcaatgaataagctcaagaagctagcattgaaggttatcgctgaaaatctatcagaagaggagattaaaggtctcaaagcaatgtttgccaacatggacactgacaatagtggcactatcacctatgaagaattaaagactggcttggctcgaatcggatcaaaactgtctgaggctgaagtgaagcaactcatggatgcggctgatgttgacggaaatgggtcgattgactatcttgaattcatttctgctacaatgcgtccgcacagacttgaacgtgatgaacatctttacaaagcattccagtattttgataaggataacagtgggtatattacaagagatgaattggagattgctatgactcaaaatggaatgggtgatgaagcaacaataaaggaaataatctctgaggtgagattgtatgactaatggaatgggtgatgaagcaccaataagaataaggtggatgcagataatgatgggagaataaactatgaggaattctgtgcaatgatgagaagtggaatgccacaccagggacagcttctttaagttcactgaattatctttaataattcataatgaaagccgatcggttgagtagtgacttataaaaagcattatctatctccaggaatgggtgacaggccccttcatgcattggtgatttctttgcaatcctcccaattttgcttgagtaaaaatggaaatttctcaaagggtcaggtttttgtatgagcgctttctttttattaaaggcggctattttaatgcatggcttttgttacttcatgccctgtgacaaatggagggtccttagttctgtttctctttcttctctctgttctctcaaccaagttctcaattcactctttcttcacccttcttgatctgctaattctcaaggtattcaaaattgggaggttttcgattgaagtgtgatgtccaagccactgctaggcataggggaggaggaaggtcaaagcaatgtcactttgttggtttcttcctcagtcatcatggaaagtgtgtgcctgaatagctcaaaattgaaagagcgcaactacatggggttatctgattgttcatctgtggacagctccgcgccgtccttctcagatgagactaagaagcaatctgaaccttaaggctactgagctcagactggggcttccgggatcgcagtctcccgaacgagattcagatctttgcttgagaagttcaattcagtttgatgaaaaaccactgtttcctttgcatcctgctactgatgatcaccattcctcatcaaagcctgctgttttgggtaacaaaagagggttctcagatgtcatgagtggattcgccgaggagaaattgcttgttagttctgaggtcaacacaatattgtcaccaaggccttcttctaatgtggggttgaaaccaagctctatgcttgagaatgttggggctcagcaacccaaagccaaagaactcgcaacagcgaaggttggtcttgagaggtctcatgttttcaatgatagcagaacaaatctgaatgattctgctaataacaatagcagtgcaccagctaccaaggcacaggttgttggttggcctcctataagatcatttaggaagaattcattggccactacttcaaagaatgttgaagaagttgatggaaaagtggggtctggtgcactgtttgtaaaggtcagtatggatggtgctccttatttaagaaaagtagacttgaagaattactctgcgtatgccgaactatcttctgcgctggagaagatgttcagctgttttaccataggttcttgtggatctcatggaaatctgggaggggaggtgctgaatgaaaccaagctgaaggatctagcttcatggatcagaatatgttcttacgtacgaggataaagatggcgactggatgctagtgggtgatgttccctgggagatgtttattgagacatgcaagaggctaaggatcatgaagagctccgaagccattggtctagcaccaagagctgttgaaaaaagtaagagaaggaactaggcagtatcaagcatctcatcacactctatccatctaactgcttatggggttaaaaagctttcttggctatgtgagggagcaacacaaggccataatggcttggaaacacaactctaggcatgttggactggatagaatttcgtactaaagctgccttgttgatcatgatattatttactatcagtgtgttctgttgtcatgatgttttatattcagtaagcttttttcatgattgtcacaacttataaaaccccaaaaaacctgtctgtgggaggttcttatattttatgtgctgtcatgttcatgttgtggtgaaggatttgtagtttgtaaattggatcatctcttctatgtttgcaacttggtgtgataaaaaacaacaagttattatatatgtaatgcaccttcaactgtttctcttttgttcaatttagtagtgacttaaaaaatgcattatatatctccaggaatgggtgacagaccacttcatgcattggttgtttccccaattttcttacaaggttgctattgtgcctgtcatgctaaaagtggatttcttgttctgtacttctgtatacatttagtttccggctgtcacattttgcaagtgtcttatcgaagcctgaatttttatgttaaagatataagatactctgatatcgtatggagttgtcatctttattatggctgagttacctgagtaaatgagtaatcagggaagggaactatttcccttaacccgtatatggaaagcctagctcgcgtgccgtgttcacattctgcaagcttgagtgcctagttcccat

SEQ ID NO: 28091 - DNA, 774 bp, Glycine max
  unsure (1)..(774): unsure at all n locations
  Clone ID: TF_GmC39872_1
ccacgcgtccgggtgatctatggagggtggcgcagcagctgaaaaagtcttcttcatagcactgctcacgttctctctttctttctctcttatatatatataaggcctttattaatgtggcggcttcatgtgtaatctagcaaactactagtagtagttagtttccttccacaatgggcaaagcctctagttcttcctcctcctctatctccagctgcagaaacccttccaattcaactgcatcctctctcacacaccaacatagtcaagaccaccttcgcacagatcttaggcttggactaagcctttccgctactcaacatgttggctcttctagttcagggggacactggcaaccgatgcagccacatctaataagtagtttttcacaagctactgaagtgaatgattgcagcgatcataccagcttctttgtgaaggtgtacatggaaggcattccgattggtagaaaactcaacttgttagctcatgatggttatcacgagttagtaaagactcttgaacagatgtttgacactaccattctgtgggggactgaaatggatggagtgcaaccagagagatgtcatgttctaacttatgaagatggagaaggagatttgattatggttggggatgtcccttgggagatgttcttatcagctgtaaagaggttgaagatcacaagggtggaggcattcgggtgataaatgcatacatatgaagaagctntgcctctcctgtgacttcaaatttagtcctatagagtgagag

SEQ ID NO: 28092 - DNA, 2065 bp, Glycine max
  Clone ID: TF_GmC435_2
aattcggctcggctcgaactcagcacaacacaagcacatgccacagcatgctttacttcctgtgctaaacaaccttatttttatgagacttgaggttgcgtgcattgtgctctaattccgttcctgttttgtgttcttgggttggttggtttggccaaggggaatctctctggtttttatcaccactctgtctctctcttttttttttttttttcctctctcctttaaaagaggaaagacagagagaaagagaaagagagcaggagaacccactaagcgtgcaaataaaagacttaaagcaaagctaagattacaatcccatgctattatagctccctccacctttgctttgccttgcttttcggtgcccaaaaccttaaaaaccttttaagttttccattctggctgttcgctcggactctcacacttgtcgcaaagaagcccttgtttctcacaattacaagatgtggtattttgcggatttaagctgcgactagacctgtaacttgggggttctagagtttgtttctgtttcttgcatatatatatatatatatatatatatatatatttggtgagtgatatttgagctaggaggaatcttccttttgagtgtggtgtgaacaaaagatgaatgaaaggtcaagagacgaggcatctcctcagctgttagatttgatctcaaacgagagagagtggcagatgaacaagagaaacgaaggaaagtcctcagaagaaagaaaactcgaactcaggcttggtccacctggtgaagactggtctctgggtggtaaaatgaagaacaacaacacagaaagagaagatcaatctcttctctctcttggttgcttctctcctaacattaacagtaatgcgttccaaagcaaggcctctcatccatggccaaactaccaccaccatggccagggtaacaacaaaaaagcctcttcttcatcatttcttcagttcccatcatcaacccaacctgtgatgatgggaaaagatgcttcttgccctaaggtggtggtagagttgcagcagaatggtggtgatggcaaagtgttctctccctcttctgcaaatacagctgtgtcccagcctaacacctctcagaaaagaactgctcctgctccagtggtggggtggcccccaattcgttcattcaggaagaacctttcaagcagcagcagtgcttctaagccaccaccacctcctgagtctcaggctgagcagcagcacaacaaggttgctggtaaaaaacctgttgacaactatgctaataataaaggtttgtttgtcaagatcaacatggatggtgttccaatagggagaaaagtggacctcaatgcttacgacagctatgaaaacctctcttctgctgtggacgagctattcagaggtcttcttgctgctcaaagagattcctctgctggtggagttcacaacaagcaggaggaagagaaagcaattacggggttattggatggaagtggagagtatactcttgtttatgaggataatgaaggagacaggatgcttgttggggatgtgccatggcacatgtttgtatcaacagtgaagaggctacgagtgttgaagagttctgagctttctgcttttacccttgggagtaagcaagacaagataccccttgactcagcaatgaaatgaacagcggtttgaggttttgatcacctgctgaaaacttgaagactcttcctaatttgacgttttggttctattgtctgatgaaaagaacatggaatgaagctagttgcgtacattacaactaagtaatgtgatgaatgtgtcttttttttttttttttctaaatgaagatttgaaatgtttatgggttttgtataaatagggaagggaaacttcacggatgtgtgtacttatgatttactgttgagtagccattaacttgttttggtttgtattttgaagtcccttttgtaggtggggtttttcagggtcttaataattttcacatcgtcatggcaaagagcgaaatttgggacctgtaaaaatatggctttacttgctggaatatttttctccc

SEQ ID NO: 28093 - DNA, 1261 bp, Glycine max
  Clone ID: TF_GmC11115_1
ttgcatgaccccaaaatgaaagttggtagtaatagcagtaagggtgcaagaagacgacagaaggggatacgcagcataatataagcacgcacgttgccgaagaaaataccactactcctcctaagtctttgaagtcataaagacaaaagaaaagacttagtcatagcagcaaacaaggaaaggcacgtacacgaccaccgtttacctgttttttgaacgttgaaattaattgacctgcgcctgcgcgtgtcactgtttgagagcacacaaacaatgtcctcccaatctgacgccgttggctgtaacttgaaggagacggagctcaccttaggccttcccggcaccaaaactaatggcacaaaacgtggcttctccgacacccttaacacttctcataataaaatgttgcgccccacctccaaggaacaagtggtggggtggccgccggtgagggcaagcaggaaaaatgctatgaagatgagttgcaagttggtgaaggtggcggtggatggagctccttatctaagaaaagtggatcttgaaatgtacgagacttatgagcatttgatgagggaattagagaccatgttttgtggcttagccattcgtaatcatttgatgaatgagaggaaactgatggagtctggaaatgggattgaatacatgcccacctatgaggacaaagatggtgactggatgttggtcggggatgtaccctggaagatgtttgttgaatcatgcaagaggataagacttatgattagctcagaggccgttggtttaggtccgaggtctacttcttcaaaatgtacgggttccacctagctagctagaagaataattaattagtgcgtaataatgataagctgatagctgataattaagcattccttggacaccttcaacgtttacaagctccggttagaagaagagtgaatttggtacagggaaatatccatgcatggtgcttgatgtacatgtccctttagcacctctggttaattagttacttttgttttgactttaaatgaagaactagaacaaatactggtctctatattagctagtgatctaaaaaacaaataaggggaggctggcatgtaatcaatattaggatcatcgttatatcatgagtatgcatgtaatgtatgacttggctttgtgctagctagttattctacccccagttttctagttgttagtaaaaaaattcacctgatcattttatgccccactccagacttcttctctcttctatcct

SEQ ID NO: 28094 - DNA, 1961 bp, Glycine max
  Clone ID: TF_GmC960_1
cccacgcgtccgtacggctgcgagaagacgacagaagggtacggctgcgagaagacgacagaaggggacagctttcttgaactgcatccaaagagttcctttgcatgcatgccatggcactcttactcccaaatcttgttttgcggttcaataaagctgtgggaagatacagatagggtcaacaacggactagcttatctcaaactccagattcttctctaaatcttcctatccaattatatatagggataaaattattgcaaagtattttttttcctttttcttttgtgatttgacttaatttaaatcattttcagatttaaaccatcgacttttcagatatatctctatatgtgatcagaattctcagatgcagtattatgagagaataaacttgtaccaattgggtagatttgtgacgatgatgaggaagaggatatgatgattccccaacaatttggcttctttctggaattaaaccgatcagcaattccaggcttaaacgagaggggaacatatggtggtggttaatttgcacacgaagtgataatgcatcgtataggcatagccgtttgatttgaaaacacttttccttttaagtgttctagttagctagtcctgtctgtgctggagaaaaccaaaattgccatcatcgaaccacgcactcgatcctcttcatctcccaagggattcaatacaataccaggctagaagaaactccactcatcaccatctcaagcaactaattaacaagctagtactctttgagtgtttggcaattggcttagatttcttgtacttggaacaagatggaaagcactgtcacatttgagactgatctcaacctcaaggcaaccgagcttagattggggcttccaggaacagaagaaattgttgaaaaaccacttcctgcaagtgctagaattaccaacaaaaggcctttgtctgaaacctctgaggagtgtgcttcaaagggttctagtgctccacatgtggaaactgaagcagcccctcctgccaaggctaagatagtggggtggccaccaatcagatcctacagaaagaacagccttcaggagaatgatggtgctgggatttatgtgaaagtgagcatggatggagctccttacctcagaaagatagacttgaaggtctatggaggctacacacaactcctcaaagctctagaaaacatgttcaagttgaccataggtgagtattctgaaaaagaaggttataagggatctgactatgcacctacatatgaagacaaagatggtgactggatgttagttggagatgttccatgggacatgtttgtgacttcttgcaaaaggctaagaatcatgaaaggatcagaggcaaggggtttgggttgtgctgtatgagaaaaccaaaccactaaaaattactatgagcagagaattaaaaaaagtgttttgggggtgaagggaaaaacatgctgaaaagcttgtgttctcggatctgaagggttttgacttttgaaatcactctagtgtgtgcttttggcatacctttatatggagttatactctgaagcaggagaagatggaagatacggtgcagtttcgatcttcctcaagtttggcaacttttatggttattattttggcatctgtggttggatgctatgcttatgatgttgtttccactgatcctttttgaagtttcatgtgagaaatcttagagatttcaaatgaaactttgtgtagaggagagatagaaaattaaaggttatatgtaatattgtttaatccaagttttttggttgtgttgatacaagaatacaatgtaatatactaagtgttggtatttgcctgtgttattggatggactcaattaagtatgttattgcatttttcaaataactaggaactttttgttgttttagttttctttttctataaacataataattataattttaataatttctgtgt

SEQ ID NO: 28095 - DNA, 1413 bp, Glycine max
  unsure (1)..(1413): unsure at all n locations
  Clone ID: TF_GmC870_2
agaatacatccatatcttacaatccacagtctttgttgtttagagacaataatcaagatggggaagttcaggcagatgctaggagcaatattccttatgccaataacattgatagccaaatgggaatgccactgaatccagattcactctcaaccaaaggcacattgaggttggggaaggatttgtctaataatttctcttcagaaggcatgcttggtaattatgaaattaacagagatgcccagcaggaaccttcgtcttcaatggtttcacagacatttggtgtacctgatatggccttcaattcaattgattccacaatagatgatagtaacttcttgaatagtggtccatgggctccaccaccagcaccaccactgccacctctgccacctctgccaccagcacagtttcagcggatgaggacatataccaaggtatataaacgtggagctgtgggaagatccatagacataacacggtattcaggttatgaggagcttaaacaggatctagctcgtaggtttggcatagagggacagctggaggatcggcaaaggataggttggaaacttgtctatgtggatcatgagagtgatgttctactattgggagatgacccttgggaggagtttgtgaactgtgttcgctgtattaaaatactttctcctcaagaagtgcaacagatgagcttggacggagattttggcaatggtggccttccaaatcaagcctgtagcagctctgacggtggggatacttaaaatggagttcagtaatacactaactattcttccgtattgttaactcagattatttctgggagatgcattattgtcctagttccgaaaggcggttattatgccactggggacttgaaagcgatcttttgcagtttgaaaggagaatttttgtctctgttctggacgtgctaattttaagagccaaatgaaggtggagaagcgagctgctcctagtgctacaaattcaattaagttactataaactggtactgaatcgaatgtttggagcacccggacaaaactagacgtgtttcaagccatagatttgttgttgttgtaatgttgaaaagaattgttcttggcatggtcagaaatatttaattctatgtattgtagaaagaaaggtttaatattgagcggtgattttgaatgtataaagtcataggcagctagattttgcggaagctttcacgatcttccatccttggaggcaccttagtaatttttagcctagaggactgtgaagtagagaaacttcaaatgttgtaaggtcatgtagacactgttgcattgtttgcttgaagcataagtactaaaaatggtggagaattaattgactgtaaaaaaaaaaaaaacaaaaaaaaaaaaaaaaaacaaaatnnnnnnnnnn

SEQ ID NO: 28096 - DNA, 954 bp, Glycine max
  Clone ID: TF_GmC31466_1
gacccacgcgtccgctcacaacaatgggcaaacccgctagttcttcttcctcctctattagcagcaccaccaaccgtcacctcctcctttcaaccgcatcttctctcactcaagaacttcccactgatcttaggcttggactcggcatttccgccactcaacattttgcctcttctatttcaagggggcaatggcaacaatcacaccacccttttgtgaacatttattcacaagttcctgctgaagtgaatgattgcagcaacgatcatagcagcttctttgtgaaggtgtacatggaagggattccaatcggaaggaagctcaatatactagctcatggaggctactatgagttagtcaggactcttgaacacatgtttgacactaccattctttggggaacagaaatgaatggagtgcaaccagagagatgccatgtgctaacttatgaagatgaagaaggggatttggtcatggttggagatgtcccttgggagatgttcttatcgacggtgaagaggttgaagatcacaagggtagacacattcgggtgttaagtgaagaacatgacactgcctcttccttcaccggtgattttagattttgtcctctagagtgagactctaatgaggtcgctgatcagaaaatttagaaaaatcttagtgaagtatatgcacagataggtgatgtatatgcatagctcactctgctctttctttcaagataatggaaaaagaatagtgttgtatattaattcttacccattctgggctaccggatttattttctttctagaactcaacttctaactgttagaatttctcttttccaacttattttcctcaattttaagactgacgcagagtgaggaacgaggaatggaaagaaaaattattattatgttgagagcaaatgaaaatatgcattatgccaaaaaaaaaaaaaaaaactcgt

SEQ ID NO: 28097 - DNA, 1617 bp, Glycine max
  Clone ID: TF_GmC6795_1
acgcgagaagacgacagaagggggacgggagagaatctagaagaagaaggagaaagtataggaataataaaagtacaatcaatttaaagcaaaaacttcaattcaccaaccgctcaaaccagaccagtcttgtgggcccatcatctttaagatcctttcctttcccctttctctctgacaccttctctctctctctcgtttacttctacattccagcctaacctgagcgtttatcatactcttcttcttccctcaaaactattcaattcccttcaaattcttccaccaccccttttccttattcttcctcaattctcccaaaaatcatatttttaccgttctgattggtttttcagcttgtgggtcgatgtcaactgtgtcgaaagatgacaacttggtgctgtcttcggaggactcttcgtgcccagaagagtctgagcttgaattgggtcttggcttgagcctctcttctggcccttcatcaaagtctcatcaccaccatgttcatgctcctacaactctttatgctagaatttacactgctaaggattttccttcttccgcagcagcagcatcatcatcaccttcctcttcttcctcttcgtctcccaacatcactgccggcaccaagagagctgctgctgattctcttgttgccaataaccgtcccagtcaagtagttggatggcctccacttcgaacatatagagtgaatagcttcaatagccatgcaaaatcaactgaagtattcaactctgtggctgagaagagtaagataaataatactgtggtcaggaagactaatgacaatgacaatgataataacataaatgccaaagaaaaaagacacctcaggagttccctgttcgtcaaggtaaatatggacgggataccaattggaaggaaggttgatttgagtgcccatagttcctatgaaaccttagcacaaacattggaggatatgtttaatgaatcaactacagtcaccacttgcaaaggatcaaatggtgaggattatggcattattatcggaggagaaagacattcaaaattgttggatggatcttccaagtttgtgctcacttatgaagacaaggaaggagattggatgcttgttggggatgttccctgggggatgttccttagctcggtgaggaggctaagaatcatgaggacatctgaggctaatggacttgcaccaagattggaagaaaacatcaaacagagatgcaagcccatatagatactgttttcatggctaaggacacgaagaacctgtcaaatagatgaagagaaaaaacagaacagaaaagtaaaggaatattgcaagtatatgaagttttgagatttgaatgataaaatctcgcacttttgtttaattaattcagtttgtttgtttgtttaatttggtatatttgtcgctgcctctctattcatctcacttggagggtgcaggcatcatagattttcatgcaatactactaatcatacaagtcagcctgcttgttagtgttgtaaatgtgggatgtttgctaactatctcagctataaagtattgtttgaactttatttccctgctacagtaattcaaatttcctttgaatgaatacctatttt

SEQ ID NO: 28098 - DNA, 589 bp, Glycine max
  Clone ID: TF_uC-gmroLIB3259P148e08a1
tccgcacccacgttattagacacacaggggccatatcatacctatccctcattatcacacgtgctatggaggcagagcgtgacactgtacaagaagatcaacttagaagaaaccgagttacgactcagcctcccactcaggggaaacgatacgctcaaaaacactagcagcactggaaagaaggtcttttcggatactgccgtggatatgaagcataacctttcctgaacctcatacaatgcttattgcgacctgactaaagagaagaacacgactgctggtggaccttctgataacgacccatgaaagcctcctgcaaaggcacacgctgcaggttggccaccactgaggcctttcagaaagaacattgttcataggagtcacagcaatgatggcgaataatccgccacaagtagtatctgcaatgctaacactggagcacctatcgagaacgtgagcatgcatggtgctccctatatacgcaaggtggattggaagacgtacaagagctaccaagagtagatggatgcgctggctcatatgctcagttgattcaccattgacaagtgtggatcccattgcatgaaag

SEQ ID NO: 28099 - DNA, 459 bp, Glycine max
  Clone ID: TF_GmC382908_1
attaagctcaaattctcctctaaaccttctttatatgcttcagtgaatgacccagtggtggagcagaatcttctgtactagtattggctcctaaatttttccataccccttggagctagcccgattgcctcagagcctttcattatccttagtttcttacatgactcagtgaacattttccaagggacatcacccacaagcatccagtctccttccttatcttcatatgtaagaacatattcagagccatcaacaagatccctgaatgcactctcacttaatccatctttcccaggaagtgcacgagaattgcattgaccaatggtaaagcagctgaacattttctcaagagctgaagaaagttcaatatagttgctgtaggttttcagatcaacctttctgagatatggagcaccatccatgctgaccttaacgtaaagacaacctactcctgatttc

SEQ ID NO: 28100 - DNA, 409 bp, Glycine max
  Clone ID: TF_LIB4280-048-Q1-N1-E10
aaacacaaaaaaaacccttcaaccaaaaaataaactgggggaacaaaaaaaaaacccccccccacagaaaagttttaaagttttggaaagttttaacacaacaatttggaaaaaaagcttactaaattaaaaccccccggacaacataaaacggccccataaaaaacaataaaagggtttgggccgcttaaaaaaaaattttatccagccccaaaggccttaagttctcgcttccaaaaccccatgttaaaaaaaaaacacgggaaccgccaagggtctgctctaacattttaaaacaccccggggagctaaaccaaggggataaaaacttttaaagacccccaacctttggcagggtaaaaaaaacatcccccagggaacatcccccacaagcttccaatcgcccttt

SEQ ID NO: 28101 - DNA, 1320 bp, Glycine max
  Clone ID: TF_GmC573_6
aagtaaggtgcacctgccatgctaacttaaggaaggtagctcttgtaaacatttagatctatcttccttaagtaaggtgcacctgccatgctaacttaaggaagatagatctaaatgtttacaagagctacccagaacttctcaaggccttgggaaatatgttcaagtgcacatttggtgaatattcagaaagggaagggtacaatggatctgaatatgctccaacttatgaagacaaggatggggattggatgctggttggagatgttccatggaacatgtttgtgtcatcctgcaagagactgagaattatgaaagcatcagaagcaaaggggttgggttgtttttgaccaaaataaaaaaacaaagcaggaccatcatgcatgcccatatccaaaacatggagcaaagcaattttcagtgacgtcatccaagagaatttcttctgtttggaatatgcaagagctaggcacttggcctctgtgaaatggttatatttagcttattaaaaagagagatgcacatacacgattttattttccctttatttgtttatttcaaaagctaggtgactttttagacctgcttaattaagtatactattccaaattctcaatgcctaaaccagaattgaaaactgtaatgatgaaatgagaagaaaataaaaagcaaaaatgctattttaattgtatagactatatatagagaggataaacatatatatgaaaaactactttcatttgtcaggtcagtcaaaggttcaaacgttcggggagtggggtcttttttttaggctgtgtttcagtgtttcggtggttggcccaaatgaaaaaatggtttttctggacgtgaacccggggaggtttttcagtcttcacttttcaggtggccaataacaggacgaaataataatatggatgatgatgatgatggaaaatggaaattggaaaatcaagggagggactgaagccaaaataggcttatggaatttggagtttttgtttagctgttttgaatgcctttttacagtccgtcttctttttctttcgacccaatcaaaattttatatgcgctgaagcgcgaactcatgaacaaacagaaagaagaagataggaaacgcaaggaggaggacaaggccaaaaaggcagctgacatgcagaaggctaacgataacacatctgcacctgctgatgaagatgatatggacccaactcaataccttgagaagaggcataaagtatcttgcagttcataaggcagaggggaataacctatatcatgacaaatactatgtcactatgtctattgatcaatacatca

SEQ ID NO: 28102 - DNA, 2297 bp, Glycine max
  Clone ID: TF_GmC183_1
aattcggctcgagccactcgtcatttctatttctctctccccaaaagcttttgctttctctctgcttatggaaggcccttaaactttcgctctctctgcttcactttctcgcttttgcattttcttgtgaaaaaaaaaaatcctcagaacaaaaataggtcttcttcttctctgatctaccaaagcttcaaattctccttagtttggtttgtctgtgagtttggagtgtaatgtcgccgccgacgctggtaacggaggaggaggggcggagcaccgtggcgtccgattcttcgcaatccttggactgtttctctcagaatggtgctggattgaaagaacggaattacttagggttgtctgattgctcatcagtggatagctgtgcctctactgtgccaagcttgtgtgatgagaaaaaggagaacatgaatttgaaggctacagagttgaggcttggtcttcccggattccaatcgcctgaaagggaaccggatcttttctctttaagctcaccaaagcttgatgagaagccactcttccctttgcttcctactaaagacgggatttgctcgtcggggcagaaagctgttgtttctggcaacaaaagaggttttgctgataccatggatgggttttctcaggggaagtttgctggtaatacagggatgaacgcggtgctatcacctagaccttctggagctcaaccttctgctatgaaagaaacaccaagcaaattgtcagaacgtccgttgctcaactaataatggaaccggtcataaccatacaggtgcttctatcagtggcagcgcacccggcttctaaggcacaggttgttggttggccctccatattagatcatttaggaaaaactcaatggctaccaccacaaacaagaacaatgatgaagtagatggaaaaaccaggtgctggcgcactctttgtgaaggtcagcatggatggtgctccgtatcttaggaaggtaagatctaagaaattatacaaacataccaggaactgtcttctgcccttgagaaaatgttcctaagctgtttcactctaggtcaatgtggttcccggagctccaagggaagagaaatgttgagtgaagagcaagctgaaggatcttctgcatggttctgaatatgttactcacttatgaagataaagatggtgactggatgcttgtaatgggatatgttcattgacacatgcaaaagactgaaaatcatgaagggttctgatgccattggcttatcgtccatggcaagggatataaacatgaacaggtgctatttggtattgtatcctgaagagggctggaaagagaattaatgatttaaatgactgaatgccgtgagaagatgttgaactgcaattgatcctgtaatttaagtttacacaaatattaatatatgttatttttttgaatgttagtaatatattatgtcaatactataatagccaaggtatctctaatgactctgagccttttaaactataatcaatgtggcacggtttgcttaagtagattttcttgcctgtgctcccagggccatggaaaagtctaaaagcaggatttagggtatcctggatttcctcttttgtctaatcaagtgtttattgttggatcctccggaatgggaaaagcaaaggatgatgactgactgaaatcctggcattggtggtttaacgcccttccacctttatttgttttcaagtccctcaagagtttgtcatggtcctgtgttaatttgttaccactgtaatatcatatgaaagctacaatgaaatattagtatttgtggagtctgtaatcattataggaatccgtttgttttggaagaattgaacatctgttacagccgccaccatacggttctaacactatatttgtgatttgcgtcaaaaaaaaaaaaaaaaaaaaaaaaaaaaaaaaaaaaaaaaaaaaaaaaaaaaaaaaaaaaaaaaaaaaaaaaaaaaaaaaaaaaaaaaaaaaacccaaaaaaaaaaaaaaaaacccaaaaaaaaaaaaaaaaaaaaaaaaaaagggggggccccttttaaaaaaaacaaattttaccccccggggttggaaaaaaaaatttttttttttggggccccaaaaaaaaaattcgggggcgggtttttaaaaccggggggggggaaaaaccccggggttccccaaataaaatcctttgaaaaaaaccccctttttccaagggggggaaaaaaaaaaaaggcccccccaatttcccctttaaaaaattttccccccctttaggggaaatgggcccccc

SEQ ID NO: 28103 - DNA, 2130 bp, Glycine max
  Clone ID: TF_GmC1825_1
cccacgcgtccggctattccttcctcgttatggagtcgcgagtgctgtcacgcgccggaaccttgtcctccctccctcacctccgcaagccgccgcgggaggccgtctccagcgcctccctcgtcgccgtgaaggccggaattcccgggtcgacccacgcgtccaaacaaaccaggacgcatgacaaacaaaccaagcagcattatgatagaaaagggacacaaagtgaaagagaagggagctatagaaataaggagaaaaactttcaaagaggtgaaagcaaaagagttcttcttttccttttttatatatacttgggtgctaagctgtgtgagttcattgacaagcctgaaatggcaactatgctgacaaaggagcatggtctgaacctcaaggagaccgagctttgcctcggtttgcctggtgggggaggcggcggcggcggcggtggtgaggtggaaactccaagggccactgggaagagagggttctctgagactgttgatctgaaacttaatcttcattccaaggaagatctgaatgagaatctgaagaatgtctcaaaggagaagaccctccttaaggatcctgccaagccaccggctaaagctcaagtggttggttggacaccagtgaaagtcatacaggaagaacatgatggcagtacaaaaggttagcactgaggatgtggcagagaagacaacaagcagcactgctaattctggggcatttgtcaaaggtttccatggatggagcaccttacctgcgcaaggtggacctcacaaatgtacaaaagctacaaaagagttatctgatgccttggcgcaaaatgttcagctccttcaccatgggtaactatggggcccaaggaatgatagacttcatgaatgagagcaagttgatggatcttcttaacagctctgagtatgtgccaagctatgaagataaggatggtgactggatgctcgtgggtgatgtcccatgggagatgtttgttgagtcatgcaagcgtctgcgaataatgaagggatcagaagcgattgggcttgcgccaagagcaatggaaaaatgcaaaagcagaagctgaagcgggcctaatacaatgttcaatgaaatcccgtaccaaagtggacctatatatatatatatatatatgaagcacttcagcgagactatggagcggagtgttgttagcttgaatgtgtctggtgttttttgttttgttcgtatatagattcaacttttaattttaaggagccgatcgatggggcatttgtaatggacaagaagcaataaacttaacctatatagtctggcttgtttattatgtgatccttccatgctgtcatgattgttgtgtgctaaaataccttgaattttaattcatactttagttcagctgtaggacatgcagaagttgaaggactttctcgacttacgactgtggttcctgggacagatgagtcaattagcaagttggtgcagcaactctataagctagtagagctacatgaggttcgtgatatcacccacttgccatttgctgagcgagaattgatgctaataaagattgctgtaaatgctgctgcacggcgtgatgtccttgatattgctagcattttccgggctaaagccgttgatgtatctggtcacacaataactctggagcttactggagatttggacaagatggttgcattgcagagattgttagaaccatatggcatttgtgaggtggcacgaactgggcgaattgctctagtccgtgagtcaggtgtggactccaagtacttgcgtggatactcttatcctttgtaatcacttcacctgggtcgaagaaccatcaaaatcttaggattttagagcttgtactttctcttaaactttgcctacggattcttgccttctgaactataatgttaataagtccttctgtgattaatataggcttgggatgacatctgagattaaaaaaaaaggttttcctctcctcaactttgcttcattttttggtggaattacagtttactattttgtgtagggacaaattttttgcttgtcaaaatatttatgtttcttacttggatgttgtctgttcctcaaaaaaagggggggggggggggggagggt

SEQ ID NO: 28104 - DNA, 1278 bp, Glycine max
  Clone ID: TF_GmC573_8
ccacgcgtccgcaaaaccctagttgttctacactctcgttccgtctttctccaacaatggaagttccttcggaagcgccgccgtctaccggcacctggagaaaccatgagcaaaaatgcgctgaagcggtaactcaagacaaactggcgcgtcggctgcgagaagacgacagaaggggacaccacaacttgcatctcatttctcatttctcacattattattcacatctccatctagatctctctctctctctctcccaagaaattcatcaacagacttgtgattaatttgcaattgttcaagtgatctatcaagaaattgataattcaatgggaaagtacgaaaaagagcttaatctcgaggctacagagttgagattggggttgcctggaagcgatgagcctgggaaacgttctattgttagaagcaataagagatcttcaacagaagcaagcgaggaagagtgcataagcaagggcaacatgaattctaatggttctgatatcacaagtgatgaccaagacaaccttgtgccacctgcaaaagcacaagtagtgggatggccaccggttcgatcatataggaagaatactctacaacaaaagaaagaggaacagggtgaagggtctgggatgtacgtgaaagttagcatggcaggtgcaccttacttaaggaagatagatctaaatgtttacaagagctacccagaacttctcaaggccttgggaaatatgttcaagtgcacatttggtgaatattcagaaagggaagggtacaatggatctgaatatgctccaacttatgaagacaaggatggggattggatgctggttggagatgttccatggaacatgtttgtgtcatcctgcaagagactgagaattatgaaagcatcagaagcaaaggggttgggttgtttttgaccaaaataacaaaacaaagcaggaccatcatgcatgcccatatccaaaacatggagcaaagcaattttcagtgacgtcatccaagagaatttcttctgtttggaatatgcaagagctaggcacttggcctctgtgaaatggttatatttagcttattaaaaagagagatgcacatacacgattttattttccctttatttgtttatttcaaaagctaggtgactttttagacctgcttaattaagtatactattccaaattctcaatgcctaaaccagaattgaaaactgtaatgatgaaatgagaagaaaataaaaagcaaaaatgctattttaaaaaaaaaaactaagggcgg

SEQ ID NO: 28105 - DNA, 1219 bp, Glycine max
  Clone ID: TF_GmC22_3
tacggctgcgagaagacgacagaaggggacacctctttctccttctccccagttctcaaaccttacctagtattttcgtttctgaacccaattaattaagcacacaaggaccataacatacctatacctcaatatcacaagtcttatggaggcagagcgagacaagtacaagatgatcaactttgaagaaaccgagttacgactcggcctcccactcagtggaaacgagacgctcaaaaccacttgcagcactgggaagagggttttttcggatactgccgtggatttgaagcttaacctttcctcaacctcaaacagtgcttcttctgacctgactaaagagaagaacatcactgctgctgcacctcctgctaacgacccagcaaagccacctgcaaaggcacaagtggtggggtggccaccagtgaggtctttcagaaagaacattgttcaaaggagtaacaacaatgagggcgaaaaagccgccacaagtagtagcaacaatgtgaacacgggagcagctttcgtgaaggtgagcatggatggtgctccttatttacgcaaggtggatttgaagttgtacaagagctaccaagagttgttggatgcgctggctaaaatgttcagttcattcaccattgacaagtgtggatcccaaggcatgaaagacttcatgaacgagagcaaattgattgatcttctcaacggctctgattacgtaccaacctatgaagacaaagatgctgactggatgctcgttggtgacgtaccgtgggaaatgttcgtggaatcatgcaagcgcctgcgtataatgaaaggatctgaggcaatcgggctagcaccaagagcagtggaaaagtgcaagaacagaagctagagtcaaatttgtaaattccactttcgacaacaatctgctctatctgttgctcttgggcgtccacggaaagcattaatgctaatttctcgagcaaggggtagtctaatataggagccaagttgttacataatgtgtcggtaccatttcttagaaataattttcttgtatatgtattgtgtattttatatatgtgagaaaatatataatttggaaattagggacaagaaataatgaagtatgttttatatatgtgagcccgtttttgtttctaagtacaaaacgttacgttgtctatcgttggtgtgcttgtctaataagaataatgtctacgtttatagctgt

SEQ ID NO: 28106 - DNA, 1083 bp, Glycine max
  Clone ID: TF_GmC2301_7
gtggtttcgtcgcccaccctcatggcaaatcaaaaccaaagagagtgtgctgaatgtctgacttggctttgctttttgcttatcactctctctctctctttctttcttttttgttttaaagtagcttctgttgtgtgcatatataaggagcctaaggtggcggcttttcttttcagtcttgatcagtttcattcattggaagatatgggaacattagaacaaattgatgctcctcaaacccagtcatcatcatcttcttcttcttccatcgatagcaacaacaacccttctaggactaggactccaccatcctcttccccttcatcaagtctatgcagaaacagaactgatttgagcactgacctcagacttggtcttagcatctctccttcttctcaatctgaatcacccttcaattcaacacgaagggaagaaagttttgactggccaccaattaagtctatattgagaagcacccttgtggggaaacaaagctatctgaaccaaagaccctctttgtttgtcaaagtctatatggaaggaatccccatcggaagaaaattgaatctgatggcacattatggctatgatggactagtgaaaactcttggccatatgtttaggacgaacattctctgtcctaactctcaaccacttaattctgggaattttcacgtgctaacttatgaggatcaagaaggggactggatgatggttggagatgtgccgtgggagatgttcttgaacagtgtgaggaggctgaagatcacaagagctgaccgatgctagttaatttaatgatgtatacaatctctctcacaacacaagctcctcctgatcaattttcattgttcataaatttttgctgtagatctagttattaattagtgggtgggtgaaaccccttgaaatatttcaccaaaaagaatggatcccgtgattatattatctaatagatttatacacccaaaaaaaatatatagatgtataacttcttacccaattttcatttcagtgcatagctgcactgtttcttattctctctgtttgatgatggagttgtttaattttcctttgttttgg

SEQ ID NO: 28107 - DNA, 549 bp, Glycine max
  Clone ID: TF_LIB4391-021-R1-N1-H2
accaacccttaatatattacattgtttttttgtttcaacccaaccaaaaaacttggattaaacaatattacatataacctttaattttttatttttcctttacacaaagttttttttgaaatttttaaaatttttcacatgaaacttcaaaagggatcaggggaaacaactttttaagcttagcatccaaccccagatgccaaaataataaccttaaaagttgccaaatttggggaaaatcgaaactgccccgaattttccattttttcctggttaaaagaataactccatataagggtttgccaaaagcccaccctaaagggttttcaaaagtcaaaaccttttaaatccgaaaacacaagtttttaagcatgtttttcctttcacccccaaaacactttttttaattctttgctcaaagaaatttttaggggttgggttttttaatacagaaaaacccaaaccccttgcctttgatcctttaatgatttttagccttttgaaagaagtcacaaacatgtcccatggaacatttccaactaacatcca

SEQ ID NO: 28108 - DNA, 468 bp, Glycine max
  Clone ID: TF_GmC26770_2
actagtatggagtgtttagccatttgaacaaaaatacccccacgcgtccgtacggctgaaagaagaacacagaagggcaagaatggtgatgaagaaaaccatttggtggggtggccaccagttaaatcatggaggaggaaagaactccatcagcagcatcctgcgagaggccgaattaggaacgataggattcaagctaatgaaaatcaaagtagaggaccaaactctttatatgtcaaggttaacatggaaggggtagccataggaaggaaaatcaatttgaggcttttcaattcttatcagacactcacaagcagcttgatcagcatgtttgctaaataccaaaaatttgaggaagttggagaaagttacacgctcacctttcaaaacgaacaggatgaatggctgcaagtaggacatgttccatggcaatcctttataggtactgtgcggcgtttagtgatactg

SEQ ID NO: 28109 - DNA, 691 bp, Glycine max
  Clone ID: TF_GmC613_2
ggctcgagggtttacaagtcagggtcctttggaagatccttggacatcactaaattcaccagctaccctgagctacgcagcgagcttgctcgtatgtttggccttgaaggtgagttggaggaccctgtgagatcaggctggcagcttgtattcgttgaccaagagaatgacgttctgctccttggtgatggcccgtggccggaatttgtaaatagtgtagggtatatcaagatactttcccctcaggaagtgcagcagatgggcaacaatgaacttgagcttcttaactcggtccccattcagaggctctctaacggtgtctgtgaggacccaagaaatttaagcactgggataacaactgtggggtctttaaactactgaatgatatgacaatcaaatactatgaatctcttctctcttgtattattgctcctacttctccaccctttgtcaaatggtgggaagtactgcctagttgtagtttataggctacttattaagccttttttttttgtcttcctgttcttgctgcctaggaccattcttaagataaacaatgtaaacatatggcatcttggcaatgtgctatctacaatatattaattatttagtgtgtgtttggctagaaggttacaaacgtatgtttgcagaagtatcatcacccttacttttaatttatttttatacattg

SEQ ID NO: 28110 - DNA, 2310 bp, Glycine max
  Clone ID: TF_GmC435_1
tgatttctgtcttggatttggtctcttagtacgtggcattgttacgcgaggttcttgtggcaggtgcttcttctttcgcatatcaaaaggttcgacgaattgttttgttttattccagaacctgaagcttgtttataaaaaaaagacgagggaatgagcacaatggcaaattgcatacaacatgtggcaaagaagccacaagtcatcagaggagagaaagctggagcttaggcttggtccacctggtgaagagtctctcaatgaaagcatcagaaaaagcaacagagaaagaaatgaatcacaattcactcttggttgcttctcaactcaaaatttttttacttctgacaagcaaggtccaggtgggactacgttgccctctgcatggccttccacatcctatcatcaccaacaccaggctaaagctaaagcttcatcatttcttcagctccaatcaagtccacaaaacatgatagtgatgggaaaggatgtgtcacaattctcttgtgtagagaagaaggtattctcaccctcttgtgcaaatccagcggtgtccaaaagaacttcttcaggtccagcagtgggttggcctccaattcgttccttcaggaagaacattgcaagtggaagcacttctaagttgccttctgggtcccaccagcaacatcaaaatgttgttccatacaaggttgctagccaaaaacctactgacaaatctggtaaaggcttgtttgtgaagatcaatatggatggtgtccccattgggagaaaagtggacatcaatgcttatgacagctatgaaaaactttcctctgctgttgatgagctctttaggggcctccttgcagagatgaagttatctcatattggctcttcccaatgctgttctggtcaaagagattcctgtgctggtggaattcaaaacaaggaacaggaagagaaatccaataagggtttattggttggaagtggggaatatactcttgtttatgaggataatgaaggagacaggatgcttgttggagatgtgccgtggcacatgtttgtatcgacggtgaagaggctgagggtgttgaagagttctgatcttcctgcttttacacttggtagtaagcaagactagttacaccacttgacttgacaatgagaaatgaaggatgaagcagcagcttgaggtcttcttccatgctaaaaattgatgactaagagtgtttttatttgacattttggttcctttgaacattgaagattaggcaatgaaatgttcagtctataagtaatgtttgtatgaatgaatgtatcttgttttctttagtgaagttttgaattgtttctgcattttaaaaatagggtaaggaaaactttacggatgtgtgcactcatgattttgccattaacttatgttggcgtgcgttctgatcgacgccatgtttggaaaaatggtgtgagactccaaaatcaagtttggaggtatagaatatgattttaggtaataataataataatatttggttgttcaattctgctggtggggttcacaacaagcaggaggaagagaaagcaattacggggttattggatggaagtggagagtttactcttgtttatgaggataatgaaggagacaggatgcttgttggggatgtgccatggcacatgtttgtatcaacagtgaagaggctacgagtgttgaagagttctgagctttctgcttttacccttggcagtaagcaggacaagataccacttgactcagcaatgaaatgaacagcggtttgaggtttttgttcacctgctgaaactcgaagactcatctaatttgaagttttggttcttttgtctgatgaaaagatcatggaatgaagctagttgcgtacattacaactaagtaatgtgatgaatgtgttttttttttaatgaagatttgaaatgtttatgggttgtataaatagggaagggaaacttcacggatgtgtgtacttatgatttactgttgagtaaccgttaacttgttttggtttgtattttgtttttttttttttttgctaaatgaagatttgaaatgtttttgggttttgtataaataaagaagggaaacttcacggtatgtgagtacttatgatttactgttgagtagtttctcccttgttttggtttgtattttgaaatcccttttataaagatttgcttctagggtcttaataattttcacatcgtcatggcaaagagcgaaattggggaccctgtaaaaatatggctttacttgctggaatatttttctcccaaaatcttgtgattttaaacttttta

SEQ ID NO: 28111 - DNA, 1302 bp, Glycine max
  Clone ID: TF_GmC1199_2
gagaagacgacagaaggggtccccacaaggctcgagcgtgcctgcccctatacctcaccccacttactattattattgtacaacacaaccaggtccctgaatgctttttagagagagaaagagtaataataataaagtggaagaaaaagaattaggagagtgaaacaagaagaagaagaagaagaagaagaagaagaagaattgagaagatggtgtttgaggaaactgagctgaggctgggactgggactatgtctccctggaaatggaaccacggcaacaactgaagctgctgctgcggaattaggagtgaggaagagagggttctctgagactgaaactgatgaaacagccaccgttgatttgatgcttaacctctcacccaaggaagctgctgctgctgatggtgcagatccacgtgagaagccaaagacttcgccgaaggagaagacccttctgcttcccgatcccgccaagcctcctgccaaggcgcaagtggtgggatggccacccgtgaggtctttccggaagaacatgttcgcagcccaaaagagcagcggcggagaggaaagcgaaaagagcagccctaatgcaagctttgtcaaagttagcatggatggagcaccttacctccgcaaagttgacttgaagatgtacaagagttacccagagctctctgatgccttgggcaaaatgtttagctccttcaccattggaaattgtgaatcccaaggcttcaaggatttcatgaatgagagcaagttgatggatcttttgaacagctccgactatgtcccgacctatgaagacagggatggcgactggatgcttgtcggtgatgtgccatgggagatgtttgttgaatcatgcaagcgtttacgtatcatgaaaggaaaggaagctattggactggcaccaagagccgtggagaaatgcaagaacaggagctagactagtagttaccagtccaaaatctgctccatcatcattagcggtgcctagttgacttagtaactgaagcaaggttaagctgcagcagacacagagggagagagcagggtgttaaaaaatatagttaagtaaatctgtgtatcattatggtttgttatataatatatatttcaaacaaagttgtgagatgtcgtaagtataaattatgaacacaaacgataatgactctaaattatgttgcaagactttcttatttctttacttgtgtgcttgcataataataagtttattaatttgcttgtcaaaaaaaaaaaaaaaaaagcggccggttttttttttttttttaaaaaca

SEQ ID NO: 28112 - DNA, 1137 bp, Glycine max
  Clone ID: TF_GmC870_3
aattcggctcgagaaaggtgttccgccagaaatttcatcttcaatggtttcacagacatttgaagtccctgatatgagcttcaattcaattgattctacaatagatggtagtggcttcttgaataggggtccatgggatctgccaccaccacctccaccacaacaacaacaggttcaacggattagaacatacaccaaggtatataaacgtggagctgtgggaaggtccatagacataacacgatattcaggttacgaggaccttaaacaggatctggctcttaggtttggtattgagggacagctggaggatctacaaaggattggttggaaacttgtatatgtagatcacgagaatgatgttttacttgtgggagatgacccttgggaggagtttgttaactgtgtccgctgcattaaaatactttctcctcaagaagttcaacaaatgagcttggatggagattttggcaatggtggccttccatatccagcaggcagcagctctgatggtgggaatgcttaaatggcatccaggaatctgctaattattcttccatgttagtaacttacatcgtttttaggacatattcatcagtgttgtccaaaaggttgtggggtcggtcggcagatgattttgtcctgctgcagcaggctgggtaatatttgcggttataacttattaggagaaatttgtctctgccatgtacaggcgaatttgaagagccaaaagaagaaaaaggtggaaaaatttgctgccctcaatctacgacttacatttaaggttgttaacctggtgatgaatgagatacttggaccacacgcacatggcacatcccaacaaagatgtgttaagccatatgcatgtgatgacgttgaaaagttgagcagaagttctcttggcagcgtttgaaatatgtattaaatgcagcgtactgtagaaagaaaggctgaaatatcacggcatagttcagtgtataaaagtaggtttcttgtgcggtctttaaaaggagttattgacatctgaattgaaaggtggctttttggttttttgtaaaacactaggcagctagatatgtattgtatggccaactatatattgaagcatcaaatacagaatgcattgttttgctgccc

SEQ ID NO: 28113 - DNA, 2197 bp, Glycine max
  Clone ID: TF_GmC570_2
ggctcgagctcaggaagtatcccaccccaacaaagttttcaatcacccaataagaatgcattgttgatgacatccttaccacaagactcacagtttcagcaacaaatagaccagcaagctagtctcttacagaggcagcagcagcagcagacacagttgcaatcatctccgttgcagttattgcaacaaagcttgtcacagagggcatcacagcaaccacaaatgactcaaatgtgtcagcaaaacagctcagagcaacaaccacagttgcagatgctacaaaaattgcagcaacagcagcagcagcagcaacaacaacaacagcaacaactcctttccacttctagcccacttttgcagtctcagcttctacagcagcaaaatactcatcaacaaaaccagcaatttccacagctgcctctatcacagggtcatcagcctcaacagcttggaaacaatgctttctcaatggagaagcttctcaatggaaacaactactctacttcatctctgatgcaaacacagcagctttctgtgaaccaaccccataatacacagaaatcactgactaatactagagctccctctactcttacagatggagatgccccatcatgctcaacttcaccatctactaataattgccagatatctccaaatctgatgaaaagaaatcaacatgtaccggcaacattaggaggaccttcagtacttgaacccaccaatcatctgatgcagggacttcatagcaagtctgagatgcagatcaaacatgaattacctagtgtaagaggaactgatcagctgaagttcaaagggacagttgctgatcagatggaagcttcttctggaacatcttactgtattgatcctaataatatccaccagaacttcccacttcccaacttctgcatggatggggatgtccaatcaaacccaagaaacaatcttccatttgcctctaatcttgatggattaacacctgatacttttctctcaagagggtatgattctcaaaaggatcttcaaaacttgctgtctaattatggtggtgctccaagagacattgaaactgagctgtccactgctgctcttagtccacagccgtttggggtgccaggcattccttttaagcctggatgctcaagtgatattgccatcaatgatcctggggttttgaataatggcttgtgggctaatcagactcaacgaatgcgaacatatactaaggttcaaaaatgtggctctgttggaagatgtattgatgtcacccgttacaaggggtatgatgaactccggcatgatttggctcggatgtttgggattgaagggcagctagaagatcctcaaaggactgagtggaaactagtatatgtcgatcatgaaaatgacattcttcttgttggtgatgacccttgggaagaatttgtaagctgtgtccagagcataaagatattgtcatctgctgaggtacagaaaatgagcttggatggggatttaggtcatgttccagtccccaatcaagcttgtagtggaacagataacggcaatgcatggaggggacagtatgaggataactcggcagcctcatttaatcgataaagatgtcattttggagcagtcaacttgtatattttgagacatggaggactaacttaacccttaaaatttcttgttggtgcttctatatatcactagtggaaaggagacatattcattgcaacttgtaagagatgcagttgatggggtagtgtagaagagggttgatacatggctgcatccggttcaatgtcaacacgtttttaatggtagagaagttagatccctagatgtaccaaaaccagattcctttactaaaatgatgcagattctatcttgggatctgcttttcttgtggctgctattgcatgctcaggaatcttttttctttcattttggcaaggtacagccatataggtcagctggtgtataatatatatgattgttattataaagaaaacgctttacttacaattctgtaaatcttgtggttgttaaaatagttaggtaaccaagtagtgacagtaagaatcaacagtacatgccaattctagcttttgtacaagtgcccacgatgttctcatggtggaaactatggagaagtttattatggatgaaagaaaattcagttctttttcaccattttgcagttttgggt

SEQ ID NO: 28114 - DNA, 936 bp, Glycine max
  Clone ID: TF_GmC11115_2
gacaaaagaaaagagttagtcatagcagcaaacagggaggaaaaggcacgtacacgaccaccgtttagctgtgtttgaagttcgaacgttgaaattaattgagctgcgcctgcgcgtgtcactgtttgagagcacacaaacaatgtcctccgaatcacacgccgttgattgtaacttgaaggagacggagctcaccttaggccttcccggcaccaaaactactgccacaaaacgtggcttctctgatacccttcctccttctcaaaataaaatcttgcgccccacctccaaattcccaacacccaacagggaacaactggtggggtggccgccggtgagggcaagcaggaagaatgctatgaagagctgttgcaagttggtgaaggtggcggtggatggagctccttatctaagaaaagtggatcttgacatgtacgatagttatgagcatttgatgagggaattagagacaatgttttgtggcttagccattcgtaatcatttgatgaatgagaggaaactgatggatcctggaaatgggattgaatacatgcccacctatgaggacaaagatggtgactggatgttggtcggggatgtaccctggaaaatgtttgttgaatcatgcaagaggataagacttatgattagctcagaggccgttggtttaggtccgaggtctacttcttcaaaatgtacgggttccacttagctagctagaagtgtgtaataatcataataagctgatagataagcattccgtggataccatcaacatgtaaaagctccggttagaacttagaagagtgaatttagtttaaggaaatatccatggtgcttgatgtacatgtccctttagcacctctggttaagtagttactttaaatgaagaactagaacaaagactggtctctatattaactagtgatctaaaaa

SEQ ID NO: 28115 - DNA, 1020 bp, Glycine max
  Clone ID: TF_GmC573_12
aagatcatcacatttaggtgattattattggagatgagataaaatggaatcatgcttctcaccactgttacttttcagggataactgaaggtgatcatcattttagatattattataagaagttcatcaaataattgatcagaaatattcgatggggagctttgaaactgagctgaatcttaaggccacagagttgaggttgggattacccggctgtgatgaaactcatgacaaaagttcatccagtagtggatctgttgttagaagcaacaagagatcttcaccagaacccagtgtggaagagtccaggtgcaactctaatggttcttcagattctaccaccacaagtgatcatgatgaagacagtgtccaacctgcaaaggtacaagtagtggggtggccaccaattagatcttttaggaagaacagtctgcaacaacagaagaaggtggagcagcagggtgatggaagtggaacgtatttgaaagtgagcatggctggtgcaccttacttgaggaagatagatctgaaggtttacaatagctacccagaactcctcatggccttgcaaaatttgttcaagtgcacatttggtgaatattcagagagggaaggttacaatggatctgaatacgctcctacttatgaagacaaggatggtgactggatgctggttggagatgttccatggaacatgtttgtatcctcctgcaagaggctgaaaataatcaaaggatcagaagcaaaggggttgggttgtttgtgaccaacaaaacttgcaaaagcaaatcaaatcaaaatagtcacatgaggtcttcaaagacaaataccctttgtgttgtgcaagcaaatacatggtgtttatgagaactcatatatatatatatatatatatatatatatatatatatatatattaggaaaatagatggatattatctatgtatacattatttttgctttattaatttcagcagaggcggctttgaggtctgctttctaaattatatgtaatcctct

SEQ ID NO: 28116 - DNA, 1327 bp, Glycine max
  Clone ID: TF_GmC573_4
ctctttacctaattatatatatatatacacatctttctctctttctcagaaatcagaattgagcaagcgattggatttggataactgaaggtgatcatcattttagatattattataagaagttcatcaaataattgatcagaaatattcgatggggagctttgaaactgagctgaatcttaaggccacagagttgaggttgggattacccggctgtgatgaaactcatgacaaaagttcatccagtagtggatctgttgttagaagcaacaagagatcttcaccagaacccagtgtggaagagtccaggtgcaactctaatggttcttcagattctaccaccacaagtgatcatgatgaagacagtgtccaacctgcaaaggtacaagtagtggggtggccaccaattagatcttttaggaagaacagtctgcaacaacagaagaaggtggagcagcagggtgatggaagtggaacgtatttgaaagtgagcatggctggtgcaccttacttgaggaagatagatctgaaggtttacaatagctacccagaactcctcatggccttgcaaaatttgttcaagtgcacatttggtgaatattcagagagggaaggttacaatggatctgaatacgctcctacttatgaagacaaggatggtgactggatgctggttggagatgttccatggaacatgtttgtatcctcctgcaagaggctgaaaataatcaaaggatcagaagcaaaggggttgggttgtttgtgaccaacaaaacttgcaaaagcaaatcaaatcaaaatagtcacatgaggtcttcaaagacaaataccctttgtgttgtgcaagcaaatacatggtgtttatgagaactcatatatatatatatatatatatatatattaggaaaatagatggatattatctatgtatacattatttttgctttattaatttcagcagaggcggctttgaggtctgctttctaaattatatgtaatcctctaaaaaagaaagagaaagaaaatataagaaaagctaatgctatttcaattgtacagatcaaaaatataataataataataatctcactttgtcttaaaaaaagataggaaacgcatggaggaggacaaggccaaaaaagcagctgacatgcagaaggctaacgataacacatctgcacctgctgatgaagatgatatggacccaactcaataccttgagaataggctaaagtatattgcaggtcataaggcagaggggaataacctctatcctgacaaattctatgtcactatgtcttttgatcaatacatcaaggaatatgga

SEQ ID NO: 28117 - DNA, 713 bp, Glycine max
  Clone ID: TF_GmC183_5
gcatggatggggctccctatctgaggaaggtagatctaccaaattatacaacgtaccgggaactgtcttctgcacttgagaaaatgttcagctgtttcactctaggtcaatgtggttcccatggagctccaggaagagaaatgttgagtgagagcaagctgaaggacctcctgcacggttcggaatatgtactcacttatgaagataaagatggtgactggatgcttgttggagatgtaccatgggatatgttcatcgacacatgcaaacgactgaaaatcatgaagggttctgatgctattggcttagctcccagggccatggaaaaatccaggagcaggtgctagttggtattggaactgttgacttcgttttgtttactaaggtgaagttgctggagatattatgagggtgtggaaagagaaattatgatataaatgactgaatgctgggttttgatggttaactgctattcaagatgttgtctatgattacaagtcccagaatagttcctggtcttttgcttgtgttacatttgtttctactataataccctatgaagctaccttgaatattagtaattgtggagtctgtaatctttataggaacctgtttgtttggataagttgaatgtatgttgcaatcagtgtattattgttctcagtgttttgctaaaaaaaaaaaaaaaaaaagcggccgctctagaggatcca

SEQ ID NO: 28118 - DNA, 1088 bp, Glycine max
  Clone ID: TF_GmC573_9
acctctaactatttatattcacatatttctctccttctcagaaatcagaattgagcaagcgggcgggagtggaatttgaaggttatcatcatcatttatagatattattattattataagaagttcatcagaaatattcaatggggagctttgaaactgaactgatgaatcttaaggccacagagttgaggttgggactgcccggctgtgatgaaactaatgagaaaagttcatccagtagtggatctgttgttagaagcaacaagagatcttcaccagaacccagtgtggaagagtccaggtgcaactctaatggttcttcagattctaccaccacaagtgatcatgatcaagacagtgcccaacctgaaaaggtacaagtagtggggtggccaccaattagatcttttaggaagaacagtctgcaacaacagaagaaggtggagcagctgcagggtgatggaggtggaatgtacgtgaaagtgagcatggctggtgcaccttacttgaggaagatagatctcaaggtttacaatagctacccagaactcctcgcagccttgcaaagtttgttcacgtgcacatttggtgaatattcagagagggaaggttacaatggatctgaatacgctccaacttatgaagacaaggatggtgactggatgcttgttggagatgttccatggaacatgtttgtatcctcctgcaagaggctgaagataatcaaaggatcagaagcaaagggtttgggttgtttgtgaccaacaaaacttacaaaagcaaaagcaagatagtcatgagatcttcagagacaaataccctttgtgttgtgcaagcaagtacatggtgttttatgagaactcatatatagtttattataggaaaatagatgaatatatatatacacgttattttttctttattaatttcaacagaggcggctttgaggtctgctttctaaattatatgtaatattcctctcaaaaagaaagagaaagaaaatataagaaaagttaatgctatttcaattgtacagatcgtgaatataattataactaataataacaataataatatcattttgtcct

SEQ ID NO: 28119 - DNA, 1058 bp, Glycine max
  Clone ID: TF_GmC166_2
gtggttttggtaaagagaagagccattagtttctatcttcctcttcttcatccagttgaaaagaatcaaagcagaatccatcggaagaactcaatggcttctcagcctctaaagaatgatactgatgcagaagccaagtctggatgcctttatgttaaagtcagcatggaaggcgccccatacttgaggaaagtggatctgaatagttttaccacttacaaggacctctctttggcacttgaaaagatgtttagttgttttacactcagtcaatgtggctcttatggggtttctagtcgagaaaatttaagtgaaagtagattgatggatctccttcatggttcagaatatgttcttacctatgaagacaaggacggagattggatgctagttggtgatgttccgtgggagatgttcactgagtcttgcaagaggctgaggataatgaagagttttgaagcaattgggctagcacctagagccatggaaaagtgcaaaagtcgtaactagtgccaatgctgtatgcttttgtcttctaatccggaaagatggaagatcacatttaagcatataataccttgtttcttacctataattctatatacgagattggggtgtcctaaactttagtgggaaagatatattgatgacagcatattagttttgttgtagtagcggtctatatcattgatgtagacgtttaaggtttaaggttttaggttttaggttgttctcccacacttcaattactgccatcatggcttaccgtagtttgtaaattttgcatttctgtaagcgagcattttgtttgtcatggcaagccaagaaaagaaatatcatactttctttatgtgtccaaataaaaaaaaaatataaaaaaaaaaaattattaaaaaaatttaataatataaaataaaaattataataataaaatatcccctattaaaataataataataatatattttatttattaattatataattttggggggcccccctttaaagtatcctaattatttttcccgtccctgcacctgtttattttttttttttgg

SEQ ID NO: 28120 - DNA, 664 bp, Glycine max
  Clone ID: TF_uC-gmflLIB3275P149e01a1
gttctaggtttctttctcatcatatatgtgatatagattttttgtcctgaaaatctcaacaatcctctacgaaataataacgatgtttttgaaagtgaaacagacaatacagtatatattgattcagatatgcaaggtcgaaaagtagtgttcaaacagaagtactaaacatgtggatatgtaatagtcttcttaaccgtaggacctgagagaaaaatacatgttaaaattctctcagtattcaagggagccaattgatggtagtcctgaaacaatttcatgagaatctgcaccagtgctattcagcctctgtcctggacttggaccaagggattccagggcttgttctcccattttatggatatcttcaggtgaaagtattttgatataccatacattattgacaaatgatctacaaaaaggttatgcaggaaatccacgcaccaaaaagaaacaaacaaatgtcagcaaaacttagccaagtaaaatgaacaagtatagcatgtttacttatttgaaggtttggagatagaatgccaaatgtatttattagatcacaagttgatttaacaagactttatattgtaagttgaagttgaacttactcccacggatcgtctccaaggagaagaacatcgttctccctgtcgacgaatacaagctg

SEQ ID NO: 28121 - DNA, 1081 bp, Glycine max
  Clone ID: TF_GmC166_4
attcaggtcaatgtggctcttatggggtttctagtcgagaaaatttaagtgaaagtagattgatggatctccttcatggttcagaatatgttcttacctatgaagacaaggacggagattggatgctagttggtgatgttccgtgggagatgttcactgagtcttgcaagaggctgaggataatgaagagttttgaagcaattgggctaggtaggtccaacgttcgttttaattaatctgttatactctgctttccttcgtttatatagttgtagaattgagaaaacaggaaactcatcaatcaaactggaaaacagaatcctggtttggtaaacacaattgtactccatagttaatgctttgactttagtttcatgtttctttaattttattagttagttatttataatgtttttttagggcgagttatatataacattaaattgatatattgtcttaaaaaaaatagattaatatggtcttgttgcatatattattggtcttgatgatgatgtttggttcagatccaaataaatatctccatgataatttgaagttgggaaaggggtaaagataaaacggtctccatttacacccttgtccagaattgctaccatagaatttggtctctatatttcttgttttttttttttcttttttgaaagctttattatgacactcatctaaatttgtgatcattgcagcacctagagccatggaaaagtgcaaaagtcgtaactagtgccaatgctgtatgcttttgtcttctaatccggaaagatggaagatcacatttaagcatataataccttgtttcttacctataattctatatacgagattggggtgtcctaaactttagtgggaaagatatattgatgacagcatattagttttgttgtagtagcggtctatatcattgatgtagacgtttaaggtttaaggttttaggttttaggttgttctcccacacttcaattactgccatcatggcttaccgtagtttgtaaattttgcatttctgtaagcgagcattttgtttgtcatggcaagccaagaaaagaaatatcatactttcttt

SEQ ID NO: 28122 - DNA, 1944 bp, Glycine max
  Clone ID: TF_GmC590_1
gcgtgagatgactcccacacatcaccaaaatagttttctctaaccaaccatacagtactcctcactagctataccctggttaatccatggagaaagaagctgttggccttgaaatcactactgagctaaggttgggccttcccggtggggaattacctgacaagaacgagaagataaagaagagggtgttctccgagattcaagctcatgatgatgatgaaaacagttcctccgaacaagaccgcaaaatccaaaccaagaatcaagtggtggggtggcctccggtgtgttcgtaccgcaagaagaacaccgtcaatgaaaccaaaatgtacgtcaaagttagcatggacggggctcctttcttgcgtaaaattgatatagctatgcacaagggatattcggagctggtcttggccttggagaagttcttcggttgctatggaattcgcgaagcgttgaaggatgcggagaatgctgaacacgttcccatatacgaggacaaagatggtgactggatgctcgttggagatgtcccttgggagatgtttattgagtcatgcaagaggttgaggattatgaagagatcagatgcaaagggcttcgatctgcagccaaagaagggtctttaaaaggatttatagaacgagtgacaatctgtttgatatcaaaaagatctttgaagtgattcatagatcactgggcacacttaacctctcttttttttccattcactttctctctctctatatatataaagccctttctattccatattcctaacaattcaattcattcatccttcactactacaccaaattaatagaaattaaagatatatcattccacaacacaaattaaagttagtgagacgtacccttattatggccaaagaaggtcttggacttgaaatcactgagctaaggttgggtctacctgatgcggagcatcaagtaagtgtagtcaataagaaaaatgagaagaagagggcattctcggaaattgatgatggtgttggagatgaaaatagctcctccggcggaggcgaccggaaaatggagacgaataagagtcaagtggtggggtggcctccggtgtgctcttaccggaagaagaacagcatgaacgaaggtgcttcaaagatgtacgtgaaggttagcatggacggtgctcctttcttgcgtaaaattgatttgggtctgcataagggctactcagatttagctttggctttggacaagctctttggttgctatggaatggtggaggcgttgaaaaatgcagacaattctgaacacgttcccatttatgaggacaaagatggtgattggatgcttgttggagatgtcccttgggaaatgtttatggagtcatgcaagaggctgaggattatgaagaaatcagatgcgaagggcttcggtttgcaaccaaaaggatctttaaagggattcatagaaagcgcggcaaagtgaaagattatgttaggcttctaattaatgtcgtgcacattttgcgatcatcaatccaagtttatgtgttatcgttttcttatatttgaggaaaaacatgcatttttagtttgatatatgaattatcagacttttgtttatgtcaagttattaatgaatgacatataggaccctatataaataatagggaaaactcgtcgttttagattaattaatgctttgccataaatgtttgtttatttgcattcaattgcagtacaagttattgtatcagtatactgttttattactgatatttcaatttgttaattacttcacctaaactctcctttttttccttttcctttttaaatagttgatatagtaaaccgccatatcaagttattcacgtaaaaagagactaaagtaaagaatttaaataataatgagaaaaatacaagtatgttttattttatttcttataatatatagcattgct

SEQ ID NO: 28123 - DNA, 750 bp, Glycine max
  Clone ID: TF_GmC1129_2
tttttgtaggactactattttttccaattagtaagtggatgctgtctactgtctaggactattactattactctaattttatacggtgatggatgtggtgtaaagaattttgacaggttcacaagtcagggtcctttggcaggtcactggacatttccaagttcagcagctatgatgagctgattagtgagcttgctcgcatgtttggccttgaaggccaactagaggaccctaagactcagagatcaggctggcagcttgtatttgttgaccgggagaatgatgttcttcttcttggtgatgatccttggcaggagtttgtgaacaatgtgtggtacataaaaatactatctccactagaagtgcaacaaatgggcaaagttcttagtccttctacttctgccccaggtgacaaactttctactcctgtcaactcctgtgataattatgtgagtcaacaagagttgagaagttcgagaaacggcatggcatcaatggggtcttttcactactaggacactctcccagtcccatgtaaggtatattagttgaaaaattatggtggcagaattttatgttacaagtttcttatgtatggattggcccagcattcttatacacattaatggttgagatgtagtgatttagcaaggtctaaatagatcaacagcaaatgactgtaaattataataggtgaccctgtttctgtaatggttagttgcttatagcagttattaattattatctctt

SEQ ID NO: 28124 - DNA, 459 bp, Glycine max
  Clone ID: TF_jC-gmXLIB3563P059be05d1
ctctgaataaacaaattgcaatccattgttattgaacaatatactgccacaatacctcatagtgcagttgtttgcaaatatacaagcacggcatagcgttaatacatctaagacgacgtttaatcctaattacgcagatagggtgcaatatgaaagccatgcgtacttgacctatacaaaagtatgattaatctgtcaaacgcacgttgcttgaattcttaagtgtactataacgtcaacatactcttggatagatgatcgacatattgtgtagaatcttaactagaagagtaatattatgtaagaatgtgacatgctttatatgaatcccttgaagatcgatgctggagcgaacggctacccttgacaaaggacctgttcataatactgagcctctagcataactccataaacatgtcccaagggacatttgcaacgggcatccaatcaccatttttg

SEQ ID NO: 28125 - DNA, 523 bp, Glycine max
  Clone ID: TF_jC-gmro02910066g04a1
ggctcgagccacattggatggatatgatcaacttgtagatgaattggagaagatgtttgacataaagggacagcttcaacacaggaataagtgggaaactgtcttcactgatgatgaaggggatatgatgcttgttggtgatgatccatggcctgaattctgcaatatggtgaaaagaatcttcatttgttcaagccaggatgtgcacaaattgagctcagggagcaaactacctatctcttctatgggagagattgtaataagcttaaacacaaccgagacctgaaacttttacattcttgttcttactattttgatggatttttttcttttatttttctgatgcttttattgtgcttattcaaggtaagaatgttagtttgtttttggctaggcaagtttcatgctagttgtgaaacactggctaattgtagctcaatttagagattctagatactaattaggttccaaagactaaattaaatattttaatacattagttttgagaggtgaaaaacaaaca

SEQ ID NO: 28126 - DNA, 591 bp, Glycine max
  Clone ID: TF_GmC590_2
aaaatgtacgtcaaagttagcatggacggggctcctttaccggtccggattcccgggtctacccacgcgtccgattcggagctggtcttggccttggagaagttcttcggttgctatggaattcgcgaagcgttgaaggatgcggagaatgctgaacacgttcccatatacgaggacaaagatggtgactggatgctcgttggagatgtcccttgggagatgtttattgagtcatgcaagaggttgaggattatgaagagatcagatgcaaagggcttcgatctgcaaccaaaagggtctttaaaaggatttatagaaggcgtaacaaaatgaaaaatatagatgaagcaaaaaagattggcttctaatcaatgtcgtacacgttttgaagacatccaatttcatgttgtcgttttattatatttgaggaagaagaaacattttatagtatggtgcatgaatcagatttctgtctatgttaagacctaagaatgaaggaaatatacagaagtcagtttaattaaatatagggaaacctcatcgttttagtaaatggtttgtcatatttgttgatatgctgcacatttcagc

SEQ ID NO: 28127 - DNA, 1121 bp, Glycine max
  Clone ID: TF_GmC613_1
gagcagtccggcaagcgacttgccatcgagcctcgcaatgccactgcatcgtcgccatttgctcttcctgaaggcgccagagaagggcggccacagacacccaacgctcaaaatggcagtgcattgccacccttcccgggtcgggagtggacaatagaaggaagcaatgatccacaaattcaccgttggtttgagttcccatatagagccctcatcacttctaatgcataatgggatgtcaagtcttaagggagttagcagcaacagtgactcacccacaataccttttcaatcatctaattacctgaacaccacagtacctgattcttcattgaatcctggaatgacacacaatattggtgaatcgggcttcctgcaaactccagaaaatggggggcaaggaaacccaactaacaaaacctttgtgaaggtttacaagtcagggtcctttggaagatccttggacatcactaaattcaccagctaccctgagctacgcagtgagcttgctcgtatgtttggcctggaaggtgagttggaggaccctgtgagatcaggctggcagcttgtattcgttgaccaagagaatgacgttcttctccttggtgatggcccgtggccggaatttgtaaatagtgtagggtgcatcaagatactttcccctcaggaagtgcagcaaatgggcaacaatggccttgagcttcttaactctgtccccattcagaggctctctaacggcgtctgtgacgactacgcaggccgtgaggacccaagaaatttaagcactgggataacaattgtggggtctttaaactactgaatgatgtgacaatcaatactatgaatctcttctctctcttgtattattactcctacttctccactctttgtcaatggtgggatgtactgcctagttgtagtttataggctacttataagccttttgttttttttgtctgttttcctgttttttgctgcctaggaccattcataagataaacaatgtaaaccatatggcatcttgtcaatgtgctatctacaatatattgattacttaatctgtgtttggctaggagttcaatgcccgaagactgaagagcaaacggacaaaagtgaactga

SEQ ID NO: 28128 - DNA, 1422 bp, Glycine max
  Clone ID: TF_GmC519_2
gaccaacatctgctgcttctgttttctgggatgctggtcttcaacaggctgacatggcacaaaaaaatgttttggcagaaagcaaacggaatgacagtactggtacatggcatcatatgcaaactgacatgaatagtaaaagcaacagcggcaatgctatgttaaggaatcagacagaaggaagttggctatcttctccgcattctagttgtccgtctcatttgtttcaggacgcaacagatgatagcaagagtgtctcagcctggcctgtttcaaagcctcactcatccagattgaacaatgatcacgtgcttgaccaagttgacaaggagagcaaagttgagactgctacaagttatcggttgtttggaattgatcttattgatcattctaggaactctccttcagtagagaaggcatctgcacaagcaggaaatgcacccaaagttactactgaaggctgcaccagtaccttgacccgaactgatgctggccatctgtcggatgtaccaatggcttcttccaaggagaggaaacaagaacagcagcaagtatcaccaaaagagactcagagcaagcaaatttgtagaagtcgaaccaaggttcaaatgcaaggtgttgcagtgggtcgtgctgtcgatttgaccatgttggatggatatgatcaacttataaatgaattggaggagatgtttgacataaaggcacaacttcaacaccggaataagtgggaaattgtcttcactgacgatgaaggtgacatgatgcttgttggagatgatccatggcctgaattctgtaatatggtgagaagaatcttcatttgttccagccaggatgtgaagaagatgagttgtggaagcaaactgccgatctcctcagtggaagacgggactgtaataagctcagacacaaccgaaacctgaaacttttgacattctttcctgtggttttgcgtttgtttgtcagcagcacccaaatgctgatccttcttgttgcttcaaattgtttgtgggaaggaagttggtctatttgggctggggtaagtttcatgttatcagatgtgagacactagctaattgtaacttaatttgtagagacaccaccaccaggcattaattgtgctagaaaaaaaaagacctaaacagatttctttaataaattagtaagtgggaagatggcaaatttaggcttagtatatgtgaatattcatgtcaagttggaagaagaatgttgggggttttgatgttttgaaagacttgccttttttggttaaggggcttattcattggtgctttgtatgcatataatgtgcactttgttattaccctctaaaaattctaatattggtgagtcaatgtctgttgctgtcatcagtgaatgtaaattatggcattaaattgcttcaattgtaatgttcag

SEQ ID NO: 28129 - DNA, 1702 bp, Glycine max
  unsure (1)..(1702): unsure at all n locations
  Clone ID: TF_GmC630_3
cacaccacaaccttcttcttcttcttcttcaacttctggttcaaaacctcaacagtttgttgaattgcgcgttgaaatacgactcaatattctttcgcgagctctgttctcacttcaaaggttaggttcttcgacagtttctttgtttccactccgtcgcttgctgagaaggcgtgagcgagagttgtagaattacgcaacgagtgtcgcggatgagagatctgtggtgaggtctctggaccatgaaaaggtgttacaaacttctcagacacatctgaaagatattcaagcaaaatctcatagtggttctgctagaagttgcactaaagttcacaagaaggggattgcgctcggtaggtcagtggacctcacaaaattcagtgattatggggaattaattgctgaattagatcaactattcgaatttggaggtttattaacttctccacaaaaggattggcttattgtctacactgataatgagggagatatgatgcttgttggtgatgatccgtggcagtaaggatatctaacaatgacatatgtgattattctgtaatggtaaaaaaaaatcttgacaatgacaattcgtttgcataattctatttttaaatcagggaatttgttgcaatggttcgcaaaatttatatctaccccaaagaggagattcagaaaatgagcccgggtaccttgagttcaaagaatgaagagaatcaatctgctagtgaaggtgccacagacacacaagaaatcaagtgtcagctcaataattcagcttcagatacctgataatttgtagatttgatttccatagcttccagattccggactggagtggaaagtaggtgactgtcataaagccatccagttggagaatatgacctgatgaagaaaattctaattctgaatctgactgctttatcaagtgactgcttgtgtttggaatctgaatatggatggcatgaatgagtatccatccaattttggaccgtgtcgtggaattagtagtagtagtagtagtatatatatatgccttccctgttatacactcctaatatagtcgtatgttattgtgccttgtgcaaggtgatagggggtgtatcggccttgcatttttcaacattcctaccttgtacatagttttactcgcatccttagtacccaaactcgttaatgtaattaagtgtcatatacaagggcggtttatctgattttaaatatgattgtctcttattttagtggggtaatttgtgccagtatgcctaatcattgtggatattaaaatattagtatgcgtttgggtagtagatgtattattaaattttgcctctaagtcttggcatgtgccttgcagccttggtgtttgcgaatgagtccattaccgccatatcttgtcccagggttttcgaaccagcggcgtagttgaagtcatgtaacgagtgaagaaagtggacacttggggtctctggaaaaccgatggtttgaaaattccttggtgaaatgtatttgtggtttatcgttgcgatgacactgctagttgtggtgtagtcatctctctctgggatatgtgtagcgtggttacgtgatagaacttcattctttgaaagcaccatcgttgaatgtccaataatggtttttgaaaaataaataaattgattgtacttttctgctagagaaaaaaaannnaaannnnnnnnaaaag

SEQ ID NO: 28130 - DNA, 1075 bp, Glycine max
  Clone ID: TF_GmC1600_1
gagaaggcccttcaattcaatgtctaaagatgacaactctcacgcgttcgtttcgcctcgtgaagaccttcgaagggggagacaagagcagagaagccgcttcaatgtctaaagatgacaactcttcttctcaggattcttcatctgaccttgaattttctctctccctatgcccccgctaattcctccttcacttctcttcccattaccgctcccagtcaagttgttggatggcctccccttggagcatatagaatgaacagctataatagccatgcaaaatcaccagccacagaagtattcaattctacacttgacaaaagagcaagcaatagtgctggggttaggaagagtgcagatggtggcagtgatagtagcaacattatttccaaagaaaaaggaaacctcaggacttccctgtttgtgaaagtaaaaatggacgggataccaatcggaaggaaggttgatttgggtgctcacgattcttatgaaaccttagctcaaaccttggaggatatgtttgatgaatcaactacagtcctcactcacaaagtaggatcaaatggagaagatcatggtactgaagttggaacagatgggcattcaaaattgctggatggttcttctgactttgtgctcacttatgaagacaaggaaggagactgggtgcttgttggagatgttccttggtgttactttgcagctccaagattggaagaaaagaacagaagatcgaatacaagctcatatagataatgtttgcacctttacatgttaggatacacaaaacttatgatctaaaatgtacaacatgagttgaaggaatataaatgtgagaaaaaacagaaagagggaagttaattaatactgtgagtaacggatttttatttttaaatgatcaaacctcgcttttttgtttctggattcaattcaaatggtgtttgtttaatttctcttggtatatcacttgaaaggcacaggccccataaattttcatgtaatgtttgtcatataagggattgctgtttgttaataatgtaaatgtaaatatgagatgtatgctagctttcttact

SEQ ID NO: 28131 - DNA, 936 bp, Glycine max
  Clone ID: TF_GmC1199_3
tccaccacctcctcctccaaagaagaaaccatactactatcactccccaccacctcctcaccctatacctcacccccacccactattattattgtactacaacacaatcaagtccctgaatgctttttagagagagaaagagtcataataaagtgaaagaaaaagaaaaaggagagtagtgaaacaagaagaaaggagaagaagatggtgtttgaggaaactgagctgaggcttggactgagactaggactgcctggaaatggagccgcgccaacaactgaagctgctgcggaattaggagtgaggaagagagggttctctgaaactgaaaccgatgaaacaacctccgttgatttgatgcttaacctctctcccaaggaagcttctgctgctgctactactgatggagcagatccacgtgagaatccaaagacttcgccgaaggagaagaatcttcctcttctcgatcccgcaaagcctcctgccaaggcgcaagtggtgggatggccacctgtaaggtctttccggaagaacatgtttgcagcccaaaagagcagcggcggagaggaaagcgagaagaacagccctaatgcaagctttgtcaaagttagcatggatggagcaccttacctccgcaaagttgacttgaagatgtacaagagttaccctgagctctctgatgccttgggcaaaatgtttagctccttcaccattggaaattgtgaatcccaaggcttcaaggatttcatgaatgagagcaagttgatggatcttctgaacagctccgactatgtcccgacctatgaagacagggatggcgactggatgcttgtcggtgatgtgccatgggagatgtttgttgaatcatgcaagcgtttacgtatcatgaaaggaaaggaagcttttggactggcaccaagaaccggggaaaaatgc

SEQ ID NO: 28132 - DNA, 937 bp, Glycine max
  Clone ID: TF_GmC630_8
tcaagagagcttatgtcaaaacaagtgtcagcaaaaacttgtgaggctgtgaaaccaaaagatggtgactgtaagctatttggcttctcacttatcagtggccctactttaccagagccttctttatcacaaagaaatgtgagtgaggctgctgatcagatgcatcttacagcacaccaacaaagaacatctgaaaatgatgaaaagttagaccactcgaagggatcaagacctgtagatgatatagttgttgatgaccaggacagaccattacggacttctcagctgcatactaaagatgttcaagctaaacctctcagtggttctgctaggagttgcactaaagtaagatccttcactatttgattgaaaaatgagagctagaagtttactgggaaaattaaccacatggtatttgttttaggttcacaagaagggcattgcacttggtagatcagtggaccttacaaagtacagtggctatgatgaattagttgctgaattggatcagctgtttgaatttgggggtgaattattgtcaactaaaaaagattggcttatcgtctttactgataatgagggtgatatgatgcttgtaggcgatgatccatggcagtaaggatctgtattttaattatacatccttggttaactttctatttaaatatcttacttttccttgagaatgggacataatttatataattctatattttcaattcagggaattctgtgccatggttcgcaaaatttatatctaccctaaagaggagatccagaaaatgagcccaggtaccttgagctcgaaaaatgaagagaatcattcgtgacggctagtgaaggtgcagatcaaaagatgttaaatgtcagccgcatcaaaagttcaattcagaaaatggtcttgacgcctaatgattagtagattgattttcgtagc

SEQ ID NO: 28133 - DNA, 1881 bp, Glycine max
  Clone ID: TF_GmC1105_1
gcgaagttcggtggagattttgtctcacccgcgaacctgaatacaaaggcttgggggcaaagctagttcaggccttgaattcgcactctcttcacacactccccatggacttcacccaagacttgcactgtctcctatctgagcaacgccgcaagctcgccgccgcagaggccatggaattggacctcgacttcgccttccgcctccagttaaaggaagccctcgcggcctccctcgccgcccagccctcctcctcctccgccgccgccgccgcgatcatcgaacaacccgtcgtcgtcatccacgatgacgacgtcaacgccatgacgctgcagcgcgaggagctggcgcgtatggagcgcgagatgaaggaccgggagcagagcgaggcggagacgcttaaaatgagagaggaactctgccgtcggatccacgacgagaaggtggcgagggagatttccgcgattcccgagaaggactggcagcagtggggagacaacttcgagaaaccattcggagagggctcgtcgtcttcgtcgctgagtagagaggaaggcgtggttagggtttacttcaagggtttggtgagcgaggaaaacgtgaggggacggaaggtcgtgttgtctgggattggggttgcgatttgcgaccttagcgataatttgatattcgaggtttctaagtcgctcattggaaatggcactagcaaggtcgctgcggagattaaggctttgatcgaggctttcaatgccgccattgctttggacttgaagcgcgtcgtttattgctgcgattattatccccttttccaattcgtgagtggaaaatggcctgcaaaacagcggaagattgctattttggttgatcaagtgaatctgcttcaaaggaagttttcatactgcaatccaaggtttgtggccagacatgatgtcaagtttgcatttaagcttgcaagagatgcaattgaatctcagtccacaagacttgcagaatctgggagtaggagtttgaatgaaacttgtgtcatatgtttggaggaaactgatgttggtcagattttttcagttgatggctgtcaacaccgctattgcttctcatgcatgaaacagcatgtggaggtgaagttgcttcatggaatggtgccaaagtgccctcatcaggggtgcaagtatgagctcctagttgacagctgccagaagttcttgactcaaaagttaaccgagaccatgcagcaacgaaaattggaagcttcaattcctgttgctgaaaaaatttattgtccttatcctacgtgctctgcattaatgtcaaaaactgaggtcttagagtactccaaagatatcactggtcaatctgaacaatctgaacccaagatatgcctaaaatgtcgtggccttttctgttttaactgcaaggtcccttggcatagtggtatgacatgtaatacttacaaaaggatgaatcctattcctcctgcagaagatttgaagctgaagtttctggcatcaaggagcctatggcaacagtgtctgaagtgtaaccatatgattgaacttgctgaaggttgctatcacatgacttgcagatgcggttacgaattttgctataactgtggagcagagtggaaggacaaaaaagcaacatgtgcttgccctctttgggccgaggagaatatttggttagatgatcatgaggaagagttggaagaagaagaagaagatgatgatgatgattatgatgattataggtctgattatcctgatgattattattattaagtatctggccgcttgaccaggttgacggttttacaactagtaaatattcatattcatatatctatatatatgtaagcaaaatgtgattgtcttttaatttcaa

SEQ ID NO: 28134 - DNA, 619 bp, Glycine max
  Clone ID: TF_LIB4390-059-R1-K1-G3
gatcgaggaaaacaatatcagagaagctgagtgtcctaactgtaggaggcttttctgtgcgcagtgtagggtgccctggcacgataatatgccctgcgaggactttcagaagctgaacgcggacgagagggataaggaggatatcatgctgatgaacctcgccaatcaaatgcagtggaagaggtgcccccggtgtaggttctacgtcgccaaatcggatggatgcatgtacatgaaatgcaggggaaagacgcagaagcagctgcttttgctgatccactatcgaaaggtagccagtgtttactaaatacccactggtgtggaaacgccttctgttacaactgtggagctcccaacttaaccagctcccatagttgcagctattgttttcgttaatgatattatggaaccaaaagaggatttgaacaaattacttcatgcaaactacctaaactcatcccaaacaccccacacctagtgactttatttatgcattaacattattcagtatagcttataactatttagccttttcaagtatgagaacaatttcaaaatctgtttgcagtatatgactttatgaatgcataataatggctatgtatctttagccgcaaaa

SEQ ID NO: 28135 - DNA, 5516 bp, Glycine max
  Clone ID: TF_GmC23542_1
atgaagaaatcctcctaccctaatcccacccctcgccgccacgattttcaccgtccgccaccacccacccacggctgcggttgggctccccgccccgcctaccaccgcccctaccaccaatggaggccccgattccacccccacgccgcccgcatcgaccgccctccggagccctatttcagggtggagctccgcctcggcagcagccccctccaccgcgacgatgtcgaggccctgagcgacgaatgccactcccggtacgacaccttcactttctaccccgtcgacgacgtcgccgccgttctcagttaccggagctgggagcaggcgcgagacgccgtcgtttggttctgggaggcgcggctcgccgagaagcacgattccactcggacgctggattccaacgtcgtcgtagtcaaggacgatgtggattgtcgccttcgaccggtgttcgcgaggcacgtgaaagggttgacggaagggaaggagctgaagcggttgatggaggagagtggacggtggtcgagagaaatttctcggtttttgaattcgcggagtaagcccttgctacgtggggtgcgcatcgagttggtggagtaatgaaaagggttagtaggtgagaagaatcttgttgacaggaatttaaaggggtttgagcctgcgatgcagtgtttattgaagtatttggagggtggtgttgacgtggagggtgtgactgtctttaggtttgatggaggttttgattggaagcggattcattgttcgatcaatcatgagtgtgagagacttgaggatggacccagttgcccaatttgcttgtgcgaggttgaggatggataccggcttgaaggctgtggccatttgttctgccggatgtgtttggttgagcaatttgaatctgctattaaaaaccaaggcactttcccggtatgttgtactcacagggactgtggagatcccatcctgcttacagatttgagatctcttttatttggtgataagttggaggatcttttcagggcttctttgggagcttttgtggcaacaagtgggggaacttacaggttttgcccttctcctgactgcccctcaatttatcgagttgcagatcctgggtctgctgccgagccatttgtttgtagggcttgttattcagagacttgtaccaggtgccacttagagtatcatccttacctttcatgtgagagatacaaagaattcaaggaagatccggattcatctctgatagaatggtgcagagggaaagagtccaggaagaaagcattggatgttatgaaggccaatcaatcaaatgctgttctacattttcatcctcacgtgagtttgattccaggatagcattcatgacagatcattgtttattgcagcactacatgagtgataataatttatccggggtctcgtgcatcataattgatgaggctcatgagaggagcttaaatacagatttactgttgactttgttaaagagtttactttgtaggagggttgaaatgagacttatcattatgtctgctacagctgatgcaaagcagctgtctgattacttttttgcttgtggaatttttcgtgtgcttgggagaagctttccagtggatatcaaatatgttccttctgactatgcaggagattctggttctgctgttgttgcctcatatgtttctgatgttgtcagaatggcaactgaggttcacaaaactgagaaagagggaactattcttgcctttttgacctctcagatagaagtagaatgggcctgtgaaaagtttcaagctccctctgcagtagctttgcccttgcatggaaaactttcttctgatgagcaattccgtgtttttcagaactacactggaaagagaaaagtgatattttcaacaaatcttgcagagacatcacttacgattcctggtgttaggtatgtgatagattctgggctggttaaagacagcagatttgatcctggtagtgggatgaatgtacttaaggtttgctggatcagccagagctctgctgatcaacgggctggtcgtgctgggaggactgagcctggtgtgtgctatagactgtacacggaagctgattatcagtctatggacctaaatcaagagccggagattcggagagttcatcttggtgtagcagttctgaggatccttgctttaggagtgaaggatgtgcaaggttttgattttgtggatgctccaagtcctagctccatagatatggcaatcagaaatctaattcaattaggagccattgaactgaacaatgatgttcatgatttaacttctgaaggttggtgcttggtaagaatgggaattgaacctaggctgggtaaacttattcttggttgtttcaaacatggtttgggtagggaaggtatcatccttgctgctgtgatggccaatgctagtagcatcttttgcagagttggcaatgaatttgataaacaaagatctgattgtcttaaagtgcaattttgccattgtgatggtgacctctttactcttctctccgtgtacaaggaatgggaagctttgcctcgagaaaggaagaacaaatggtgttgggaaaacagtatcaatgccaaatccatgaggaggtgccaagacacaattttggagttagaaacttgccttgagcgtgaacatgacgttgttactccgagttactggcgttgggacccttgtatgccctctaatcatgataagaatttgaaaagggtaatactgttctcacttgctgagaatgtagccatgtactccggctgcaatcaacttggttatgaagtggcacaaactgggcaacatgttcaactacatccatcttgttcattgcttgtatttgctcagaaaccaagttgggtagtttttggtgagcttctttccatttccaatcaatatttggtctgtgtgagtgcatttgattttcaatcattatacgacctttgccctgctcccctgtttgatgtatccaaaatggaagagcggaagttgctaatgaagacactgtctggtcttggctgtattcttctcaagagattttgtggaaaagccaactgcaatttgcttgctcttgtttcacgtataaggaaagcttgtatggatgaacgcatcttcatcgaagtgaatgttgacaataatgaaatccacttatatgcctcttcaaatgatatggatatagcccttgggttggttaacgatgttctagaatatgagagaaagtggttacgcactgaatgtatggataagtttttgtatcatggttctggtttctctccacctgtagctttgtttgggtctggtgctgagataaaacatttggaacttgagaaacgttccttgagtgttgatgtgtgtcatccaaacataaatgaaattgatgacaaggagctcttgatgttttttgagaagaatacctctggttgcatctgtgctgtgcacaaattcacaggcaatacgagggatgaagatagggataagtggggcaggataacatttatgtccccagatattgtcagaagagctgctgagctagatggacgggagttttgtggctcatccttaaaagttgttccttcacagttgggaggggataaaacattttcgttccctgctgttaaagcaagaatttcttggcctcgtaggcttagcaggggatttgccatagttaaatgtgatataaaggacgttgattatatcttgagagatttctataaccttgcagtaggagggaggtatgttcgatgtgaagttggcaaaaagagtatggacagtgttgttataaatgggcttgacaaagagctttcggaagctgaaatatcagatgtgctaagaactgctacaactagaaggattttggattttttcttggtgagaggggaagcagttggaaatccaccatgcagtgctttggaagaggcactcctaaaagaaatttacccctttttgcccaaaaggaaccctcacattagtccttgccgagttcaggtgtttgcacctgagcccaaggatgctttcatgagagctttaatcacttttgatggaagattacatttagaggcagcaaaagctttggagcaaattgaaggaaaggtgttacctggatgtctttcatggcaaaagataaagtgccagcagttgtttcatagctcccttacatttcctactccagtgtatcgtgtgattaaggaacaactggatgaagtacttgcaagcttcaggaatttgaaaggtcttgaatgcaacctggacaggacatttaatggttctcaccgagtgaagataacagcgaacgccacaaggacagtggcagaagttagaagacctctggaagaactattgagagggaaaaccattgagcatgacagcctcacccctgtagttctccaactcatgttgtccagagatggctttagtcttaaaaactcattgcagcaagagactggaacttatattctttttgacaggcacaacttgaatttacgggtgtttggttccccaaacatggttgctttggctcaggagaaggtgatacagtccctcctttctctccatgaagaaaagcagttagaaattcatctgagagggagggatctacctcctgatttaatgaagcaaatgattaagaattttgggccagatctccatggattgaaagagagggtacctggggtagatcttacactgaacatacgtcgccacataatcattcttcatggtagcaaggagttgaaaccgagagtagaggaaatagtttttgagattgctcgttcaagccatcatttggttgagagatttggcaatggacccagttgcccaatttgcttgtgcgaggttgaggatggataccggcttgaaggctgtggccatttgttctgccggatgtgtttggttgagcaatttgaatctgctattaaaaaccaaggcactttcccggtatgttgtactcacagggactgtggagatcccatcctgcttacagatttgagatctcttttatttggtgataagttggaggatcttttcagggcttctttgggagcttttgtggcaacaagtgggggaacttacaggttttgcccttctcctgactgcccctcaatttatcgagttgcagatcctgggtctgctggcgagccatttgtttgtagggcttgttattcagagacttgtaccaggtgccacttagagtatcatccttacctttcatgtgagagatacaaagaattcaaggaagatccggattcatctctgatagaatggtgcagagggaaagaacaagttaagtgctgctcggcatgtggatatgtaattgagaaggtagatgggtgcaaccacgttgaatgcaagtgcggaaagcatgtctgctgggttgtgacttttctgctatgcaagctctacattatgtgttcaaaagcagttcaatacggttgtatttatccattaaatgagccggaagagagaattgattacaagtcgattagcacgaactag

SEQ ID NO: 28136 - DNA, 1145 bp, Glycine max
  unsure (1)..(1145): unsure at all n locations
  Clone ID: TF_GmC136999_1
tccagcccttcgtcccctcgccgcagcctcctccgcccccccaaccccccgtcccctcaccacaacaatttgggcccaccaaaccacccgaacttgcaatactgtgtcgccaacaagcccgaaccggctcaaatgcttgcagacctttgcccagatacatgtaaaggaaggcactgttagtaatcttaaatgtcctgaagcaaaatgtgcaattatgattccttctggccttttaaaacaattgctggatgacacagattatgagcgctgggaatccatgatgttggaaaaaacacttgcatcaatgtctgatgttgtttattgtccaaggtgtgaaacaccctgcatagaggatgaagaccagcatgctcaatgcccaaaatgttactttagcttttgtaccctttgcagggaacgacgccatgttggcatagcatgcatgagtctagatatgaagcttcagattttgcaggtatggtatttgaatccataatcagacaaatggtttagttgtcaacttgtcatagatcacaggcatgatttttatttttttttggtgaatacagaggcatgtattcttataaacaaaaaaaaaaaaataacatttggattgtgagggcctaagggaagaggaagagtgtaaaagggtcaatacgaataggatgtaaaagtgcctatgaatacatatgcctatgtaattgaaacacatcctattcgtattgacatttggattttggaagaggaagagtgtaaaagggtttaattttacggctgtaatcggagtaagtctgagtcaatctttttttaaaaaaaatattctcttcctcaaatgttacaacaatatttttttttgcgaaaaaatattactactttactgtggttgtttggaaatgctcaatatctgacttatcacaagcgcacccactcttcctctattgtaagttatcatgttttatctgattgatttttattaccttatctggttcactcataattcaatttccaatttaattggttatgaattaagaatttgttgattccatctttggttcgattcttagaatattgctgggacccatgtacaaagaaaggcactcgtatcgtacatctatcnngccaactctatnntannnntcaannnnnng

SEQ ID NO: 28137 - DNA, 1630 bp, Glycine max
  Clone ID: TF_GmC23542_3
aaatggacccagttgcccattttgcttgtgcgaggttagggatggataccggcttgaaggctgtggtcatttgttctgccggttgtgtctggttgagcaatttgaatctgctattaataaccaaggcactttcccagtatgttgtactcacagggactgtggagatcccatcctgcttacagatttgagatctcttttatttggtgataagttggaggatcttttcagggcttctttgggagcttttgtggcaacgagtgggggagcttacaggttttgccctcctcctgactgcccctcaatttatcgagttgcagatcccgagtctgctggcgagccatttgtttgtggggcttgttattcagagacttgtaccaggtgccacttagagtatcatccttacctttcatgtgagagatatcaagaattcaaggaagatccggactcatctctgaaagaatggtgcagagggaaagaacaagttaagtgctgctcggcatgtgggtatgtaattgagaaggtagatgggtgcaaccacgttgagtgcaagtgcggaaagcatgtctgctgggtttgtttagagttctttagtactagtaatgactgttatgaccatttaagaactatacacttaaccatcatataaattgccatttgcgtaccatttttccgagacttgtaattaagcctagcggtatataataatactgtacatggaagtagcaaattgtacagctttcttaaactaatgtatatatatcacagcagttctgcttcttacttgtatatctaattctaatataagttgcacggtgtatataggttgtgacttttctgctatgcaagctctacattatgtgttcaaaagcagttcaatacggttgtatttatccattaaatgagccggaagagagaattgattacaagtcgattagcacgaactaggttacagttatatttgtgtctaaataaatataaagcaaaaaattgtatatgcagatcgtcttctgtgtctcaaaacggttccaaattccaatcacagcagagtggctattcacagatagtatctgcaagcaagagcagtggtaactccaattcccaacgaaagaaccaaggccagaacccatgcaacaccagtagtttcttcatcatggccatctccctctggttgttgacgcagcaaaagggattgttgcaagcggaaaacttgaagctcaagcaaacgcacctgttggcgatatgcaaacaagtgcatggcctcttccaacaaaaccatagaaagaccctccttttcatttttcagaactgcagccttcttttctgcctctctggcccgtgtctgagatgctcgcagtgccttcagaagctccattttatccttttcatcatgtccactgtcaatcctgtaagcaccagactgtttgctatgttgctcttcttctctgttatagagcctattcatggacaatatgacactcttatctggacccataaaaaacttggaaggtggaggaagatcacagttctgcatcaggtcaaaccctgaaggcttgttgtgagaaactgtgaaacccataatctcatttcttcttctttgagtttgaccaatcttcttttgttggccacccat

SEQ ID NO: 28138 - DNA, 1539 bp, Glycine max
  Clone ID: TF_GmC43002_1
aattcggctcgaggctacccagaacaagatccgcagggtttttgctttcactgattctgagttgttgcacgaccagataacatttgggaaaaaattggagatgcctcttttgacggcactgagagaaaggattctggaacttgccaacaattttgaagattttgttttaaaccttataccctctactgatcttgagcagccactgcatttggccaaagtagctattggacttgtcactttccctgtaaatggtgagatattgcttaagaactgttctatttgctgtgatgacaagccagtgccaattatgattaccttgaaatgtttgcacacattctgttcacattgcttgagggcctatgctgatggtaaagtacaatcttgtcaattccctataagatgccctcaaccaagatgcaagtattgcatgtctgtaactgagtgcaggtcttttcttccattcatctcctttggatcactggagaaagccctttccgaagaaaatattgaccattcagatagaatttattgtccatttccaaattgctctgttctccttgatcctcatgaatgttcatcagcaagggccagttcatctagtcagtctgacaactcttgtatcgagtgtcctgtttgtcggaggtttatctgtgtggactgtaaggttccttggcattcttctatgagttgtttagaataccagaacctgccagagaaggagagggatgtttctgacattaccttgcatcgtcttgctcagaataaaaggtggaagcgctgtcagcagtgtcgtagaatgattgagcttactcaaggctgttaccacatgacatgctggtgtggttatgagttttgctattcatgtggtgcggaataccgagaagggcaacagacatgccagtgtgcatattgggatgaagataactctgaagactcagtggcgcactctcttcaagaatcagaacaatgggcatgggagacattcaattctctctccatgatcgtggacgcatactcagaccaagaacgatcgcagcttgcacttattcaaaggttcctagctgggggtttcagtctcagtgaccataatccttaccaatctcctcctcgctgtacagactcctatgtagaccccatgaaggatctacatcaacttccatggctagagagatttgtgtctgtgataagtgacaactactatgatgattacattcaatgaatgaaactgtgatagatcatagactacctaataagttcatcaactttcaatctcaactaaattttgaaaggaggatgcagaaagagtttgtgactctgtccacttttcatcaagaggtgaagcaacatttacatcatgaaattccttgtttgttccccgcttggatatatttaaccaaaggtggaggatctgttcatgattattctctctaaggaaagaaaaaaagaaaaagtgatatttgggagtgaaaacattttacttgtggttgggaagaatacaattttaggcaattaaaagaattccggatttttaattttgcc

SEQ ID NO: 28139 - DNA, 2903 bp, Glycine max
  Clone ID: TF_GmC1406_1
ggctcgagtccgtctctctctcttactctctctctttctctgtgttcgtgagtggagtggcgtatgtgtagctgcgctctctatcgccggcgctctcgtcggaatttccgttattgatttttccgatcaccggattcgatccaatccctaatccctaatcccgcgattccatcaattgaaaaaattgaatagccattgaaccgtttcgtttcgggggtagcggagatggacgtttacgcgagcagcgacgaagattaccattacgactccgaccacgaggactccgtcgaggcctacgaaaacgacgagaattacgccttgctctcttccaagggcaccactactaaggtgattacaaaggaatcactgctagctgcacagaaggaggatttgcgcagagtgatggacatgctatcggtgagagagcaacatgctcggacgctgcttatttttcatcgttgggatgtggagaatctgtttgaagtgttagtagacaaggggaaatcatttctctttgctgaagctggtgttagtgtggatgaacatcgcaactctgactcacctgttcctcctgcattcatgtgctacatctgtatggaggaagttcctagtagcaaaacaacgagaatggactgcggtgattaattttgcaacattagttggatagagcactttattgtcaagataaatgagggtcaaagtaagcgcattagatgcatggaacacaagtgcaattccatatgtgatgatgcccttgtaagaactctactcagtagagagcaccctcatatggcagagaaatatgaacgctttctgcttgaatcttacattgaagacaataagagagttaaatggtgccccagcacacctcattgtgggaatgcaatacgggtcgaggatgatgaactgtgtgaggtagaatgttcatgtggtgtacaattttgttttagttgtttgtcagaagcacactccccttgttcatgtctgatgtgggagctttgggctaagaagtgccgagatgaatcagaaacagttaattggataactgttcatacaaaaccatgtccaaagtgtcacaaaccagtggagaagaatggtggttgtaacttggttagctgtatctgtggccaagcattttgttggttgtgtggtggagctactggccgagagcatacttggtcaagtatagctggtcatagctgtggtcgatacaaagagcaagaaaaaacagctgaacgtgcaaagagggatctatatcgttatatgcattatcataaccgatataaagctcacacagactcctttaagattgaaagtaaactgaaagagactatacaagggaagattgccatttcagaagaaaaagattctacactcagagattatagctgggtaaataatggactctccagacttttcagatctaggcgagtcctatcatattcatatgcatttgcattttatatgtttggagatgagctttttaaggatgaaatgacagatgctcaacgggaaataaaacagaacttatttgaggatcaacagcaacagcttgaggcaaatgttgaaaagctctctaaaattttggaggagccttttgaaaccttttcagatgataaggttgttgagataaggatgcagatactcaacctttcaacaattattgacaaactttgtcaaaaaatgtatgaatgcattgagaatgatctattgggttctctcaatcttggcattcatagtattgctccatacaagtcaaagggcatcgagagggcatcagaactttcagttggctggaataatggagtcaataatactggtaaatgtcttttagggggtttgtttgaataattagctttaccaaaactcttttgcgtcagcattgccaacataaattgtctttgctctcataatgaattaacaggaaatctttttagacttccaaccttacttgctttctcttatctttcttttatccagatgtctcttgtagaattaaaactgtttccaaagtttcttattcttattctatctatatttctgtttgaaatcctagtgctttttaaaaaaaccttagcatttatttgctctcatttttatgtaaattgctagcgcttgggaaattttaatggggcttttattcctattttatggttttatttgactttgtggatgctcatctgaaattgttactgagtgaaaaggattattgtatatatgctgcaagcgtaggtgtaacagaagaacttgatcgaccatctggatcagggagttcagacgataatggatgttcttctcgtaaacgtgctagaaaagagggtcttggaggtggtggtttttttgatctaaacttgccagcagagtttgtagacagaaattgactttgaaggacaccttattatacgtacaggcgtacaggtctaacaacataaaattgctttgctttgctgcctttggaaggaaggaattaatctttttggatttcataccccatttgctttctcatatctttcttttagccagccatgtctctgctgagataaaagatatgtttccaaggtttcttattcctatgccatctacctttctgtttgaaatcctagcgctgtatatagatagccttggggcatttatttgctagtagttttatgtaaatggctaccttgaggacaactaggatgcttttattcctattttatggagttataggtggaggtaacttcactgatttttcttctctcatgtttacactattttaacttgtttaagttacaattttcaagcgtctagggtgcttttattcctatcttttgaagaaaaatcagtgaagttacctccaccctcttccataacttgcttcaaaatggataaagcaattgtctcggcttcttgaagggttaggc

SEQ ID NO: 28140 - DNA, 3781 bp, Glycine max
  unsure (1)..(3781): unsure at all n locations
  Clone ID: TF_GmC6405_2
tttttntttttttttttttncagggcnaattgtttggaagttccatttactcaaagaatcgaacataactaatccaagcaactgaatgaatattaattcatcacaactcctatctaattccctcattcaatctttactttaattccgtataaataaaactaaacaaataggaaagcgactattgacagacaactaaacagaaatgaaaaatgatgattagctcgattcaattttcactacggcagtggcagaagttcagtatggtgaattttgaatacgtacttttccatctgcttttcatcctttatacaagagaaatgtagtataatatgacgcagccataaagagcactcaatcattaatacagaagatagttacggagcctgtacacctggtgtctttcttgcctaaagttgcagttcagcttcttcaatcatcaaaaggtgaataacgtgatcatttaaacttcagagccagagggctctgtggacaacgatgagtctgtgccataattccaaaggctcttcaactcacctcttatacatcccaatatgactgtgacacctagtgtgcatggaacaagaattcggctcgagctcttggaacttttctattattttttctctctccattctccattctccattctcctctttgcttactacccttccatattccatatattttcataatttttctttcaattccccaaaacacattaataaaaggaaatcaaatcaaagcaaagacaacacgcattcttttcttccccaatttccaatccccaattcttctgccctagattttgtccctttttttattgcactccacccacccaccgtgcatcggtcgctggttcctgaatttcccttgtggttaggtttcctcgatggagtcagaggatgatatgcacgacgccaacgacatcgagtccctcgacgacgatttctacagtggcgagaccgaggacgctcctttggactactacagcgacgacgacgccgacgattacttcgacgacgccgagaggatcgagtctcgccgccctgagcaaaattttaccatattgaaggaatccgatatccgactaagacaggaagatgacgtcgctagagtagcaacggttctttccatatcaagggtttctgcaagcttactactccgtcaccacaattggagcgtcagtagagtgcatgatacatggtttgctgatgaagaacgagttcgaaaagcagttggcttgttggagaagccaattgtccagcatcctaatgctagagagcttacttgcggtatctgttttgaaaattatcctcgtgctaggattgaaatggcttcctgtgggcatccctatcgtatctcatgctgggaaggctatatcagcacatccattaatgatggtccgggatgtttgatgctgagtcctgatccactgtggtgctgccactggccgctcgagccgattcggctcgaggtcggatgaagataagcagaaatatgcacgttacctacttagatcttatattgaagacaataagaagtccaagtggtgtcctgctccaggttgtgaatatgcagttacttttgatgctggtagtactggaaattatgatgtctcttgcctctgttcatatggcttttgttggaattgcactgaggaggctcatcgcccagtggactgtggcactgtggcaaagtggattttgaagaacagtgcagagtctgaaaacatgaactggatacttgctaactcaaagccatgtcccaagtgtaagcgaccaattgaaaaaaatcatgggtgcatgcacatgacatgcactccaccctgtaaatttgaattttgctggctatgcgttggtgcatggtcagaccatggtgaaagaactggtggtttttatgcttgcaatcgttatgaagcagctaaacaagaaggagtgtatgatgatactgaaagaagaagggaaatggcaaagaattcgctggagagatacacacattattatgagcgagctttttcttgtctaatcaaggcaaaaagctcttgcagatctacagcagatgcaaactgttcatattgagaagcttagtgacatacagtgtcagcctgagtcacagcttaagttcataactgaagccggctacaaaaattgagtgtagaagagtgctgaaatggacatatgcatatgggttttatttgccggagcatgagcatgcaaaaaagcagttctttgagtacttacaaggtgaagcagaatctggtctggagagacttcatcaatgtgcggaaaaggaactacagccgttcctaagtgctgatgatccatctagagaattcaatgactttcgtacaaagctagctggattgactagtgtgactagaaactactttgagaatttagtaagggcattagagaatggtctatctgatgtgggaagtaatggagctgccttcagcaaagcaacgagctcaaaaaatgctgctggtagcagtaagggtagagctggaagaggaaagggaacttttcgaactagcttgtccagcaaattgaatgatgatagtcattggtattgtgagcattgtacctatgcaaatgtcaaatctgcctccacatgccagatgtgctatcaacaacgtcgatgaaaacttggttctccatttgaagcacttgtctcctgcccaaggcctctgcaccaaaagctgagatggagacattcctgtatgtttatatatatttatgcactatgcagtctccaattttgtgatgctaaatacaacaggatgaaaggagtaaggcatggaagaaaggttgctctccatgcgctcctattcaatacaaaacccaatttgatgtatatagtgttctatctctttatgtatgaggttttctgctacaggcatttgtaactcaatatcataacacaacagatgttggagaatggagatgaacacaaatgtgcttgtttgtgacaactctttcagttggtctcttggcagcttccaagagggttagtcgtgtataataagctcaggatttgattacattctaaaaaatgataaggggctgcaataaatattatactttatcacttgatatatcatcaaacagatgccaaggatatcttggccagtccatgaatatgattcctgtcgagtagcagcccagaaaattgcaaatgccacacagaataacaatactgccagggagaaaatagagatctccccaaatagaggtaagctcactgtcttctgaccacaattttggcattttcttaaagtgaggcttacaatacaattgtgcataccctcaataccaccaatgcagaaaagtacaatcagcacccagacaaaccaagttgacatgaagaagaacaatagcacaagaaaggtagacgctgctatgacaaatatgacagcaccctttgaatcaatgttaacaatttccttgtccaaatcatctttttctgtttcagcattagaagattccttggggcacaatttgttatagcgttcatcagacttctctggggtagtcagatcggaccatagtgaagcacatacaatagttccaacagacatcaaccacaaaaatgcaactgagaagtccacaagtggccgaggcggagcatataacaaaatttccactttgcttccagatgtgaaagacttgttgagagattgtcctgctgactttgctatcatgactactggaattgaaatatttgcttcactgctattggagcaaaccatctcaaagagatcttgtgagtcgttactcgagcc

SEQ ID NO: 28141 - DNA, 1361 bp, Glycine max
  Clone ID: TF_GmC215703_1
tcgtggtaatccaatcagaatatgggttcagagattccggtttcataagcaagttggagaaagtggtcaggggagagtgagaagtagtcactgaaccatcaacgtcggaaaccgaatccgaaaccaaaaacggttccaaatgttgaaccccgaaccgccgccgccgccgccgccgatgatggttccgccggcgacgccgatgaaccgcgaaacgacgtcgctaaggaagaagaacagactccgaactcgaactcgaattccacctttcgacgtggactcctccttcttcaccacgccgatctccttgcaaggcaccacaaaatcaaacgcgatctccgtggagcaatacgacggcgtttccgcttccgcttccagccccgtccacgtcatcaacctctctgataccgaggacgacgacgaagtccgaatcctcaacttcactcccataaacacgtccttcggaaaacgcagcaagaaatcatcatccaaaggagagtgctccaactccgcatcgttcgtctgcgaaatctgcaccgaaacgaaaaccgccagagactccttctcgatcatcggatgccaccacgtgtactgcaactcctgcgtggcgcagtacgtcgaatcgaagctcgaagagaacatcgttagcatcccctgccccgtgcccggatgcaggggactactggaggctgatgattgccgtgaaattctcgcgcctcgcgtcttcgatcggtggggaaaagccttatgcgaggctgtgattgctgctgaagaaaaattctattgtccctttgcggattgttctgttatgttgattagagggatcgaggaaaacaatatcagagaagctgagtgtcctaactgtaggaggcttttctgtgcgcagtgtagggtgccctggcacgataatatgccctgcgaggactttcagaagctgaacgcggacgagagggataaggaggatatcatgctgatgaacctcgccaatcaaatgcagtggaagaggtgcccccggtgtaggttctacgtccccaaatcggatggatgcatgtacatgaaatgcaggtgtggaaacgccttctgttacaactgtggagctcccaacttaaccagctcccatagttgcagctattgttttcgttaatgatattatggaaccaaaagaggatttgaacaaattacttcatgcaaactacctaaactcatcccaaacaccccacacctagtgactttatttatgcattaacattattcagtatagcttataactatttagccttttcaagtatgagaacaatttcaaaatctgtttgcagtatatgactttatgaatgcataataatggctatgtatctttagccgca

SEQ ID NO: 28142 - DNA, 801 bp, Glycine max
  Clone ID: TF_LIB4203-002-R1-K1-F3
gctgatctggatcaataaagaagagatgatcttccagattccatggaagcacgctgctaagcacggctgggacatcaacaaggatgcctgtctgttccggagctgggccattcacacaggccgatacaaagcaggagaaaaagagccagatcccaagacatggaaggcaaacttccgttgtgccatgaactccctgccagacatcgaggaagtgaaggatcagagtaggaacaagggcagctctgctgtgcgggtgtaccggatgctgccacccctcaccaggaaccagaggaaagagagaaagtccaagtccagccgagacactaagagcaaaaccaagaggaagctgtgtggagatgttagcccggacactttctctgatggactcagcagctctaccctacctgatgaccacagcagttacaccactcagggctacctgggtcaggacttggatatggaaagggacataactccagcactgtcaccgtgtgtcgtcagcagcagtctctctgagtggcatatgcagatggacattataccagatagcaccactgatctgtataacctacaggtgtcacccatgccttccacctccgaagccgcaacagacgaggatgaggaagggaagatagccgaagaccttatgaagctctttgaacagtctgagtggcagccgacacacatcgatggcaagggatacttgctcaatgagccagggacccagctctcttctgtctatggagacttcagctgcaaagaggaaccagagattgacagccctcgaggggacattgggat

SEQ ID NO: 28143 - DNA, 579 bp, Glycine max
  Clone ID: TF_LIB4167-057-R1-K1-E4
cccgcgtccgctgagttcaaggttaacaccaaataacacatatagtgcagattcataagctttcaaccatggaggatccaaatcaagctcaagaagggtcttctcagaagaaaatgggaagagggaagattgaaatcaaacggatcgagaacaccaccaataggcaagtcaccttctgcaagcgccgcaacggtttgctgaagaaagcttatgaattatcagttctgtgtgatgcggaagttgcccttgttgtcttctcaacccgtggccgtttgtatgagtatgccaacaacagtgttagggccaccattgaaaggtacaagaaggcaaatgctgctgcttcaaacgcagaatccgtatctgaagctaacacacagttttaccagcaagagtcatccaaattgagaagacaaattcgagatattcagaatctaaacaggcacatccttggtgaagcacttggttctctgagtctcaaggaactaaagaacctcgagggtagatttggagaaaggattaagcagagttagatctagaaaggaaattgtgctgcaaaaccacaataattatctgggagct

SEQ ID NO: 28144 - DNA, 882 bp, Glycine max
  Clone ID: TF_GmC1907_2
tggaatcaaaggactgggggttgctttcgcttctgcattctcgatcgccaaggaatcttctgccttccatcgtaacaagaaaatggtgagaaggaagataccgatcaagaagatcgacgacgtaactgcgaggcaggtgacattctcaaagaggaagagtggtcttttcaagaaggcacgtgagctctctcttctctgtgatgctgagatagcactcatagtcttttcacctggtggcaagctcttcgactatggtagttcaagtatgcagaaggtaattgaaaggcatattttacggtcagagcttaaccttgaaaaattagaccagtcgtgtcctacggagcaggtgagatgtaattatgctgatttgaacaaggaatttgcagacaggactcgtgaaatgagacaactgaatggagaagaactgcaaggattgaccctaagggaacttcagaaattagaagaacgacttgactcatccttgaaccgtgtttataaagcgaaggttgaaaattttataaaagagatcggtattcttaaggaaaagggaaaaaaactcatggaagataacatgctgataaaacagatgataaaattaccgaggaatgaaatatgttcggtccagagacatgagcatgaacaaggccagctctttgacacctccctcacgttggggctaccttttcctgctggctcaaagtagagtttctgagcaatgaggggaccatgatgctgcgttttaattagtgtgaaaactgaaaaggaagagtgaatcaccaaggataaaatggttcacgtatgttcaagtataatagattctagtaattcatgtttgttattagtgggaccgtaatggatatggtttagctatgatattatttc

SEQ ID NO: 28145 - DNA, 1201 bp, Glycine max
  Clone ID: TF_GmC1907_1
tactcgagccgaatcggctcgagtacggctgcgagaaacgacagaaggggagattaagattgggaatgggagtgggagaaagataaatgtggcatattcatgtcttcccctcaccattctttctttggagtcaaggactggggggttaggtttgtacttaattacgcttcttaatttcttctttatcgatcacccatgatctacctggctagctagctagggttgcttctgctgcattctcgaccgccaatcaaggattcttctgcgcttccatcttaacaagaaaatggtgagaaggaagataccgatcaagaagatcgacaacgtaactgcgaggcaggtgacattctcaaagaggaagagtggtcttttcaagaaggcacgcgagctctctcttctctgtgattctgagatagcactcatagtcttttcacctggtggcaagctcttcgactatgctagttcaagtatgcagaaggtaattgaaaggcatattttatggtcagagctgaaccttgaaaaattagaccaatcatgtcctacggagcagcttagatgtaattatgctgatttaaacaaggaatttggagacaggattcgtgaaatgagacaactgaatggagaagaactgcaaggattggccctaagggagcttcagaaattagaagaacgactggtctcatccttgaaccgagtttataaagcgaaggttgaaaattttacaagagagatcgatattcttaagcaaaagggaaacaaactcatggaagataacaggctgatgaagcagaggataaaaccgaggaatgaaatatgttcggtccagagacacgagcatgaacaaggccggtcctttgacacctccctcacgttggggctatcttttcctgctggctcaaagtacagagtttctgagcaatgaggggaccatgatactgcgttttagttagtgtgaaaaggaagagtgaatcaccaaggataaaatggttcacgtatatatatggtgggtcatctctaagtttagaacaatgacattctacgattgccccaactgaatatttattttctagtaattcgtgtttgttaattagtagaaccttcttaatggatatggtttaggtatgatattatctccatatttgtgaggaaaatgattttagttttccttcggaaaaaaaaaaaaaaaaaaaaaaacgaccaa

SEQ ID NO: 28146 - DNA, 694 bp, Glycine max
  Clone ID: TF_GmC940_2
agcacctgaagcacatcctcttctggatgctaaagaggaaactaacatgctaaaacaagaaatccaaacattgcaaaagggtatcaggcatttgtttggaggaggaataagactatgccaattgatgaattacaagtgctagagaagaatctcgaaacttggatatatcatattcgttcaatgaaaatgaacatcatgttacaagaaattcaagctttgaaagataaggagggaacacttaaagcggcaaataaatatctccatgataagattgtggagaatactgcaatttctaactttgctcaatttgctactgatacttcgaattcgtacccgctaatcatacaagatgaggtttttcaactctattaaatgagttgtttctacaatgctttgtttacatgctttaataagggaaagaatgacgactgggctatgcttcataacattaaaaagtgaagtatatatgaagcatgaacattgtgcctatcttacttaccaaatggtgtgcaagctttgcaataatttgtaacattaatattgtggcaacctaatatttttatagataagtttttaatgtaaaagacagaaaagtgtggtttctgactattaatttttctctgtcatgatcagtaatgtaatatgtttgtataatgttttctcttcgtggaaatcacaattatttaagcagaat

SEQ ID NO: 28147 - DNA, 681 bp, Glycine max
  unsure (1)..(681): unsure at all n locations
  Clone ID: TF_jC-gmXLIB3563P005ca07a2
ctttctctgtcttctgttttcctttttctcgagaaaattgtgttagggtttctgtgattgagcctgcaaacacttccttgagggcacaaaagattccattgtttgcttctttcagattaatttttttgtcagttcagatcttcaagaagaagaatccagagaagctatatatacatcatcgttgttctttgccaagacaaagaagaaaaatggtgagggggaaaactcagatgaagcgcatagaaaatgagacgagtaggcaagtaacgttctccaagagaaggaacgggttgctcaagaaggcctttgagctttcggtgctgtgtgatgctgaagtcgcactcatcatcttctctaccagagggaggctttatgagttctccagttcaagatgctccagtataaacaaaacagttgaacgctatcaaaggaagatcgaggacctgggtgtcagcaacaaaggaatccatgaaaatacacagcatctgaaggaagttgatatgagcatggcaaagaagatcgagcatctagaagattcaagaagaaagcttttgggagatgaattggataaatgcagtattgacgagttacaacagctagagaaccagctcgaacgcagcctggacaaaattagggcaacanagaatcaattgttcaggaagcgaatcgagaagctaaaag

SEQ ID NO: 28148 - DNA, 689 bp, Glycine max
  Clone ID: TF_LIB4390-047-R1-K1-F9
gtgagtatttaaaattaaacatgggaagaggaagggttgttctggaaagaatagagaacaagatcaaccgtcaagtaacattctcaaaacgcagaagtgggttgctgaagaaggcctttgagctttctgtgctatgtgatgctgaagttggccttatcatcttttctagccgtggcaagctttttcagtacagcagcactgatattaccaaaatcattgagaggtatcgccaatgtcgttacagcaagtcacactggtgattcattggaacacgattcacaggcattttcaaggagaagaccttgagccacttagctttaaagatttgcagagcctggagaagcaactagacataacgctcgcactaactcgacagcaccaaacgaagaaactcatggcacgagcggatgaattacgcgaaaaggtaagttgttaaatgctaattaacttgtttgattttactccgtgtgaagtttttctgtgaatttctctctatgtttatgttttttcttgtttacaactcggggctgcagaagttattggctatttgtttttttttttttaaaaaagttattgtttatcttattatagagagaaaattgatatactttttaaagaagtggggctagacgtccaagtctctatcatccattataaaattggtctctttcataattagattttaacat

SEQ ID NO: 28149 - DNA, 4097 bp, Glycine max
  Clone ID: TF_GmC109_1
aagaaaatttgaagaaactgaaagaggtgaataggaatcttcgtaaggagattaggtatacagatctttcttcacttcgatcgatctccttgagaatgggagattgtatgaacgatctaggcatagaagatctcaagctccttgaggaagaaatggacaaggctgccaaggttgttcgtgagtgtaagggatatcaagtgtgctaatatactggttgatgtaagtgggcaagtcaagcttgcagattttgggttggcaaaggcaacgaaatttaatgatgttaaatcaagcaaaggctctccatactggatggcccttgaggtttttaacttaaagaaccaaggtggttatgggctagcagttgatatatggagcttagggtgtacagttttggagatgttgacaaggcagcctccttattctgagttggaaggagtgctgcctcctatagcacaaaagcacgtgattcaactcatactttctcacgaaagaaacttcagggctgatgagctaatggagttctacaaaatttgaaactctaagaaattcttgcatataattgaggattcccctgttttccctgttatatgacagtaagaggtaatagccttctcagaatattgtgaaaacaaatttgtcattgaaccagttgaagttattttttctgatggtaactcaaacatataccctgatttatctgtctacaatatggaagtttctctatcttacattaaaaaaaaaaatgaatcacagcttcttatcaatcataatgcattctttttatttaaccctcattggctgaaaaggaaattttttattaaatgaaaattatatttcaggaatatggtaaaataaattaaccctttgaaaaaaatcagtaaaattttgcaggtataataaataaaaaagaaaaattttattatctggaggtccacagctgattggttattagatagtgcggtccctgatgagtcttgtgactagatatgtgaaatggagaataagaagacggtctgcatttccaccaggagagagctaaggtcatatacttagagctgagctgttcgttctttttgtcaagcaatagttattagagcaacggtttcgagtatttatagtcacaggcactctcccttgacatgtgtaaatagagctagccaagaaagggaagtgtgcacctaacaaaggaagcagcctttattgtattaattgcttgcactttctcttcaattagagcaacaatgaacattcacgttcgatcaattggagcattttcgtagtttataattatgctgattcaggaaagaaaaagtatatactttacgttggattatttcctattactaagcttggtggtagttagtttggcttgatggccctagaaatagaatcagctcgaacagctacacatacgccatttgcatttatttgatacttctaccacttctacatatgtttagctgttgcctatttacataatcaaattgtattataaaaagttaaaaacggttcagctataaatcaaaaagaactgttggagggcctttttgttgttccaaggggcgggctggatgccccaaatgaatattggtggaataaagacaagttctgtagaaattgagcgtgtctgtgataggcccgccgaaggcattttggagacagctgcaatcagtgttgctcctgcaaatggaggcccgcaacaactggttatatttgcagttttaaagaaaggatccaattccaatgcagaaactgccccctggctcccggttgcacttgtactcactcaatccgagaccaaaacggcgccatgcctaccgtcagtgtggggcgggatcgcctgtttgcggctctaggaaagacttacacgcaagaggaattcgaagacttgtgcttcagtttcgggatcgagcttgacgacgttacgacggagaaggcaattgtgagaaaagagaagcatttggatgaagaagaagctgatgaggacgaagaagttatctacaaaatcgaagttcctgccaacagatatgacctcctgtgccttgaagggcttgctcaagccctccgagttttctgtgagttccaggagattcccacttacagactgtccaagatcagtaaggatgcaatgctgaaaatgcacgtgaagccagagacttctctgattcgtccatatgttgtatgtgctgtattaagaggtataacttttgataaagcaagatacaacagctttatcgatctccaagacaagcttcaccaaaacatatgtcgccgaagaacccttgttgccattggaacccatgatctggatacattggaggggcctttcacctatgaggctttgtcttctggaatggcaaattttaacctcctcaagttccataatttttatactattacagctgagattgcattcctaaattcttaagagttaacccaagcaagggttatacttatgccaggcttttggaccatttatttgtaaaacaagaattattaactcccctaagtcctgtttcacataggatatatagtagaattgtgtgagagctgtcatgcagctctaacattgctacggcaactggctggattgagcaattatttttaattttttattcagacaaatcgtgagatgaagaactcagtaatagaatggagtaagataccggtagagttctgtggttttgaagatatttattgtgttggacaatcagatgtacctgtgattctttcagatacacatgctataatcttttacaaaataaagcttcttggtgctttttgctttgtccatctatatgtaatagacaacattaacattcctgatccctgctcctttgttgaacttaaaatcgaaagtttcctataaagattatctgtatcatttggtagggaatcaagatgctcaactgcttgagtgactatatgggagtcaaaacacttcgccgtattaaggactaaactgatgttgcgaaggcttatggatctgatgctctctaggttgagtcagtagttgataataaggcccctaagattttccctgcttcctccgttctactttctttggatcatctcagtgaacgtatcggtaagtaggttgctttaattggtttcacagaggtcttgacatttatactctgctctaaaaaggaaaactttgccatgcttaaccgcaaagatgataaatctaaagcagctattattggaaaccctaggtcttcagactttgaggctgtgcggactagtcttatgcctggcattttgaaaactgttgctcacaacaaggatcatccaaagcccataaagatttttgaggtcggtgatatagcagttttgcatgaacaaagagatgttggtgcaaaaaatcttcgccaacttgctgctctgtactgtggtgctaatgctggatttgagataattcatggcttggtcgacagagtaatggaaaagaatggggttccctttgtttcacctggtgataaatcaggttattatattgagcggtcagatgagcctgagtttcttgctggtagacaagctagaatcatttacaaaggaaagcatattggcacttttggcattgttcatcctgaggtattaaacaactttgacattcccgatccctgctcctttgttgaacttaacatcgaaagtttcctataaagatctgtatcagttggtaaccccatttgtcccattcgcccttttgaatatatttattcatcaaactggggaatcaagatgttcaactgcttgagtgactatataggaatcaaaacacttcgtggaacttagaactacactagctcgggaccggaatgttactaatatgccctaaattagagtgtttagttaattatatacctgtatcattttcctaagtttctctccgttgttaaatgtttagaacatcataagctacgaattggttagtagggataatctcgaccataaattatagttatttttttaaaacagttgattttggccttaaaaccaagacagcaaggatatttattcgtttgaaaattttgtcaatacaaaagtgagtcaccagccgtgtctacttctgcggtaggattaaaatgccttttgtt

SEQ ID NO: 28150 - DNA, 1123 bp, Glycine max
  Clone ID: TF_GmC1414_1
ggtgggacaaagagagaaaaccgaatagaacagagagagagagagagagagataatagtagaaggtcggagatagtaaagagagaaatccgaatagaaaaagaagctagctagggtttcggcgcgaagaagaatggggaagaagaaggtggagataaagcgaatcgagaacaaaagcactcggcagataacattctccaagaggcgcaatggattgatgaagaaagctcgcgagctatccattctctgcgatgcgaaggtggcgctgctcatcttctccagcaccggaaagctctacgagctctgcaacggtgacagtttggccgaggtcgtgcagcaatattgggatcatttaggagcgagcggtactgacacaaagtcgcaggaactatgctttgaaattgcagatatctggtctggttcagcgttttctcaaatgatcaaaaggcacttcggtgtttctgaacttgagcatctgagtgtgtctgaccttatggaactagagaaactgactcatgctgctctttcgcgaatcagatcagcaaagatgcgattgatgatggaatctgtagtgaatcttaagaaaaagattgaggcactagaaaaaactaatgacgtcaataacgtggtgacacggtctattgactgtgatcaaacagatggggtgacgcataatctgttcccaggtctctaatggagctgaaagccactactctgggtctaacttgcacactcaacccttgaatttccaagtgtgtgtttaatacatgcatagggaaccatgccatggtctagctacttgccttttattatttctattttggttgaaacatggagcatcttgaagataatgtagcctggggaactttgcttcagctactactttgtgcctaattaatttataataagtgacattagatgccatatggtattataagtctcataatgctaaaatttgggaacggttcacggtgaaagtaatggaaacaatcatgtggagggctccctggtttgtaaatgcagctgaaagccaccactatggatataacttgcacgaattttccaattgtgtgcttaatacatgcatagggaactatgccatggctgggctacttgccttctgt

SEQ ID NO: 28151 - DNA, 1029 bp, Glycine max
  Clone ID: TF_GmC1834_3
ctgttttggaccatggacttggtttttaccaaatcaagaaaaggatgaggtttcaatttttctattaccataaaacaattttgtttcttaatatggtgaggctgggggaatcaattggggataggtggatgaataaggaaagcttggtctgattagtctatactatatgccttgctattcccctttttctgagtttctctctgcacttcttgctagctaccctctcttttggggtatttcttttcattctccaaaaactcttcaattttccttcccttttctgtgctattctctcctcactggtcaaaaggtttgtgggattttgctaatttggtgcaaatctgattcctttgacaaatccctcttgatctcctggcttattgaaaactactacaattccgagttgctttttttccctagttgcttttctgggccttgaaatcttgcttggagaaggctcaattttggtggaaacctctaccacaagaaagcatagtttttttgggttaatcatacttgaggtgtttagagatggtgagaggaaagactcagatgaggcgcatagagaacgccacaagcaggcaagtcaccttctcaaagcggcgtaatgggttgctgaagaaggcctttgaactttctgttctttgtgatgctgaggttgctctcatcattttctctccaagaggaaagctttatgaatttgcaagctccagcatgcaggacacaattgaacgctaccgcaggcataacaggagtgctcaaacagtgaacagatctgatgaacaaaatatgcagcatttgaagcaagaaacagcaaacttgatgaagaagattgagcttcttgaggcttcaaaacggaagctcttgggagaaggtttggggtcatgctccttagaagaactgaacagatagaacaacaattggaaaggagtgtaagcaatgttcctgcaagaaagaatcaagtttacaaggaacaattggatcaactaaaagagaaggaaagagctctatatgctgaaaatgctaggc

SEQ ID NO: 28152 - DNA, 564 bp, Glycine max
  Clone ID: TF_GmC59564_1
tgcccatctttcccctaatgctggtggtgggttcagttttttggtgaggaaggataataaagaaggaagctttttttgtgtgagagaaggaagaggagaaaagaaggcatggggagagggaagattgagattaagaagattgagaatttgaacagcagacaagttaccttctccaagaggagaaatgggttgttgaagaaggccaaagagttgtctgttctctgtgatgcagaggttgctgtcatcatattctccagcactggcaagctttatgagttctcaaacacaagcatggagcataccctttcgaggtacagtaaaggcgcagaatcagattctgcagagcaacctattgatgtgcccccaacagatgttatggctgtggagcctgatactaaccttttgatggaggaaataacaaagcttcgatcagcatacttaaggatgatgggtaaggagcttgatggattgagccttaaagaactgcaacaactagaaaatcaactaagtgaagggatgcaatctgtcaaagacaagaaggaacaagtacttgtggaacagctt

SEQ ID NO: 28153 - DNA, 620 bp, Glycine max
  unsure (1)..(620): unsure at all n locations
  Clone ID: TF_GmC182_5
ctttcctctctctctctctctctctctagggttccgagttggaagttgaaagtgttgaactatctctagctagcttttcacaaatttggttgcacttgcaactgaggcaggaaagaggggcacgagaggaggaagaggaaagagaagaaaaaccaagaaaagtggagaaagggataggtgttgtacagaaatagaaattaaaattgagtgaaaattaaagagaagaaggagtgatagggagatatgggtaggggaagagtggagttgaagaggatagagaacaagataaacaggcaagttacgtttgcaaagaggagaaatgggcttctcaagaaagcctatgagctatctgttctctgtgatgctgaggttgccctcatcatcttctccaaccgtggcaagctttatgagttctgtagcagctctagcatgctcaaaacacttgaaaggtaccagaaatgcagttatggtgctgtggaagttaccaaacctgccaaagagctcgagagcagctatcgtgaatacttgaagctgaaagcaagatttgaatcacttcaaaggactcaaagaaaccttctaggggaagacctgggcccactgaataccanagaacttgagca

SEQ ID NO: 28154 - DNA, 1508 bp, Glycine max
  unsure (1)..(1508): unsure at all n locations
  Clone ID: TF_GmC7654_3
aattcggctcgagctcgagccgaatcggctcgagtacggctgcgaagacgacagaaggggaaaccaaactcttgagaaaacgctgattagtgattcttcctctgaatgattcagaatgaagaaccgttgttatggttagttgtgtgacctaacatggagaacgaggaagccaaagaacacaaacggatctgccaagggaaatagatgataatgtaggttatgaatatgcagaatcttaaagggcagagatataatttgaactgacccatcatacctttttcatgcggacaccctttaaactcatctccagttggttttccagattttgtagttctttaatacccaaacccgtaagttcttcccccattaattgcctgcttttgcctgcagaaaaaaaactgaaatcccgggtcgacccacgcgtccggttttaccctactgatgacagtgtcgcaatagtaattttacctagtacgagaggaaccgttgattcgcacaattggtcatcgcgcttggttgaaaagccagtggcgcgaagctaccgtgcgttggattatgactgaacgcctctaagtcagaatccgggctagaagcgacgcgtgcgcccgccgtccgtttgccgaccagcagtagggggcctcggccccccaaaggcacgtgccgttggtgaccctcgtgaggcggattagccctacgagacgccttgaagcgcaattcccatcgagcggcgggtagcacgggtttccaaaaccctaatttatcgaaaggtagggttttgcagagcctcctcctccgttaccagtttcttcttctttatcctctctcctttcttcttccattcctctaacctaagatgggcaagtcaagcaagaaatcagctatcaaggttgacgctgctccagctgtggttccgccatccaagtctgccaagaagggaggcaagcgacaagctcaagatgaaattgagaagcaagtgagtgccaaaaaacagaagatagaggaggttgctcagaagcaaaagaaggaggccaaggtgcaaaagaaggaggccaaggtgcaaaagaagaaggaaagtagttcagatgattcttcggaatctgaagaggagaaacctgcacccaaacctgtactttcaaaaaaggtacctgctaagaatggtgctgccctgccaaagaaagacaagccagtctccagttcttctgaagatgactcctctgacgaggatgaagtgaatgcaaagaagccacacaaagtggttgctgagaaacaaaagaatggagcaaccgtgtaaaagaagcatatcgtataccactctaagaaggaaagtagttcagatgattcttcttcagactctgaagatgagaaacctgtagcanaagctgccgtaccttcaaaaaagacacctgctaaaagcagcaatataagtacccccaccaagaaagcaagccagctagcagctccagttcttctgattcatctgaagatgactcttctgatgaggatgaact

SEQ ID NO: 28155 - DNA, 377 bp, Glycine max
  Clone ID: TF_jC-gmX3050018F05sg15D17b1
cccttattgcagccagaagacgacagaaggggggaggggaactggagggcctaagccccaaaaacccccagaaacaggagcaacagcacgaaagcgcactaaaacacacaagaccacggaagaaccaactgacgcatgaaacaataccagagccacataaaaaggaaaaggccctacaagaacaaaacaacactctcgccaagaagacaaaggagaaagagaaggcactagcccaacaggcacaaccggagcgaattggtgatgaaggggatcagacttcctcagcccaagaaccccaaccaccggtgacaacaaacattagaacccccacacaaaccagaggagaaggagataaccaaagaaccccaactccaacc

SEQ ID NO: 28156 - DNA, 774 bp, Glycine max
  Clone ID: TF_GmC1905_2
gctcaggcggcgggcgggttgatgaaaaccctgtggaatttttgcattccaggacatccttggcgaaggtcttagctctctgagtctaaaggaattaaagaaccttgagagtagactggagaaaggtttaagcagagttagatccagaaagcatgaaactttgtttgcggatatcgagttcatgcaaaagcgggaaatagagctgcaaaaccataataattttctgagagctaagatagctgaaaacgagagagcacaacaacggcaacaggatatgataccgggaactgagtgcgagtcaaccatacctaattcacaatcatatgaccgcaatttcttccctgttaatctcatagattccaataataatcaatattcacgtcaagaccagactgctcttcaacttgtctgatcataagctggaaagcgattttaaattatgcatggcacaacctttctatggtttcgtctatttgaatagctagctagttacctttcaagtgttgagggagctagcccatacatcgccctatatatgtttcgtgaagaacgagtgcccttagaaattcctctgctagagttattccaacggagaacaagagaaaagctagagtcaatatttaatttgtaccaatacatcatatgatattgtttatgtatctttcaatatatatagtttctattcagtcctggcatattgtatttttatgtttggttgaccatactataatattataaatgcttatttcgaaaaaaaaaaaaaaaaaaaacacc

SEQ ID NO: 28157 - DNA, 947 bp, Glycine max
  Clone ID: TF_700889004_FLI
gttttctgttttggaccatggacttggtttttaccaaatcaagaaaaggatgagcttttttgggccttcaaatcttgcttggagaaggctcaattttggtggaaacctctcacacaagaaagcatagtttcttttgggttcattctacttggtgtttagagatggtgagaggaaagactcagctgaggcgcatagagaacgccacaagcaggcaagtcaccttttcaaagcggcgtaatgggttgctgaagaaggcctttgaactttctgttctttgtgatgctgaggttgctctcatcattttctctccaagaggaaagctttatgaatttgcaagctcaagcatgcaggacacaattgaacgataccgcaggcataacaggagtgctcaaacagtgaacagatctgatgaacaaaatatgcagcatttgaagcaagaaacagcaaacttgatgaagaagattgagcttcttgaagcttcaaaacggaagctcttgggagaaggtttggggtcatgctctttagaagaactgcaacagatagaacaacagttggaaaggagtgtaagcagtgttcgtgcaagaaagaatcaggtttacaaggaacaaattgatcaactaaaagagaaggaaagagccctatatgctgaaaatgctaggctgtgtgagcagtatggtggtatccagccacagccagcaacaaaggatccgaaagaaattcaaccctatgcagaaagcagtccaagttcagaagtggagactgaattgttcattggactactcaggtctagctattgaacataatttaatccttgcctatgcaaatatcaaataagaagcccaactgcaatgtataaatatcacatgtttcctaatactgagatgaataatattatcgcttgtattatataaagaactttctagccttatgattagggtttaattatt

SEQ ID NO: 28158 - DNA, 1433 bp, Glycine max
  Clone ID: TF_GmC1834_1
attttgtttcttaatatggtgaggctgggggaatcaattggggataggtggatgaataaggaaagcttggtctgattagtctatactatatgccttgctattccactttttctgagtttttctctgcactcctttgctagctaccctctcttttgggcttttttgggccttcaaatcttgcttggagaaggctcaattttggtggaaacctctcacacaagaaagcatagtttcttttgggttcattctacttggtgtttagagatggtgagaggaaagactcagctgaggcgcatagagaacgccacaagcaggcaagtcaccttttcaaagcggcgtaatgggttgctgaagaaggcctttgaactttctgttctttgtgatgctgaggttgctctcatcattttctctccaagaggaaagctttatgaatttgcaagctcaagcatgcaggacacaattgaacgataccgcaggcataacaggagtgctcaaacagtgaacagatctgatgaacaaaatatgcagcatttgaagcaagaaacagcaaacttgatgaagaagattgagcttcttgaagcttcaaaacggaagctcttgggagaaggtttggggtcatgctctttagaagaactgcaacagatagaacaacagttggaaaggagtgtaagcagtgttcgtgcaagaaagaatcaggtttacaaggaacaaattgatcaactaaaagagaaggaaagagccctatatgctgaaaatgctaggctgtgtgagcagtatggtggtatccagccacagccagcaacaaaggatccgaaagaaattcaaccctatgcagaaagcagtccaagttcagaagtggagactgaattgttcattggactactcaggtctagctattgaacataatttaatccttgcctatgcaaatatcaaataagaagcccaactgcaatgtataaatatcacatgtttcctaatactgagatgaataatattatcgcttgtattatataaagaactttctagccttatgattagggtttaattattgatatgtttgcctttcctcatttctgaagcccttttcatatataatagcatgcacaaaagggatctaattcaattagttgaacatggtatgtgagtgatataaatcttttgataccgtcttcgatttccatcattttatgattaagcagcaaaggatcggaaagggattcgaccctatgcagaaagcagtccaagttctgaagtggaggctgaattgttcattgggctacccaggtctatctagttagagatattttaatccttgcctagtatcaaataacaagcccccctgcaatgtataaatatcacatgtttcttaatactgtgggatgaataagtattatcgcgctatactatataaagaactttccaattctatgatt

SEQ ID NO: 28159 - DNA, 1625 bp, Glycine max
  Clone ID: TF_GmC182_2
ggaagacttaggcccactgaatatcaaagaacttgagcatcttgaacggcaattggattcatctctaaagcaagtgaggtccacaaaggtaataatggataatttatacataaaaaatgtgttaagtttttggcaaattaatatatacattaagcttattaatgtagttcttgatcagtagttgcagcagcctagcgtaatttctctatttgatttaagcatctttccgtttttccgtacaatttgtttttgccaatactatggccgatgcaacattagaataggatttatcattcattaaagattttggatatttttatatgtgaagaaaatgtactgttaaggagtcatatgtaacatattcttctttttgtaatgaaaaaaaataatgcatgtggtaaatatatgatttattgtgtttgtatcctttaatttttcactactgtgtaattttcttaagaaaagcttattgtgactccttttggttacttggcactgtctgaaaaaccaatttgcagacacaattcatgctggaccagttatctgatcttcaaaccaaggagcagatgttagtagaagcaaacagatccttgacagtgaaggtaattttattccattatcctcgatgttcttcccctacctatcaagatcgattttgtaacacaaatatatatccagcttagataatttgatattctttttagttttaatcagtttgggagtgtactgtactaccctgcatctgtattttggcctatcagattggatacctgcaagttaaaattttcttcaaaatagtcctaacattgttttaaggtggtgaaacaaaaataaataaaaaccttaaggtggaaatattattctgcatattgtcgatataaataatcaatcttagtcattttacattaaggtcctctgctgatgacatgattcatgtctaactacttgttgtcaataggggaaataccaaagaactgagcatcttgggcaattggattcatcaaagcaagtgaggtaaagacacaattcatgctggacagttatctgatcttcaatctaaggagcagatgttagtagaagcaaacagatccttgacagtgaagctggaagaaatcaattcaagaaaccactacaggcaatcatgggaagctggtgatcaaagtatgccatatggtggtggtggtccagagaattctcactctcatcagggcttcttccaaccattggaatgcaaccctacactacatattggtcctgattacaggtacaatgctgtagcttcagatcagataactgccacaactcaacctcaacaagtgagtggctttattccagggtggatgctttgaactaattaggctcagtgcattcaggtggagacataaaaaagcaaacaccttacaaaagggcaaaagccaaaaatgcatcttggtgttggcaaggtgtaaatgcaaccctgcttctacagttattttggtgtataagaaactgatgttgtgacttgttcaaacttttgagactttttagccatagacatatatggcaatttataacattaggtatcttttaaaggatccctttttattattaaaatatccgagcgaccggtttcaatttttctatac

SEQ ID NO: 28160 - DNA, 1137 bp, Glycine max
  unsure (1)..(1137): unsure at all n locations
  Clone ID: TF_GmC132_1
ccacgcgtncgcccacgcgtccgtacggctgcgagaagacgacagaaggggatagcgcagtttcatttctttggattagaaatttttcccaaagctgatcgagaagccagccaggccaggagttgaagaatgggaagggggaagatcgaaatcaaaagaatcgagaacacaacaaatcggcaagtgaccttctgcaagagaagaaatgggcttctgaagaaagcttatgagctgtcagtgctgtgtgatgctgaagtttccctcatcgtcttctccagccgtggccgtctctatgagtattccaacaacaacataagatcaaccatagagaggtacaaaaaagcctgttctgatcactcaagcgcgagcactaccacagaaatcaatgctcagtattatcaacaagaatctgctaagctgcgacagcaaatacagatgctgcaaaattctaacaggcacctgatgggtgatgccttgagcacactgactgtgaaggaacttaagcagttggagaatagacttgaaagaggaatcactagaatcagatctaagaaacatgagatgctattggctgaaattgaatactttcagaaaagggagattgagctggaaaatgaaaatctttgcctccgaactaagataactgacgttgagaggattcagcaagtaaacatggtttctggaccagaactgaatgtcattcaggcattagcttcccgtaacttcttcaatccaaacatgttggacggtggaactgtttaccctcagacagataagaagattcttcatcttgggtgatcaataatatgatcttcgctatagcctatagctatctatccaattagccggaggctaaatgcattattattactactcttttgattgctcattaactagaccaaatgatctatatacattacatatgaattatggattatggatacttatgtttaatgattgtatgatatcataacaatatgttagaaataataattaaaaaatagagttgtgttagaaaaaaaaaaaaaaactggagtgtgtaaatctttgcctccgaaaaaaaaaaactgacgtggagaggattcagcaatgtaaacatgggttctggccctgaactgaatgcccgttcacgcatta

SEQ ID NO: 28161 - DNA, 982 bp, Glycine max
  Clone ID: TF_GmC132_2
cgatcattttcctatacttcgttttttatgagtctgatctttttgttctcagacttatgcatcttcttgtgctaaaacaaaaggagttgaagaatgggaagggggaagatcgaaatcaaaagaatcgagaacacaacaaatcggcaagtgaccttctgcaagagaagaaatgggcttctgaagaaagcttatgagctgtcagtgctgtgtgatgctgaagtttccctcatcgtcttctccagccgtggccgtctctatgagtattccaacaacaacataagatcaaccatagagaggtacaaaaaagcctgttcggatcattcaagtgcgagcactaccacagaaatcaatgctcagtattatcaacaagaatctgctaagctgcgacagcaaatacagatgctgcaaaattctaacaggcacctgatgggtgatgccttgagcacactgactgtgaaggaacttaagcagttggagaatagacttgaaagaggaatcactagaatcagatctaagaaacatgagatgctattggctgaaattgaatactttcagaaaagggagattgagctggaaaatgaaaatctttgcctccggactaagataactgacgttgagaggattcagcaagtaaacatggtttctggaccagaactgaatgtcattcaggcattagcttcccgtaacttcttcaatccaaacatgttggacggtggaactgtttaccctcagacagataagaagattcttcatcttgggtgatcaataatatgatcttcgctatagcctataactatctatccaattagccggaggctaaatgcattattattactactcttttgattgctcattaactagaccaaatgatctatatacattacatatgaattatggattatggatacttatgtttaatgattgtatgatatcataacaatatgttagaaaaaaaaaaaaaaaaaaaaaaaaaaaagcggcc

SEQ ID NO: 28162 - DNA, 832 bp, Glycine max
  unsure (1)..(832): unsure at all n locations
  Clone ID: TF_LIB5068-015-A1-XP1-H9
tcgggggatcgagaacacaacgaataggcaagttaccttctgcaaacgccgtaacggattgctgaagaaggcttatgaattgtctgttctgtgtgatgctgaggttgctcttgttgtcttctcaagccgtggacgcctctatgagtatgccaacaacagtgttagagggactatcgaaaggtacaagaaagcatgtgctgcttccacaaatgcagaatctgtctctgaagctaatacacagttctatcagcaggaagcgtccaaattaaaaagacaaatcagagacattcagaatctaaataggcacatccttggcgaaggtcttagctctctgagtctaaaggaattaaagaaccttgagagtagactggagaaaggtttaagcagagttagatccagaaagcatgaaactttgtttgcggatatcgagttcatgcaaaagcgggaaatagagctgcaaaaccataataattttctgagagctaagatagctgaaaacgagagagcacaacaacggcaacaggatatgataccgggaactgagtgcgagtcaaccatacctaattcacaatcatatgaccgcaatttcttccctgttaatctcatagattccaataataatcaatattcacgtcaagaccagactgctcttcaacttgtgtaactgatcataagctggaaagcgattttaaattatgcatggcacaacctttctatggtttcgtctatttgaatagctagctagttacctttcaagtgttgagggagctagcccatacatcgcccctatatatgttcgtgaaagacgagtngccttagaaattcctctgct

SEQ ID NO: 28163 - DNA, 270 bp, Glycine max
  Clone ID: TF_uC-gmflminsoy115h02b1
cctcagggaagaggatttgggacggggggcttgtgaacctaaacggcgatttttgacagactccagattgtagattgacagcttgcaaactgggcctaggccacatgaagggagaggatattaactccgttaactacaaggagctgatggccttggaggatgccttagagactgggctagtcagcgaccgagataaacagggggctgtctactggatgagcatgagacacgacaagatcttggaggaggagaacatggaacttactttta

SEQ ID NO: 28164 - DNA, 900 bp, Glycine max
  unsure (1)..(900): unsure at all n locations
  Clone ID: TF_GmC157106_1
ggctcgagcttcctctctagctagggtttccttctttatacaaaacacaacctaacaagtaacaaccttctttatatgtacttattccttaaccctcctgttaccttcttttgctttcgcgttcgttttctctttctcggtcttgctttgctcagaattgctagttacgtgggagaattaagcaccaagaagatgggaaggggtagggttcagctgaagcggatcgagaacaaaacaagccagcaagtgacgtttttcaagcgtagatcgggacttctcaagaaagccagcgaaatctctgtgctatgtgatgctcaagttgctttgattatattttctaccaaaggcaaactttttgagtattcctctgaacgcagcatggaagacctccttgaacgttacgagagatgtagccatacagcacttgctggagctaacaatgtcgaatcaccgggattttggtctttcgaacatatcaagctcaccgctaaagttgaagtcttggagaggaacataatgaatttctttggaaatgatctggatcccttgagtttgaaagagcttcacagtttggagcagcagattgagacatctctgaagcgcatccgaactagaaagaatcaagttatgaatcaatccgtctcagacctgcataaaaaggcaaggacattacaagtgcaaaacagatggctaggaaagatgaaggagaaagcgaagacagtgactgaaggtccacacaacggcccagaaactctaggctttgattcatccacactcaacttatcttctccacagctaccaccaccaccatcaccacanagactggttccttctctaactctcagtgagacaatgcaagggaggaacaccagttggaagaaacgggtgaaggctcaaaca

SEQ ID NO: 28165 - DNA, 1107 bp, Glycine max
  Clone ID: TF_GmC734_1
ctcgagccgaatcggcctagaaaatgaaaagatactcatgttatatatgcgaattcgtcacataacaacacacccccacttactcttctcatttcattcttcttccttcttttgtcttcccttagcttagtttgaagatcatggggagaggaagggttcagctgaagcagatcgagaacaaaatcagccgccaagtgacgttttccaaaaggagaactgggctgcgaaagaaagctaatgaaatctctgtgctctgtgatgctcaagtggcactgattgtgttcaatgctaaagggaagctttttgagtattcttctgaatccagcatggaaaacgtcctggaacgatatgagagacatactcatatagggaaacttgttggagatggtgatgaatcacagggaaactggtccttacaatgcttcaagctcaccggcaaagttgaagtcttagagaggaacttgaggaactttgtgggagaagatctggatcccttaaacttgagagagcttcagagtctagagcatcagcttgagacagctataaagcgcatccgaactagaaagaaccaagttatgaatgaatccatctcagatctgcagaaaaaggcaaggcaattgcaagagcaaaatggcatccttacaaagaagattaaggagaaagggaaggaagtggttgaacgtccacactgcggaccagaaaccttaggtctaacttgtcctccagagctacaacgacagcaaagagtatttccttctttaacactctgtgagactttacaagcagggcatctggaggaagttgttgaagcacgaacggttcctactgccagcactcacatcccaccatggatgctgcatccatttacaagataaatctgcatgtgacacgttatgtttgtgacacatgtgatgaatgttagaagcataagttatatatctctatatgtcaaaaacttaatgttatatagctaagtgttaagtttgataactgctcatccttgtaagtactacatggtgcaagagtgcaagtgattcttgcatgcaaatgtcaactacatttattatgaatcaatattaataatagaaacatgtagttatttttgac

SEQ ID NO: 28166 - DNA, 1137 bp, Glycine max
  Clone ID: TF_GmC528_1
ctctttctctctcttctgttttcctttttctcgagaaaattgtgttagggtttctgtgattgagcctgcaaacacttccttgagggcacaaaagattccattgtttgcttctttcagattaatttttttgtcagatcttcaagaagaagaatccagagaagctatatatacatcatcgttgttctttgccaagacaaagaagaaaaatggtgagggggaaaactcagatgaagcgcatagaaaatgagacgagtaggcaagtaacgttctccaagagaaggaacgggttgctcaagaaggcctttgagctttcggtgctgtgtgatgctgaagtcgcactcatcatcttctctaccagagggaggctttatgagttctccagttcaagaggtgcctaagaaacttttaattcgttgtctattggagatgctccagtataaacaaaacagttgaacgctatcaaaggaagatcgaggacctgggtgtcagcaacaaaggaatccatgaaaatacacagcatctgaaggaagttgatatgagcatggcaaagaagatcgagcatctagaagattcaagaagaaagcttttgggagatgaattggataaatgcagtattgacgagttacaacagctagagaaccagctcgaacgcagcctggacaaaattagggcaacaaagaatcaattgttcaggaagcgaatcgagaagctaaaagaagaggaaaagtgcttactcgaagtaaataaacgcttacgtgagcagtaccggattgaacgacaacgttgtttgagtgatcaggatgtcgaattcgccacaaaaaaggagggagaagaggtggagacggagttattcataggaagacctgagagaagaatgccgttaaagttgaaacctacaacatatagtgctcatgcatacatagcgtaatctaaagattaaaaattactaatgcccatacaaacgctgctagcttccttgcagactgttatattcatgtcttattaagatatgtaattcttgttgtaccccaaatcacaacggcggttgtgaacgcctacttaaataatttatgtacaacagtcattatttcaaaactgttcgttagagtactatatatatcagtttggaattttttt

SEQ ID NO: 28167 - DNA, 1827 bp, Glycine max
  Clone ID: TF_GmC176_1
atcaagtgaaacaatcgttgttggcgatgtgaagtatttctatttaattgagaatgggtacacataaaatgtactaaaattaagcaaattggaactacctagttactggggcattagatgcgagatctaggaactgcgttgtaatcaatgctgtggttactttctagttctacttgttgtgtttgctttacaaaaggggtgataacatattcttaatatctttcattactcgagccgatccatcataggcataccatacctactaaaactcagcgacagatcatatcatatcatgtgataagctagcttatatatacacacaaacaagagggtagaagggaaaactcttgcagaaaatagcttgaaaaaaatatatattctataaacaattatgctttttccatctggtattctgaaaaagcaagtttaatttatttgtggaaagagatataaagcaagtattaaacacatgggtaggggaaaggtggagctgaagaggattgagaacaagataaaccgtcaagtgacatttgcaaagaggaggaatggtttgctcaaaaaggcttatgaactctctgtcctctgtgatgctgaggttgccctcattatcttctccaaccgtggcaagctgtatgagttctgcagtggccatagcatggccaagacacttgaacggtatcacagatgcagttatggagccttggaagtccagcaccaacctgaaatagagacacagaggcgctaccaagagtacctgaagctaaaatccagagttgaggcactacagcaaacacaaagaaacctccttggggaagaattggagcacttagacgttaacgaccttgagcagcttgaacgtcagctggactcttccttgaagcaaatcaggtctaacaagacacagcagatgcttgatcaactctctgatttgcatagaaaggaagagatgctactggaaactaacaatatcctgagaaacaagttggaggaaatcaatgtagccctacaaccaacatgggaagctagggagcaaaatgctccctacaattgccaccctccccaaacagagggatattatgagacagcaacagcacattgcagcagtacattgagaattggctatgattcttcaggattaaatgaagcaggaggagctgcaggagcctcagcccaaaatgctagtgaattcatgcatggatggatgaactaaatttatttccaatttagtacttaaattcatgatcatcagaaaaatgatgcttttgtagagatcttggcctacaagaacaggctctaataataggtgtcatgcagcataaaatatacttatgctattcttaatattccaataagacatgttttgaagaattttataattagcatcttcccaaactcaatccatcctcattgatccaaatggggttgtttgatacttaatgacatgtgtatgctcctaaaaaaaaaaaaaaaaaaaaaaaaaaaaaaaaaaaaaaaaaaaaaaaaaaaaaagcaagaacaggctgtaaaaataggtgtaatgcagcataaaatatacttatgcgattcttactattccaataagacatgtttttcctgtttataacttgttggattgggtgattattaaatgaatggattgaattgtccttttggggagtattctaaataaaaaaaaaaaaaaaaaagaaaaaaaaaaaaaacgggggaaagtggtaagccggtcacagtctcccaaaaaatccaacccgaattaatagggttgaaccccgggggggccttaggggggggcaacctcccttaaatgggggggccctcaaggcccctttt

SEQ ID NO: 28168 - DNA, 531 bp, Glycine max
  Clone ID: TF_LIB4127-088-Q1-N1-F3
gaagaagaaagatccgtaaattaacattctctccctcccttcgctataatagcaagcttttcaagcatatttctggggtttggtcccttttccttgtttggggttttcttgggaaaaaagaagtaattaggtataataatagtataactaaagcaaaaaaaaagacagtaatatgggaaggggtagggttcagctgaagaggatagagaacaagatcaatcggcaggtaactttctccaaaaggagagctgggttactcaagaaagcacacgagatctctgtgctctgtgacgctgaggtcgctttgattgtcttctcccacaaaggaaagctctttgaatatgccaccgattcttgcatggagaagatactggaacgctatgaaaggtatgcctatgcagagagacaacttgttgcaaatgattccgagtcacagggaaattggaccattgagtatactagactcaaggcaaagattgaccttttgcagagaaaccataggcactatatgggagaagatttaggttcaat

SEQ ID NO: 28169 - DNA, 1021 bp, Glycine max
  Clone ID: TF_GmC1602_1
cttccgttggctttgtcacagtccactgtgcccccaagaaagttccttaacctcaaaccccttatggcaagttgctaacttctcttacttttatctttgaagccaccctcttctaacttctccatttcacaaggaagaagatcagagaacatttagaacaaaaaagagagtttgagaaatggggaggggtaagattgagatcaagaggatagagaactcaagcaacaggcaagttacatactcaaagagaaagaatgggatcctaaagaaggccaaggaaatcactgttctatgtgatgctcaagtttcgcttatcatctttgctgcatctggaaagatgcatgactacatcagcccttctaccacgttgattgacatattggagaggtaccacaagacctcagggaagaggctttgggacgccaagcatgagaacctaaacggcgaaattgagagactcaagaaagagaatgacagcatgcaaattgagctcaggcacttgaagggtgatgatatcaactctcttaactacaaggagctgatggccttagaggatgccttagaaactggtctagtcagtgtccgcgagaaacagatggatgtatacaggatgctcaggagaaacgacaagatcttggaggaggagaacagggaacttaattttctctggcaacaacgtttggcagaggaaggtgcgagagaagtggacaatgggtttgatcaaagcgtaagagattacaattcccatatgccatttgcctttcgtgtgcagcctatgcagccaaatcttcaagaaaggatctaatatataactcttgaattcaaaaacttcatcttggtgctgtcaaaatcgtatgtgtcacaactcttttaagtatatgttggtatctggttgtaagtaataaactaagcaactgacctttggctttaattgtgaagttacaacatcttgtgtctccaaccttattgggtaatcatatgacatcttagtgtgtttgtctgagtataaaaaaaaaaaaaa

SEQ ID NO: 28170 - DNA, 1371 bp, Glycine max
  Clone ID: TF_GmC182_4
gaaaatcctgaggataaaaaggaaacttagaaaagagagtacatatacaatacaagacaacttcacacacacaacactttcctctctctctctctctctctctagggttccaagtttgaacttgaaagtgttgaactttctctagctttttcacaaatttggttgcacttgcaactgaggcaggaaagagggatcaccagggggcacgagaggaggaagaggaaagagaagaaaaaacaagaaaagtggagaaaggggtaggtgttgtacagaaatagaaattaaaaaattgagtgaaaaattaaaagggaaatttttttagaagaagagtgatagggatatggggaggggaagagtggagttgaagaggatagagaacaagataaacaggcaagtcacttttgcaaagaggagaaatgggcttctcaagaaagcctatgagctatctgttctctgtgatgctgaggttgccctcatcatcttctccaaccgaggcaagctttatgagttctgtagcagctctagcatgctcaaaacacttgaaaggtaccagaaatgcagctatggtgctgtggaagttagcaaacctgccaaagagctcgagagcagctaccgtgaatacttgaagctgaaagcaagatttgaatcacttcaaaggacccaaagaaaccttttaggggaagacttaggcccactgaatatcaaagaacttgagcatcttgaacggcaattggattcatctctaaagcaagtgaggtccacaaagacacaattcatgctggaccagttatctgatcttcaaaccaaggagcagatgttagtagaagcaaacagatccttgacagtgaagctggaagaaatcaattcaagaaaccactacaggcaatcatgggaagctggtgatcaaagtatgccatatggtggtggtggtccagagaattctcactctcattctcactctcagggcttcttccaaccattggaatgcaaccctacactacatattggtcctgattacaggtacaatgctgtagcttcagatcagataactgccacaactcaacctcaacaagtgagtggctttattccagggtggatgctttgaactaattaggctcagtgcattcaggtggagacataaaaaagcaaacaccttacaaaagggcaaaagccaaaaatgcatcttggtgttggcaaggtgtaaatgcaaccctgcttctacagttattttggtgtataagaaactgatgttgtgacttgttcaaacttttgaacttttagccatagacatatatggcaatttataacattaggtatcttttaaaggatccctttttattattaaatatctgaacgaccgatttcaatttt

SEQ ID NO: 28171 - DNA, 1123 bp, Glycine max
  Clone ID: TF_GmC4870_6
gggggaaaagcgtagtcatcagtttgccgatagaagtagaaaatggaatcttgatcgtattatctttgttgctcatccattactccttctgcagtagaataatatataaagagagaagagtgcaatctagaaccacatagttattttactgtgtgagtgagagagagaaaattaacatgggaagaggaagggttgttctggagagaatagagaacaagatcaaccgtcaagtaacattctcaaaacgcagaagtgggttgctgaagaaggcctttgagctttctgtgctatgtgacgctgaagttgcccttatcatcttttctagccgtggcaagctttttcagtacagcagcactgatattaacaaaatcattgagaggtatcgccaatgtcgttacagcaagtcgcagactgacgattcattggaacacgattcacagagttcataccatgaattcttgaaattaagagcgaaatatgaatcacttgagctgacacaaaggcattttcagggagaagaacttgagccacttagctttaaagatttgcagagccttgagaaacaactagacataacgctcgcactaactcgacagcatcaaacgaagaaactcttggcacgagcagatgaattacgcgaaaaggttcacaagttggaggatcttaacaaacaattagagtccaaggaaaaagatgaattctcaagcctcatccttgacaataacaattacattcaagtgcatgctacacaaggtgatcaatttgagtctgggacaacactaaacacatgtaggtttcaacgccaagattcaaaggaaaaagcaattgataccaagacagacggtagtcaaagcagtcacaacaaaaacaaaggatggctattgtgaatattcatttaatttacatgttgaaaaaaaatatctatcaataactcaggggtgcccatgtattggtataattcacaaaatagtttatataaagtattatttctactaaacacacacattgttcctaaaataagatattgtactttatgcaacagtaaagaggaaaaattatgtatttcaactatcattgtataaattgtcattagaagatgttctgaaatattgatattttagct

SEQ ID NO: 28172 - DNA, 1248 bp, Glycine max
  Clone ID: TF_GmC791_1
gaattaaagggagggtaccagctgtcaaatagtgctttccacacactttcaccaatttataaattatttgcagttacactccaagtctactttttctttggcagcttagccttcctattttggaaaccctcttcactgctctcccaccttttttgtgtgtatgtgtatgagcttctcttctactctattcactgcactcttattaataaatatcagtgcttggaaagcagaagagaagatccatagctaagatagatctcgagatgggtcgtggcaagattgagataaagttgattgagaaccccaccaacaggcaagtcacctactccaagcgaaggaatggtatcttcaagaaagctcatgaactcagtgttctctgtgatgccaaggtttcactcatcatgttctctaaaaacaacaagatgcatgaatacattagccctggcctcacgacaaaaaagatcattgatcagtatcagaagactttgggggatattgatctgtggcattctcactatgagaaaatgcttgaaaacttgaagaagctgaaagatattaacaataagctcaggagacagatcaggcataggataggtgagggcttggacatggacgacatgagcttccagcaactgcgcactcttgaagaagatatggtttcatccatagggaaaatacgcgaacgaaagtttcacgtgatcaaaactcggactgatacctgtaggaaaaaggttaaaagcctgaagcagatgaatggaaatctgctgcttgaacttaaggaaaagtgtgtgatccatccacaatttcttttgcacgatgaaggagacgaggaatcagcagcagcagcagcagcagcagcagttgcactggccaacggtgcctccaccctgtatgcattctgtcatcagcaccattctcatctgaaccttttctcccaccattctaatggagaagagcaaccctttaaaactgatcatgaccttcgccttgcttgatccagtgcaacaattaactagcaataatgtaaattaactagctagccagcactaagcacttgttatttatgctttaatttgtattaattggacctgttaaacccaactttgcttgcaacctctctagtttctatccaggtagagaattagctaagcttatatagtgtttggcaagagcgtgctatgaaaaacagaaagactgtactttatttgttattataagtttacattgagtgattatgttatgattcac

SEQ ID NO: 28173 - DNA, 2718 bp, Glycine max
  Clone ID: TF_GmC1762_1
ggctcgaggcctcccatttgcggcaatgcaaatgcacctcctctttccctcattaattgaaatcgctgccccagatcgtgcaagtgaagattcggctagctgaagcattgaaggacgtagctgctatggctcgaggaaagatccagatcaagaggatagagaacaccaccaaccgccaggtcacttattctaaacgacggaatggccttttcaagaaggccaacgagctcaccgttctatgcgatgccaaggtttctattattatgttctccagcactgggaaactccacgagtacatcagcccctccacctcaacaaagcagttcttcgatcagtaccagatgactctaggagtcgatctctggaactctcattacgagaatatgcaagagaacttgaagaaactcaaagatgtgaataggaatcttcgtaaggagattaggcagaggatgggagattgtctgaacgatctgggcatggaagatctcaagctccttgaggaagaaatggacaaggccgccaaggttgttcgtgagcgtaggctcgaggcctcccatttgcggcaatgcaaatggacctcgtctttacctcataaattgagagggcttcggaaggaaatgagagttttgttccgttctaagcatggggaaggaaggagatctatgggacgattcagtactcatcaatgccttcgaccaagctatttctacttacaacaaaatgcatagcagcggcaaacacaaagacgccgcctcggttcaagaggaggcgaagacactgatcggagaaaatggctccaattttgacactacaaggggtgctgatacgaatattccagctactgatgcgcttgattcaggtgagactggtaatttgtcgaagttggaagaaaatcatgacacagagtcacaggtggatcatctggattcaacaaggggtcaagacatccagaatgcacagaacggcaatgcatatgctaatgctgtaaatggttgtaaataaaagcgctgactctgcttgacccttaactagaaaagggtgggaattttggaaatgcgtgtgctgattctatctttggatttccctatttgtattctctgattttctctactgttgcaccaaaatctatttatcaagattattcagcgactgcataccaagtttatgatccaaatgctgtctgtacatgttgcccgtgttacagtcaatgtctgccggctccatgcacgtcagttcctggttggtttttgggtggaaaatctgtaagcaatctgtgtagcaatctttctttggaaattgatcaaaaaatgtatttgccctgtgaagaaggtacaatccactaactggccatgggaactccggagaactaacctgtgcatactataagaaaaaaagagtaaagatcttaaattaattaaaggaaaactagtatgtgttgtgtctgtagcgaatatttggtttgcggtgtctatcttttgctcaattgatgatccccttcttttttttcattactggatgtaacatataatgtttgcattgagaacacgaatgagtcgaagttttaaatggaactatatgtttttaataaaatactcaaaattagatctactacaatacttgttatattctgggtagattttcattcgatctatctgtgatgacgtatttggtaaatctgtgttctattgaatttgctcaatttagcatatttatcattaatgaattcttttgcttataaagaatattagaaattagatgtagatgctggaggaatgatccagatcacgaatttggagaacaacaccaaccactatgtctcattttctaagacatagaatgcctttttataaaaggcctacgatctccttgttctttgaggtgacaatgtttctattattatgttgcccaacaaaggaaaactccgcaagtaatgcagcccttctttttcaaaaaaagacattgctaacaaaggatatttaaatgctgttgaacatgattaaaatgtttatattagtataaggtgataacaaatcagattgacacccagaggaaaaagtttaataacgagaaagaagtgcacaacaggctcctgcatgacttggcgtgaaaagcagaagcacgttacacatcggattgtcacccaaaggaaaaagtttaataacgagaaagaagtgcacaacagactcctgcgtgacttggatgcaagagcagaagatccacgttttgcattgatagataatggaggggagtacgagtctgtgatcggattctcaaatttaggtccacgcatgttcgcattgagcctacagccaagccatcctagtgcccaaagcggagcagcaggctctgatcttaccacttaccctttacttttctagtacgcaagcttaagcagctcgatctcttcatcaatcagaaataccacattcactcaaatttcaataagaatatgacttgtgatcgatatcttaagttatgcacccgtacgtgcagtttgtacttaaccacaaaacaatctcacgaatcttctcttctcggtcgatcgcatatatgcatgtgtgaattattcagttgcaactgatgaactgttatctctgtatgttttttagcctaatcatatacctgaaacatgacgttgcatgtgtttccttttattgagaatgctttagcatgcatgattataaattatagagcgtttcataggtctttattttaact

SEQ ID NO: 28174 - DNA, 1244 bp, Glycine max
  Clone ID: TF_GmC1499_2
accattgtgaggatgtgacaccatctgtcgtggctgcatacggctgcgagaagacgacagaaggggacgcagcgagcgagccacgaaaatattcatcacacagggttttggtttattattccaatttttggttttcccttttgttggatattagagtgtgtaagaaagagaagagagagaaatgggaaggggaagagtggagttgaagagaattgagaacaagatcaacaggcaagtgacctttgcaaaacgaaggaacgggcttttgaagaaagcttacgagctttccgttctttgtgatgccgaggttgctctcatcatcttctccaatagaggaaaactgtacgagttctgcagcagttcaagcatgctcaaaacgctagagaggtaccagaaatgtaactatggtgcgcctgaggctaatgtgtcaacacaggaagccttggagttaagcagtcaacaagagtacttgaggctgaaagcacgttatgaagctctacaacgttctcaaaggaaccttatgggagaagatcttggccctctaagcagcaaagagcttgaatcacttgaaaggcagctagattcgtctttgaagcaaatcagatcaataaggacccaattcatgctggatcagctttctgatctacaacgtaaggaacactttctaggtgagtcaaacagagatctcagacaaaggttggaagagtttcaaataaatccactccaactgaatcccagtgctgaagatatggggtatggacgccatccaggtcagccccaaggccatgctctctttcaaccattggagtgtgagccaaccttgcaaattggatatcatcctgatccagtatcagtggtgacagaaggcccaagcatgaataattacatggcaggatggttaccatgaaagagtgtcaaatgtggagcataattaaagatcctgccgtttaatttcaaatttatttgaagttaaggaaaacggaaatttgtaatagcacgtaatggacttacactagactctaccttctaattaagctaggaacaatataagcagtgattttgtgtgtgagctttcataaacagtacctagctagcctcttccttgtttcaataatcacttcttccttttcctaattaataaaactatcgtatgcaccctttgcctttacattaccttgtattacctaccaatgacctcacatgtttgcttttgtcactctataaaattagtgtttaattttctc

SEQ ID NO: 28175 - DNA, 1235 bp, Glycine max
  Clone ID: TF_GmC951_1
ggcgagtacggctgcgagaagacgacagaagggggatgcataaaccacgatggatgaaaggtggtttttccactttataaatacccaattcttcagccactttgcttttattttctgatatatctccttcctgttctgctaagtggcaaagaaagaaagaaagaaaatttcaagggctgaaacatctatctttaactgtattctccctttgtttcctcaccagttgattcaggttgcaaacatggcttttccagacccatccatgtcagtttctccacagaggaagatgggaagggggaagattgagatcaagaggattgagaacactaccaatcgccaagtcacattctgcaagcgcaggaacggcttgctcaagaaagcatatgaattatctgtgctttgtgatgcagaggttgctctaattgtcttctctagccgtggacgcctctatgaatatgctaataacagtgtcaaagcaaccatcgagaggtacaaaaaagcaagttcagattcgtctggcgctggatctgcttctgaggctaatgctcagttttaccagcaagaagcagataaacttcgtcaacaaattagtaacctgcagaataacaacaggcaaatgatgggtgattctttgggctctctgactgccaaggatctcaaaaatctggagactaaattagaaaaaggaattagtaggattcgttcaaaaaagaacgagctgctatttgctgaaattgagtacatgcaaaagagggagatagacttgcacaacaacaaccagcttcttcgagcaaagatagctgaaagtgagaggaaccaccataacatggctgtgttgcctggaggctcaaactatgactctatgcagtcttctcagcaacaatttgactctcgtggctacttccaagtcactggattacaacccaataatcagtatgcacggcaagatcagatgtcccttcaattagtatgatgtgtttagtattgagatttgagatgttctgctacttgtagtttgccttctagtatgatagcagatgaatgctaagggtaatgtaagtagaaccatttgtaggggatttaagcatatatcccctcagtactatatatatgtaatggctttgtagactttcttaagactatcctgtatctattgtgaaacgctctgagatgttagtatttgtgtcctaattaatagtatgaagaagaaacctagcttggcatgtttttccccc

SEQ ID NO: 28176 - DNA, 2719 bp, Glycine max
  Clone ID: TF_GmC1905_1
ttttaaccttcaacagaaagaactgtatgatcaggcagtgtctccaattgtgtatgaagtgcttgagggctataactgcactatttttgcgtatggacagaccgggacagggaagacatacacaatggaaggaggagcaagaaagaagaatggcgaatttccgagtgatgctggtgtcatcccaagagctgtgaaacagatttttgatatattggaagctcagaatgctgagtataacatgaaagtaacatttctagagctttacaatgaggaaataacagatcttttggcccctgaggaaacttcgaaatttatagatgataagtctaggaaatttgcaggccgttgagtgaagatgaaacgaggctgcacacgccggttgtgatttcgtgtaacgaagatagaagagaggttttagctgttcagaatatcgccaacaaacagatcgatagaaccttcgcatttgacaaggttttatccagcttcagatacctgaaaagagaagagcgagatggcgtcggtggtgaagaacgaactcaaatccgtcagagaaaagggtttcggcgctttcctcagagagctcaaggatggaggctacctgagatgccttccggatggaaatctctttgttagaggaactatcgataggtacaagaaagcatgtgctgcctcaccaaatgcagaatctggctcgagctttttcatctccgttcgaaaaccccgatttccacttcgaattcgttcacgctgtcaaactccacaacaacatcaaggagcacttgagtgcccaggggaatcacctttgccgatctcgtcacgccgaatcctcatcgaaccaacgctcttctcaattttggtgcctatagggacgtgaggttgaactatcttggaaactgaggacgaagtgaatgcgatagaggcacaacaaacagagttggaggagaataggatgttgcaggaagaaactcaggtttgacaacgccatggttactcttcaatcagccaagtgcttgattttggcctcggttcaactcattggtaatcttagcaaagatatatacttcgttttgatccttgcaagagagagagagagagagatttcatccatacacttgttgttgttaaatctaagtatttgcttgcagcaaagttccgtaacagtggtaagggaggaggaaggaatgagggaaaagttattagaaaattcggctcgaggaaatggcgtgtggaagaacgtactcagagaaaagggggtcgacgctttcctcgagctcaaggatgaaatctacctgagaatgccttccggatggaaatctcttgcaaaccaagatccacaatattggggcaacacttgttggctgcggaagacgacagaagtggatattttgcaacattttcacctcacttgaatgcataacaccaaagtacgttcagtattgttctccgtacataaaccttagatggaatatcgtaacgaagctatacgcgaagagtattcacagaaaggaacaggaatatgggaaaataggggtcaagcggatcaaacacaccaacgaattgtcaagtaaccttcgtgcaaaccgccgtaacgggttgctcaagaaaggcttatgaattgtctgttctgtgtgatgctgaggttgctcttgttgtcttctcaagccgtggacgactctatgagtatgccaacaacagtgttagaggaacgatcgataggtacaagaaagcatgtgctgcctccacaaatccagaatctgtgctctgaagctaatacacagttttatcagcaggaagcgtcctaaattaaaacgacaaatcagagacattcagaatctaaacaggcacatccttggtgaagctcttagctctctgagtctgaaggaattaaagaacctggagagtagactggagaaaggtttaagcagagttagatccagaaagcatgaaactttgtttgccgatatcgagttcatgcaaaagcgggaaatagagctgcaaaaccataataattttctgagagctaagatagctgaacacgagaaagcacaacaacggcaacaggatatgataccgggaaatgtgtgcgagtcaaccatacctccacaatcatatgaccgcaatttcttccctgttaatctcatagattccaataatcaatattcaaatcaagaccagactgctcttcaacttgtctgataaacgatttgaaattatgccgcagcctttcaagtggtgtgggatcccttacatcgtcctatgtttcgtgaaggagagtgcccttagaaactcctctgctaaagttcttacaacggagaacaagagaaaaactaatcagcatttgtaccaatacatcatttgatattgtttatgtatctttcaatatatatagtttctattcagtcctggcatattgtatttttatgttataaatgcttatttcaatatgaacactatatctatcgaggagtaaaagttaactgggcgtccgcattattcatcaaagttggacaacaaagaggaggggattaaaatcagtgggttacttttgattctcaagcatttgagcaataacacaactattgtatttgattgtgttgcaagtcttacgatgggtaaaataaaaataaaaaatcaaagtgaattagtttgagtactatggaattgtttgcaggataattttcgtgaaattaattcaaaaatagcttccaagtaaaaaaaa

SEQ ID NO: 28177 - DNA, 1395 bp, Glycine max
  Clone ID: TF_GmC130282_1
gcagcgctcatcctctctctctttccttcattggtggctttcaacccaaagctgaaatcatctaaacatggcaaaccaaaccgaaccaaaaaccaacattcctaatatcaacgccttcccccaataaggaaagtaaaaatcaacaagtacatccttactcagctctctctttcaacaacatcccaccacacactaacaccaactccaactccaactccaagtcttcccctaactaacaccactaacaacaatcactaaaaaaagaaagaaaatttaccctgatcgcaggatctccgaacaaagctttgatttcacaaaagctaaatttagataaacacctgcatattaaatttttctgctctatacatgcatcacatgtccctcacactaaacaaaagaaaaacaccaccaccctttgcttttgcttttctataagtagtcaacggctcagccttaatttctttgctttttttaggttaaggtacatggtgagggagaagattcagattaagaagatcgacaacgccacggcgaggcaggtcacgttctccaagcgtcgcagagggctcttcaagaaagctgaggagctttcggttatgtgtgatgctgatgttgccctcataatcttctcttccactgggaagctctttgagtactcaagctcaagcatgaaggaaatacttgaaaggcatcatttgcactcaaagaacctagcaaggatggaacaaccatctctcgagttgcagctagttgaaaacagcaattgctctagattgagcaaggaagtggctgaaaagagccatcaactaaggcagctgagaggagaggatcttcaaggcttaaacatagaagaattgcaacaattggagaggtctcttgaaactggattgggccgtgtaatagaaaagaagggtgagaagattatgagtgagatcactgatctccaaagaaaggggatgctattgatggaagagaacgagcgactcaaacgtcacgtggcgggcataattaatggtcaaaggcatggtggtgccgaatctgagaactttgttatggatgaaggtcagtcttcggagtctgtcacgtacgtttgcaattccactggactcccccaagactatgaaagctcagatacttcgctcaaattggggctaccatactccggctgatgagaaagtgtgtgaggagataaaattaactcaagcaaaagtgcacaagattatggtctaaatttcattaatgattatgtctctagtatgtccccgtggtgtgtataggtagtataaatattagtaaatagtaaggacttatgttatggggtactctaatgtcattcagaattaattgttttttaaaaagaaagcaattcgagttatgtttttaattggaaaaaaa

SEQ ID NO: 28178 - DNA, 1398 bp, Glycine max
  Clone ID: TF_GmC1362_1
gatttcggctcggctaaagataggtcaaatccaacgctttcttcaacatacatatctcaattatgtagcattagcatacccttttttattctttcttctatttctctgcagtgctcaagccttcctagctcccttccttggctcaaaagattttcccttgattttgccaatttggtgcatatctgcttcgttttgctttctgtgtcttcaagtcttacttggaagggtcagatttgctgcaaatctctccatttccccatcatcagaaggtttaatttcttggtttactctatagctacttgaaagaagtcaaaaaaagagataatggtgaggggaaagactcagatgaagcgtatagagaatgccacaagcaggcaagtaactttctcaaagcggcgaaatgggttgctgaagaaggcctttgagctatcagttctgtgtgatgctgaggttgctctaatcatcttctctccaagagggaagctctatgaatttgctagctccagcatacaggagtcaattgaacgataccgcaggcataccaagcatgttaatccaactacattcagatcagttgaacaaaatatgcagcatctgaagcaggaggcagaaaacatgatgaagaagattgaccttcttgaagctgcaaaacggaagttcttgggggaaggtttgggggcttgctccattgaggaactgcaacggatagaacaacagttggagaggagtttaagtaatgttagagcaagaaaggtttttaaggaacaaattgaacaactaaaagaaaaggaaaaagccctactagatgaaaatgccaagctcactgaaaatgccaggctctctgagaagcatgacatccatctacagccagcaacaaagaatcagaatgtgaatcaaccccaatgcaatgcagaaagtagttcaagttcagatgtggagaccgaattgttcattggacttcctgatacaagagcaagacacatctctcatcacgtctagtagaagattacttattccctggctatggaaaataaaataagggtaagcctaactgtatcatcaatgtatatgtatcctgatgctctagtaaagataataatagaataattttaaatcctcttacagtatcttcctaataatccttctaattattaatgaaatgaagaaaatattaaattttttctctgttttccaagtgttaaatgtttttacattttcatctaatattttctttatgaagtataagaaaattattgggaggatgttataggaggatataaattattctaaatagtagtggtaattggtgggagtgatttgttttgcttgattatatcctcaaacccatggtctaatgacccgttgtattgatacttatactttagactcagcagtatg

SEQ ID NO: 28179 - DNA, 1114 bp, Glycine max
  Clone ID: TF_GmC1499_5
ggagaagatcttggtcctttaagcagcaaagagctcgagtctcttgaaaggcagctagattcgtccttgaagcaaataagatcaaccagggtactcaagtttccaacttttcttttccaatttccatatgaaattgtagatctaggaacatattaagagcccaatcttgaaatatccctatgtctatatggtcaagcccattttgagagagttatttaagtcatgctctgagtaatgtaagaaatggaaatacaagtattggggcacattattaccattaaaattgaaagggtaaagtaactaacaaggaaattgctgttttttaatttctctattgattaatgaagagaaactcttggttacataattctaaatatagatatatcaatctcaaaatgtgtaatttctaagtacaaatgtagtatatgtatttaattttgttaagtttgtttccttaatttacagacccagttcatgttggatcagctctctgatcttcaacgtaaggtatgtatgaaaacaattttagtttcctttgccaccgtttaccatctcatgccatacctccgtttgttctccaattgatacatgtcactggtgtaggaacacttgctaagtgaggctaacaggtctctcagacaaagggtaagttagaaacttagaattcatcaacctatatatgtaaatatacatcatcccacaaagtatatagcatataattaatacattttaaaatagaattaggaatcatgcaagaccaaaacattgctataagatacaactgatattgtgatatcgaaaattgatgggtataaatgactttatctgatttgtagcagttggaagggtatcaaataaatccactccaactgaatcccggagttgaagagatgggatatggcaggcatccagctcaaactcatggtgaagccctctttcaacaaatggagtgtgagccaacgttacaaattgggtatcagcctgatccagtatcagtggtgacagcaggcccaagcatgagcaattacatggcaggatggttaccatagtttgcgtttcctgcataagatccactgcaccagcacatttgccgttccaattttatttgaaaacg

SEQ ID NO: 28180 - DNA, 728 bp, Glycine max
  Clone ID: TF_GmC4870_4
ggaagaggaagggttgttctggaaagaatagagaacaagatcaaccgtcaagtaacattctcaaaacgcagaagtgggttgctgaagaaggcctttgagctttctgtgctatgtgatgctgaagttggccttatcatcttttctagccgtggcaagctttttcagtacagcagcactgatattaccaaaatcattgagaggtatggccaatgtcgttacagcaagtcacacactggtgattcattggaacacgattcacagagcgcataccatgaattcttgaaattaagagcgaaatatgaatctcttgagcggacacaaaggcattttcaaggagaagaccttgagccacttagctttaaagatttgcagagcctggagaagcaactagacataacgctcgcactaactcgacagcaccaaacgaagaaactcatggcacgagcggatgaattacgcgaaaaggtaagttgttaaatgctaattaacttgtttgattttactccgtgtgaagtttttctgtgaatttctctctattgttatgttttttcttgtttacaactcggggctgcagaagttattggctatttgttttttttttttttaaaaaaagttattgtttatcttattatagagagaaaattgatatactttttaaagaagtggggctagacgtccaagtctctatcatccattataatttggtctctttcataattagattttaa

SEQ ID NO: 28181 - DNA, 1169 bp, Glycine max
  Clone ID: TF_GmC175_1
cccacgcgtccaattcggctcgagcaactactactactataggtacttactactttgcctagctcctctttctctctcttcccttttgcactgaacttcactctctcttctatatcaagggttgatcacataacctcaatatatttctaataataattgatatagtttgagttattgtttcgagacacacagaaagagagagagagagagaatgggtagagggagagttgagttgaagaggatagagaacaaaatcaaccgccaagtaactttctcaaaaagaaggaacggtttgctcaagaaagcttatgaactctcagttctctgtgatgctgaggttgccctcatcattttctcaagccgtggaaagctctatgaatttggaagtgttgggactaccaatactattgagcgataccaacgtagctcttttactcctcaagacgaacacgttgaatgtgaaactcagagctggtaccaagaagtttcaaagctaaaggcaaagtatgagtctcttcaaaggacccagaggcatttgcttggggaagatcttggaccattgaacataaaggagctgcagaatattgagaaacagcttgaaggggctttagcacaagcaagacaaaggaagacacaaatcatgattgaacaaatggaagagcttcgcagaagggagcgccatcttggagacatgaataagcaacttagactcaagcttgaagcagagggatttaatcttaaagctacggaaagcttgttgagctttacttcagctgctggaaacagtggctttcactttcagcagcctcctcaaaccaatcctattgattaccagcagccagaaccctttttgcaaatagggtaccatcaatatgttcaatctgaggcatctaatgttccaaagagcatggcttgtgagactaacttcatgcagggatggatcctttgatcaatcttattaattgaattaagtatatgatgatttaccttattgtctatatcctttttagattttttgtgttttggctgttgttaaatgtacctttgtcaccagaaaagttgcaaacttgtttagctctttctgtaattggatacaagtactacagacaatggttttactatatgttaaagcaatgctattgtttttaactttgatgctttgaacctat

SEQ ID NO: 28182 - DNA, 1191 bp, Glycine max
  Clone ID: TF_GmC1805_1
ggagtatcaaatatatagcaagacatagcaagacaagatatgggagggagaaaagaaaagggtggtgaatgtgaaaatagagggagcatgtggaatggttgtggtcactattatatatgttgtctcttacgctttgcatgtgactttctttctttctttatatcctttatatattaagtatatgctgcaatatatttaattaaagagagaagtaacatcaaggtgcagagagaggaattgaagcatgggaagagggaaggtggttctggagagaatacagaacaagatcaatcgccaagtaaccttctcaaagcgcagaaatggtttgctcaagaaagctttcgagctatctgttctatgcgatgctgaaatcgctctcgtcatcttctccagccgtggcaagctttttcagtatagtagcactgacattaacagaatcattgagaagtatcgtcaatgctgcttcaacatgtctcagactggcgatgtagctgaacatcaatcggagcagtgcttataccaggagcttttggtattaagagtcaagcatgagtcactccagcggactcaaaggaatcttctgggagaagaactagagccacttagcatgaaagaattgcatagtttagagaaacaactggatagaacgcttgcacaagctcggaagcacctgacacagaagctggtatcacgaattgacgaattacatggaaaggtgcatagcctggagcaggctaacaagcatttggaatctcaggaaagaggtaaatgtacccagatttgtgaaggttctcctaatggccatattttgcaagataaacaagtcaatcagtttgaatatggaacagcaggttcgtttcggcttcagcaagagcaaactactgcttccaaaggaaaagaaatagagacgatcgaggactggttgaggccaaagcagtcataatattaatatattgcaactttgaatgttcatagagttaaaatatattgttcgtggtcgtgtgtgtatccatcaaatatatagttccaagcctcaaaattctagctatatagtacgttaagcgtccattgatgtagctttgattaatttagtgtatgtttgatacaagatatttaatttagagaattaatagttttatttttatcgatttcctaaaaagcttttacaaatgaagctttaaagaggttacg

SEQ ID NO: 28183 - DNA, 933 bp, Glycine max
  Clone ID: TF_GmC1110_1
tacggctgcgagagacgacagaagggggcatttaagaaacacaaaagatagaaagaaaataaagagaaggagaaggggagaagagagaaaggttgtattgagagatatggggaggggtaagattgagatcaaaaggattgagaactcaagcaacaggcaagttacctactcaaagaggaagaatgggatccttaagaaggcaaaggaaattagtgttctatgtgatgctcaagtttcccttatcatctttggtgtctctgggaagatgcatgagtacatcagcccctccactacgttgattgacgtcctggacagataccaaagagcctctgggaagaccctgtgggatgctaagcatgagaacctcagcaatgaaattgatagaatcaagaaagagaatgacagcatgcaaattgagctcaggcacttgaaaggagaggacatcacgtcactgaattacaaggaactgatggctctagaggatgcccttgaaaatggcctcagtggagtccgtgagaaaaagatggaagtgcacaggatgttcaagagaaatgacaagattttggaggagcaaaataaggaactcaatttccttctgcaacaacatttggcactagaaggtgtgggaaacatgcatggacaatggatttaacgagattaaaagggtattcaattcgcatatgcaacgcgcagctagcctaaaacagccaaatctaaaagaaagaatatagattaatggctggtcttgtcaaattagttctgctcaaagccttaagttatatgaacttctatcatttctgatttcggccgtatttgttaaagctcggtagtgtatctctaaaacttgttatacgattattgaattctgattacgaaactatcaattaatgtgcatgtatgctgccaatttgagttatatatacatgcatggag

SEQ ID NO: 28184 - DNA, 1240 bp, Glycine max
  Clone ID: TF_GmC138_1
attcggctcgagcccagatagttttctcaccatttccgtattttacttcacctttagtgggtagtggttacatgatatcagcacactttcactcactgtgctttcccgtgacacgcatctatacttgtccagaagaagtaagatccatgaactaacattcccacacgctcgcttcaccatatttgccacccttttaacctcacttcttagggttattttgctcccttttccttgtttgggaattgggtttggtttggtttttcttggttgtaaaaggaaacaaagaaagaactaagatgggaagaggtagggtacagctgaagaggatagagaacaagatcaatcgccaggtaactttctccaaaaggagaggtgggttgctcaagaaagctcatgaaatatctgtactctgtgatgctgaggtagctttgattatcttctctcacaaaggaaagctctttgagtatgctactgattcatgcatggagaagatactggaacgccatgaaaggtatgcctatgcagagaggcagctagtagcaaatgattctgagacacaggaaaactggaccattgaatacactagactgaaggcaaaaattgaccttttacagagaaaccacaggcactatatgggagaagatttggcttcaatgagcctcaaagagcttcagagtttggagcagcagttggttactggtatcaaaaacatccgcacaaggaggaatgatctcatgtccgagtccatttctgagcttcagaaaaaggagaaaaggatacaagaggagaataacacccttgcaaagaagatcaaggagaaagagcaggctgtagcacagcaagctgcacaatgggagcagccaaactacagggttgatacatctttcatgccacagcagcaaccccttcccaccagtttgaacatatgtggcaataattactgccaggaagctgcaccagaactaggaaggaacggtctagacctgaccctggaaccactctattcttgcaaccttggatgcttctgaaaagttgtttcttctgagttggattatattatataagtgctggcatatatgaactactataagtagtctgtttgaatgttttatatgtattttggtctatggcttttccctctactttgaagacattattttgaattgcttctgttgtaaacaaattgaatttgaaatctaattgtgtatttttgaaatatgttaattatacggttttcctt

SEQ ID NO: 28185 - DNA, 833 bp, Glycine max
  Clone ID: TF_GmC1362_2
gaggcagcaaacatgatgaagaagattggccttcttgaagctgcaaaacggaagttcttgggggaagggttgggggcttgctccattgaggaactgcaatggatagaacaacagttggagaggagtttaagtaatgttagaacaagaaagatccaggttttcaaggaacaaatcgagcaactaaaagaaaaggaaaaagtcctacttgatgaaaatgtcaagctcactgaaaatggcaggctctctgagaagcatggaatcaatctacaaacagaaacaaagaaacagaatgtgaatcaaccccaatacaatgcaggtagtccaagttcagatgtggagaccgaattgatcattggacttccggatacaagaacaaggcgcatcgttcatcaggtttagtagaagattatttattccctggctatggaaaataaaataagggtaaaaataatgatagaataattccaaatcctcttacaatatcttcctgataatccttctaattattaataaaatgaagaaggtattaatttttttctctgtttccaaagtgttaaaatgtttttacaattttcctttaaaactttctttatgaagtattaagaagagtattgggaggatgcatgttataggaggatatattattataaatggcagtggtaattatgggaatgatttgttttgcttgataatatcctcaaaacctatggtctaatgacccgttgtattgatacttatactttagactcagcagttgtatagttgccctcctggggtttgataaatggatgactttccttgagtcttgagccggccccgctggcttttcttcg

SEQ ID NO: 28186 - DNA, 1612 bp, Glycine max
  Clone ID: TF_GmC182_1
tacgagagcgagacgacataaggagggaggaacacaagtgttgttgttgttgttgatgatgtttgctttgttctctttctctctcctcaaattttttcctctctctctagggttccaagagtgtcttgaactactccagaaccctctcttgtttttcacaaatttgggtttagtagagtactgacccagaaaagaaggttcaacaggtacctaagagaggggatagaaagaaaaaaatagaaactgtacgtataaaagaagaaagaaacaaagatataaggaaaaagggaaaatattttgaataaggaagatataaggcaatatataaaaatattagtatttgataataattaggtgtagaaatattatggggaggggaagagtggagctcaaaaggatagagaacaagataaacaggcaggtaacgtttgcaaagaggagaaatgggcttctcaagaaagcctatgagctttctgttctctgtgatgctgaggttgccctcatcatcttctctacccgcggcaagctttatgaattctgtagcaccaacagcatgctcaaaacacttgaaaggtaccaaaagtgcagctatggtgcagttgaagtcagcaaacctggcaaagagcttgagagcagctaccgtgagtacttgaagctgaaagcaagatttgaatctcttcaaaggacccaaaggaaccttcttggtgaagacttgggcccactaaataccaaagatcttgagcagcttgagcggcaactggattcatctctcaagcaagtgaggtccacaaagactcagttcatgctggaccagttagctgatcttcagaataaggagcatatgctggtagaagcaaacagatctttgaccatgaagctggaagaaatcaattcaagaaaccagtataggcaaacatgggaagctggtgagcaaagtatgtcatatggtacacaaaatgctcactcccaaggctttttccagcctttggagtgcaaccccacattgcagataggttctgactacaggtacaaccctgaagcctcagagcagcagctagctgccacaactcaagctcaacaagtcaatggatttattcctggatggatgctttgacctaagctctcagtattttagatggctacataaataaaattagcaaacacctaagaccaaagtcaaaatgcctcttgctgttggaaatgtgtaaatgctgcttgttctttagttatttatttgttttggcataaaaacagcagtgactgacttaaaactattaaaactttagccatagtcataggatgtggcatgaaggttatagtattttgaatatctttggaggacaagttttatctgactgaatgacctgttaatgtcatttttcttttgcaatcactttctctttctaatctggctgcattaagagttgtttttaaacttcttgcattcattagtggagcattgtacaatgatatatatgacaatattgtaaagtatactgaggctatggaaatgccacttgaatttattttcaagggtgaactacgaagagaaaaccttgataagattatagatatattaggaagacagtcttaacccccaccccacccccac

SEQ ID NO: 28187 - DNA, 859 bp, Glycine max
  Clone ID: TF_GmC1905_11
ctccctagtagttgaggcacttcatgcattcatacaagatgaatcagagcacaagtgattgctattggtgtctttagtaatatggtgctatccaattggcaaacctcatgagtagtagaagcagcagtcaagagggaaagaaccatggcatatgccttctctcatcagtggagggcctgctctagccaaggcctaggtaattatgaacttggcaaagctagttggagttggagctagaaggatcgttggattgttgcactgcccaattcaattatttttatcagcaggaagcgtccaaatttaaaagacaaatcacagacattcagaatctaaacaggcacatccttggtgaagctcttagctctcttagtctaaaggaattaaagaacctggagagtagactggagaaaggtttaagcagagttagatccagaaagcatggaactttgtttgccgatatcgagttcatgcaaaagcggccgttttcttggtgggtagtccaagacagagctgtcatgttggttgcagaaagaggaagaagaagaagctaatatgaagtatgagagtagaacccagcaaagaatgtgattgatattcatcctttaaactgaagaacaaaaatagagaggatttcatatggatacaaccaatgcaattcactcaatattagatgtatacatgaattatatttgttaggttatcccatgtattgatgtcctttttctttaacgaatattatcttttaaaagatagtatctggaaaggaaaattgtcaagcaaatagttagttgatttgttacagtatgttatcgctgttatgtttggtttgtacgttctgttattgctgttaagtttgaat

SEQ ID NO: 28188 - DNA, 383 bp, Glycine max
  Clone ID: TF_LIB3028-045-Q1-B1-E5
aaacgctggagaggtaccagaaatgcaactatggagcgcctgaggacaatgtggcaacaaaggaagccttggagttaagcagtcaacaagaatacttgaggctgaaagcacgttatgaagctctacaacgttctcaaaggaaccttatgggagaagatcttggccctctaagcagcaaagagcttgaatcacttgaaaggcagctagattcgtctttgaagcaaatcagatcaataaggacccaattcatgctggatcagctttctgatctacaacgtaaggtatgaggtcaattatcctttttctttaattaatttgtcaatgtttaactgctattcttcttcttccgcatatttcccttgctcaccggttcaattatgcat

SEQ ID NO: 28189 - DNA, 1093 bp, Glycine max
  Clone ID: TF_GmC1499_3
gacgcagcgagcgagccacgaaaatattcatcacacagggttttggtttattattccaatttttggttttcccttttgttggatattagagtgtgtaagaaagagaagagagagaaatgggaaggggaagagtggagttgaagagaattgagaacaagatcaacaggcaagtgacctttgcaaaacgaaggaacgggcttttgaagaaagcttacgagctttccgttctttgtgatgccgaggttgctctcatcatcttctccaatagaggaaaactgtacgagttctgcagcagttcaagcatgctcaaaacgctagagaggtaccagaaatgtaactatggtgcgcctgaggctaatgtgtctacacgggaagccttggagttaagcagtcaacaggagtacttgaagctgaaggcacgttatgaggccctacaacggtcccagaggaaccttatgggagaagatcttggtcctttaagcagcaaagagctcgagtctcttgaaaggcagctagattcgtccttgaagcaaataagatcaaccaggacccagttcatgttggatcagctctctgatcttcaacgtaaggaacacttgctaagtgaggctaacaggtctctcagacaaaggttggaagggtatcaaataaatccactccaactgaatcccggagttgaagagatgggatatggcaggcatccagctcaaactcatggtgaagccctctttcaacaaatggagtgtgagccaacgttacaaattgggtatcagcctgatccagtatcagtggtgacagcaggcccaagcatgagcaattacatggcaggatggttaccatagtttgcgtttcctgcataagatccactgcaccagcacatttgccgttccaattttatttgaaaacgaaaaaaaaaccaccaaaaaagaaggaagaaaatggctttggatgtaatgaagctgtaagtgtctagtctaccgtgtatgaagtaggaacaaagttaagcagtgttgtttgtgtgtgctctttcataaaactgcacttctttgcttcggttactgtttcttcccttttaataagggtattgataggc

SEQ ID NO: 28190 - DNA, 1069 bp, Glycine max
  Clone ID: TF_GmC791_2
gaagatccatagctaataagctaggttcagtagttagtgagtgatcgatatctggagatgggtcgaggcaagattgagataaagttgattgagaaccccaccaacaggcaagtcacttactccaagcgaaggaatggtatcttcaagaaagctcatgaactcagtgttctctgtgatgccaaggtttcacttatcatgttctctaaaaacaacaagatgcatgaatacattagccctggcctcacgacaaaaaggatcattgatcagtatcagaagactttgggggatattgatctgtggcgttctcactatgagaaaatgcttgaaaacttgaagaagctgatagatattaacaacaagctcagaagacagatcaggcataggataggtgagggtttggacatggacgacatgagcttccagcaactgcgcactcttgaagaggatttggtttcttccatagggaaaatacgagaacgaaagttccacgtgatcaaaacacggactgatacctgcaggaaaaaggttaaaagcctggagcagatgaatagagatctgctgtttgaacttgaaaagtgtgcgatccatccacaatttattttgcacgatgaaggagacgaggaatcagcagttgcactggccaacggcgcctccaccctgtatgcgttctgtcatcagcaccattctcatctgaaccttccctcccaccattctcacggagaagaaccctttaaaactgatgaccttcgccttgcttaattgagtgcaacaattaactagcaatgtaaattaactagctagcaagcaagcactaagcacttgttaattatgctttgtattatcctatattggacctgttaaacttaaacgcaacgttgcttccaacctctctagtctctatccagatcgagaattagctgaagcttatatatattatgtagtatttggcaagagtgtggtatgaaaaacagaaagactgtattttatttgttattataagtttacattgagtggttatgtaatattaattgcttggtacgttgcttcagtatgatcatactacttagat

SEQ ID NO: 28191 - DNA, 660 bp, Glycine max
  unsure (1)..(660): unsure at all n locations
  Clone ID: TF_LIB4165-007-Q1-K1-B5
ccagcgtccgattaatatcagtgcttggaaagaaaaggaagcaaaagaaaagagaagatccatagctaataagctaggttcagtagttagtgagtgatcgatatctggagatgggtcgaggcaagattgagataaagttgattgagaaccccaccaacaggcaagtcacttactccaagcgaaggaatggtatcttcaagaaagctcatgaactcagtgttctctgtgatgccaaggtttcacttatcatgttctctaaaaacaacaagatgcatgaatacattagccctggcctcacgacaaaaaggatcattgatcagtatcagaagactttgggggatattgatctgtggcgttctcactatgagaaaatgcttgaaaacttgaagaagctgatagatattaacaacaagctcagaagacagatcagaaagctcattggtggagttgtcttgtgtgaattggaaaggcataggataggtgagggtttggacatggacgacatgagcttccagcaactgcgcactcttgaagaggatntggtttcttccatagggaaaatacgagaacgaaagttccacgtgatncaaaacacgactgatacctgcaggaanaaggttaaaagcctgnagcagatgaatagagatctgctgtttgaac

SEQ ID NO: 28192 - DNA, 578 bp, Glycine max
  Clone ID: TF_LIB4127-114-Q6-K1-G8
caaaaataattaattataaaaatcaacaacataatcatacatgcatgataattctatgattgattaacattataaacgttggtgcttaaatcattctcctcttttacaaaaaataaaaataaaacaagagagaagttcacgtgtttgctaacaaaacatacactttttttttgggtaaataacagaacatacactacattattaatatctttagtgcactgcactgatatgccagaatgtagaacaaattcgactatagtttattttgtggtaaagtgaatgaagactcaccccaatttgagggaagtatctgagctttcaaagtcttgggggggtccagtggaattgcaaacgtacgtaacagactctgaagactgaccttcatccataacaaagttctcagattcggcaccaccatgcctttggccattaattatgcccgccacgtgacgtttaagtcgctcgttctcttccatcaatagcatcccctttctttggagatcagggatctcactcataatcttctcacccttcttttttattacacggcccaatccagtttcaaagagaccttccaa

SEQ ID NO: 28193 - DNA, 697 bp, Glycine max
  Clone ID: TF_700738341_FLI
atgcaggacacaattgaacgctaccgcaggcataacaggagtgctcaaacagtgaacagatctgatgaacaaaatatgcagcatttgaagcaagaaacagcaaacttgatgaagaagattgagcttcttgaggcttcaaaacggttcaagatcttgcttttcaatccatcttcgcaacttgtttatattcactgttagatttatctcacaaagaataaaaataaaaaatatattctgtgtactattcatccctcaggaagctcttgggagaaggtttggggtcatgctccttagaagaactgcaacagatagaacaacaattggaaaggagtgtaagcaatgttcgtgcaagaaagaatcaagtttacaaggaacaaattgatcaactaaaagagaaggaaagagctctatatgctgaaaatgctaggctgtgtgagcagtatggtatccagccacagccagcaacaaaggatccgaaagaaattcaaccctatgcagaaagcagtccaagttcagaagtggagactgaattgttcattggactacccaggtctatctagttgaagataatttaatccttgcctagtatgaaataagaagcccaactgcaatgtataaatatcacatgtttcctaatactttgagatgaataatattatcgcttatattatataaagaactttccaattttatgatt

SEQ ID NO: 28194 - DNA, 1151 bp, Glycine max
  Clone ID: TF_GmC1499_1
cggctgcgagaagacgacagaaggggctacatatatatattatagagattttatacattctaaattttgtgagtgtggacatactctgagcgtgagaaagagaaggggaagaaagagagagagtgatgggaaggggaagagtggagttgaagagaattgagaacaagatcaacaggcaagtgacctttgcaaaacgaaggaacgggcttttgaagaaagcttatgagctttccgttctttgtgatgccgaggttgctctcatcatcttctccaatagaggaaagcagtacgagttttgcagcggttcaagcatgctcaaaacgctggagaggtaccagaaatgcaactatggagcgcctgaggacaatgtggcaacaaaggaagccttggagttaagcagtcaacaagaatacttgaggctgaaagcacgttatgaagctctacaacgttctcaaaggaaccttatgggagaagatcttggccctctaagcagcaaagagcttgaatcacttgaaaggcagctagattcgtctttgaagcaaatcagatcaataaggacccaattcatgctggatcagctttcctgatctacaacgtaaggaacactttctaggtgagtcaaacagagatctcagacaaaggttggaagagtttcaaataaatccactccaactgaatcccagtgctgaagatatgagggtatggacgccatacagatatcatcctgatccagtatcagtggtgacagaaggcccaagcatgaataattacatggcaggatggttaccatgaaagagtgtcaaatgtggagcataattaaagatcctgccgtttaatttcaaatttatttgaagttaaggaaaacggaaatttgtaatagcacgtaatggacttacactagactctaccttctaattaagctaggaacaatataagcagtgattttgtgtgtgagctttcataaacagtacctagctagcctcttccttgttccaataatcacttcttccttttcctaattaataaaactatcgtatgcaccctttgccaccctttgccttttaaaaaaaaaaaaataaaaaaaaaaaaaaaaaaaaaataaaaaaaaaaaaaaaaaaaaaaaaaaaaaaaaagtaaaaaaaaaaaaaaaa

SEQ ID NO: 28195 - DNA, 748 bp, Glycine max
  Clone ID: TF_GmC138_2
ggtggcacacatctatacttgtgcagaagaagaaagatcctgaactaacattcccacacgctcgcttcaccatatttgccacccttttaaccctcacttcttgggtttattttgctccttttttttttccttgtttggggtttgcatttttcctggttgaaaaagggaagaacttgaactaattggttaagttacctatctatctatctatctagggtataatattttatatcagttattaaaggaaagaaagaaagaaacgaagatgggaaggggtaaggtacagctgaagaggatagagaacaagatcaatcgccaggtaactttctccaaaaggagaagtgggttgctcaagaaagctcatgagatctctgtactctgtgatgctgaggtagctttgattgtcttctctcacaaaggaaagctctttgagtatgctactgattcatgcatggagaagatactggaacgccacgaaaggtatgcctatgcagagaggcagctagtagcaaatgattctgaaacacagggaaactggaccattgaatacactagactgaaggcaaagattgaccttttacagagaaaccacaggcactatatgggagaagatttggcttcaatgagcctcaaagagcttcagagtttggagcagcagttggatactgctatcaaaaacatccgcacaaggaggaatgatctcatgtacgcttccatttctgagcttcaaaaaaggagaaaatgatac

SEQ ID NO: 28196 - DNA, 1057 bp, Glycine max
  Clone ID: TF_GmC297_2
cccacgcgtccgatgtaatacatgctaaaaaaagccttgacttcatagtccttaccctaatattcctctttcctcttcttcttcttctttctttcttccgccactgccgcagagcgtagaaggaaatcaaacagcagagagagggtaaagcatacgtgggttaaatccatgcgcatgagtcggaagaatttgtgttagcggtgaggagatatattgagaattaatatttgatagtgtatatatggggaggggaagagtggagtttaaaaggatcgagaacaagatcaataggcaagtgacgttctcaaagagaaggtctggtttgctgaagaaagcgcgcgagatctctgtgctgtgcgatgctgatgtggcttttatcgcattctacaccaaaggcaagcttttggactactccaaccaaccttgttctgaaagaattcttgaaccgtgtgagagggattcctatgccgagagggaacttgttggagatgatcaaccaccaaatgaaaactgggttatagaacatgaaaagctcaggctagggtggaggtactacagcagaaatcaaaggaatttgatgggagaagatctggacagattaaatcttacaggacttcagaggtgggagcaccaacttgattccgctctcaaacacattagatcacgaaagaaccaagccatgaatgaatctatttctgagcttcagaaaaaggataggacactccgtgaacacaacagcttgctctccaagaagataaaggaaaaagagaaggagctgaccccacaagagcaagaaggactgcaaaataacatggatgtgagctctgtccttgtaactcaaccactggagtccctgactattgggttagtatctttttgtgatgtataactgaaatgctccaaactctattcttaagagtgtgtgtgagtatattcatgaattgttaccgtgtatgtgcatatgcatgatttcattttaaccttccatcttgtgctactttgtgtatataccacctcaagttggatgcatgaaaccaatgaataggatgaatgctga

SEQ ID NO: 28197 - DNA, 963 bp, Glycine max
  Clone ID: TF_GmC1414_3
cgccaaggtgttggaacaacttagtggccaaaccccagtgttttccaaagcaaggtacactgttcgttcctttgggattagaagaaatccgaatagaaaaagaagctagctagggtttcggcgcgaagaagaatggggaagaagaaggtggagataaagcgaatcgagaacaaaagcactcggcagataacattctccaagaggcgcaatggattgatgaagaaagctcgcgagctatccattctctgcgatgcgaaggtggcgctgctcatcttctccagcaccggaaagctctacgagctctgcaacggtgacagtttggccgaggtcgtgcagcaatattgggatcatttaggagcgagcggtactgacacaaagtcgcaggaactatgctttgaaattgcagatatctggtctggttcagcgttttctcaaatgatcaaaaggcacttcggtgtttctgaacttgagcatctgagtgtgactgaccttatggaactagagaaactggttcatgctgctctttcgcgaatcagatcagcaaagatgcgattgatgatggaatctgtagagaatcttaagaaaaaggaacatatcttgagaaatgaaaatgagcttttggagaaacagattgaggcacagaaaaaagctgatgacgtcaataacgtggtgacacggtttattgactatgatcaaacagatcgggtgacgcataatctgctccctggtttgtaaatgcagctgaaagccaccactatggatataacttgcacgaattttccaattgtgtgcttaatacatgcatagggaactatgccatggtttagctacttgccttctgttatttctattctggttgaaacatggaccatctagagaagctcttaaacataatgttgccgtggggaagtttgcttcagctactagtctgtgcctaattaaattagtgacatattatatacc

SEQ ID NO: 28198 - DNA, 837 bp, Glycine max
  Clone ID: TF_GM459L07rgnA2.C1.o17.ma
atgggaagaggaagagtggagttgaagagaattgagaacaagatcaacaggcaagtgacctttgcaaaacgaaggaacgggcttttgaagaaagcttacgagctttccgttctttgtgatgccgaggttgctctcatcatcttctccaatagaggaaaactgtacgagttctgcagcagttcaagcatgctcaaaacgctagagaggtaccagaaatgtaactatggtgcgcctgaggctaatgtgtctacacgggaagccttggtaatggagttaagcagtcaacaggagtacttgaagctgaaggcacgttatgagtccctacaacggtcccagaggaaccttatgggagaagatcttggccctttaagcagcaaagagctggagtctcttgaaaggcagctagattcgtccttgaagcaaataagatcaacaaggacccagttcatgctggatcagctctctgatcttcaacgcaaggagcacttgctaagtgaggctaacaggtctctcagacaaaggttggaagggtatcaaataaatccactccaactgaatcccggagttgaagagatgggatatggcaggaatccagctcaaactcatggtgaagccctctttcaacaaatggagtgtgagccaacgttacaaattggtggtgacagcaggcccaagcatgagcaattacatggcaggatggctaccatatctaccgtgtatgaagtaggaacaaagttaagcagtgttgtttgtgtgtgctctttcataaaactgcacttctttgcttcggttactgtttcttcccttttaataagggtattgatagacaaattataa

SEQ ID NO: 28199 - DNA, 1036 bp, Glycine max
  Clone ID: TF_GmC1762_2
tggaagcattgaaggacgtagctgctatggctcgaggaaagatccagatcaagaggatagagaacaccaccaaccgccaggtcacttattctaaacgacggaatggccttttcaagaaggccaacgagctcaccgttctatgcgatgccaaggtttctattattatgttctccagcactgggaaactccacgagtacatcagcccctccacctcaacaaagcagttcttcgatcagtaccagatgactctaggagtcgatctctggaactctcattacgagaatatgcaagagaacttgaagaaactgaaagatgtgaataggaatcttcgtaaggagattaggcagaggatgggagattgtctgaacgatctgggcatggaagatctcaagctccttgaggaagaaatggacaaggccgccaaggttgttcgtgagcgtaagtataaggtgataacaaatcagattgacacccagaggaaaaagtttaataacgagaaagaagtgcacaacagactcctgcatgacttggatgcaaaagcagaagatccacgttttgcattgatagataatggaggggagtacgagtctgtgatcggattctcaaatttaggtccacgcatgttcgcattgagcctacagccaagccatcctagtgcccaaagcggagcagcaggctctgatcttaccacttaccctttacttttttagtacgcaagcttaagcagctcgatctcttcatcaatcagaaataccacattcactcaaatttcaataagaatatgacttgtgatcgatatcttaagttatgcacccgtacgtgcagtttgtacttaaccacaaaacaatctcacgaatcttctcttctcggtcgatcgcatatatgcatgtgtgaattattcagttgcaactactgttatctgtattttctttttgcctaatcatataccataaacatgaagttgtgcttccttttattgagaatgctttagcatgcatgattatttatagagcgtttcatatataagtctatttta

SEQ ID NO: 28200 - DNA, 575 bp, Glycine max
  Clone ID: TF_GmC951_2
aaaaaaggacaaaggaaagtaaataaaatataaagatggcagatgatgaatatagtttctgatgcataaaccacgatggatgaaagttgattcaggttgcaaacatggcttttccagacccatccatgtcagtttctccacagaggaagatgggaagggggaagattgagatcaagaggattgagaacactaccaatcgccaagtcacattctgcaagcgcaggaacggcttgctcaagaaagcatatgaattatctgtgctttgtgatgcagaggttgctctcattgttttctctagccgtggacgcctctatgaatatgctaataacagtgtcaaagcaaccatcgagaggtacaaaaaagcaagttcagattcgtctggcgctggatctgcttctgaggctaatgctcagttttaccagcaagaagcagataaacttcgtcaacaaattagtaacctgcagaataacaacaggcaaatgatgggtgattctttgggctctctgactgccaaggatctcaaaaatctggagactaaattagaaaaaggaattagtagggattcggttcaaaaa

SEQ ID NO: 28201 - DNA, 1356 bp, Glycine max
  Clone ID: TF_GmC1468_1
cggctgcgagaagacgacagaaggggagattaaaagcaagggtagaagttttgcaacgttctcaaaggaacctactcggggaagatcttgcccaaatgaatacaaatgagctagagcagcttgagaatcaactggaggcagcactgaggaatattaggtcaacaaagactcaattcatgcttgaccagctttctgatcttcaccaccgggaaacattgcttattgaaactaataacgtgttaaggagtaagttggaagaaactgatcactcacaagttcaagtaagtctagctttggaagctggagggcctagcatccaatacaccaactttccacctcaatcagaggggttcttcgagccagtgggagtgaaccccaccttgcaaattgggtacaaccagactggtcctgatgatacaaacgtaggagcttcatccttaagtatgcatggattcgcctctgggtggatgctttgatgatattgaatttacatatgttccataaagaacagaaaagaaaactagtcatggatgtgttgaacacttccataatatatatgttttcgtttccttttgttgtgcatcatttatcaatgtttgaataaataaaaattgcgagtagtattatcataaaaatttatgaacctaaaacgttgtatatttgtattgaagttaaaactttaagccatccaatgagtcactgaacttggtttatcatatctacaccaatttgcttgctattagaagccaatctgagctcttggaagataaattgtgatataacattgatcgccattatatattcgggtttcttttccacgggcctaagtagtttggttcacacatggggcctccatcttaaaggcccagtttatatatcaatctttaagcctttgtcgatagtcgttgccgctgctttgagtgttatattcctcggtgatgcattatattttggaagcgttgttggagcagtgatactctcatttgggttttatgctgtcttatgggggaaagcaaaagaagaagaattgactgtagtggactttgatgatatacgtcctccttcaaatactaagagtcctttgttgcagagctacaaagtgaaagatgaagataaccaaaatatttaactatattgtaattttatttgaaattccaaaaaaaaacaaagcattgtgacattttctatttctgattagagtgagaatctaatgcatatcaaacatcttgatccttaaaaaaaaaaaaaaaaaaacttgagaatcaactggaggcagcactgaggaatattaggtcaacaaagactcaattcatgcttgaccagctttctgatcttcatcaccgggtagatgtgtgt

SEQ ID NO: 28202 - DNA, 1210 bp, Glycine max
  Clone ID: TF_GmC176_2
cgcatccatcataggcataccatacctactaaaactccgcgacagatcatatcatatcatatcatttcatgcgataagctagcttatatatacacacacaaataagagggcagaagggaaaaatttgcttgaaaaaatttctaatctattctattctatatacaattatgtcttttccatctggtattctgaaaaggctagtttaatttatttgtggaaagagatataaagcaagcaattaataaaaacatgggtaggggaaaggtggagctgaagaggattgagaacaagataaaccgtcaagtgacatttgcaaagaggaggaatggtttgctcaaaaaggcttatgaactctctgtcctctgtgatgctgaggttgcccttattatcttctccaaccgtggcaagctgtatgagttctgcagcggccatagcatggccaagacacttgaacggtatcacagatgcagttatggagccttggaagtccagcaccaacctgaaatagagacacagaggcgctaccaagagtacctgaagctaaaatccagagttgaggcactacagcaaacacaaagaaacctccttggggaagaattggagcacttagacgttaaggaccttgagcagcttgaacgtcagctggactcttccctgaagcaaatcaggtcaaacaagacacaacaaatgctcgatcaactcgctgatttgcatagaaaggaagagatgctactggagactaacaatatcctgaggaacaagttggaggaaatcaatgtagcccttcaaccaacatgggaaactagggagcaaaatgctccatacaattaccacccttcccaatcagagggatattatgagacagcacattgcaacagtacattgcgaattggctatgattcttcagggttaaatgaagcaggaggagctgcaggaacctcagcccaaaatgctagtgaattcatgaatggatggatgaactaaatttatttccaatttagtttaatttatgattatcagaaaaaaatgatgcttttgtagagatcttggcctacaagaacaggctgtaataataggtgtcatgcagcataaaatatacttatgctattcttaatattccaataagacatgtttttcatgtttataactagatggattgggtgattattaaatgaatggattgaatagtcactccaattagtattctaag

SEQ ID NO: 28203 - DNA, 461 bp, Glycine max
  Clone ID: TF_jC-gmXLIB3564P107dc10b1
gaggagagggcgcccacgcatccgtacggctgcgagaagacgacagaagggcacagaatcaatgctcagtattatcaacaagaatctgtttctgaacagaaatacagatgctgcaaatctaacaggcacctgatggttcgtggtgagcagggtgactgagaaggaactgaagcagcaggagaatagactccaaagaggaggcgctagaggcagatctaagatcatgagatgctatgggctgaaattgaatactttcagaaaagggagattgagctggaaaatgaaaatctttgcctccggactaagataactgacgttgagaggattcagcaagtaaacatgggttctggaccagaactgaatgtcattcaggcattagcttcccgtaacttcttcaatccaaacatgttggacgggggaactgtttaccctcagacagataagaagattcttcatcttgg

SEQ ID NO: 28204 - DNA, 947 bp, Glycine max
  Clone ID: TF_GmC4870_8
atagttattttactgtgtgagagagaaaattaaacatgggaagaggaagggttgttctggaaagaatagagaacaagatcaaccgtcaagtaacattctcaaaacgcagaagtgggttgctgaagaaggcctttgagctttctgtgctatgtgatgctgaagttggccttatcatcttttctagccgtggcaagctttttcagtacagcagcactgatattaccaaaatcattgagaggtatcgccaatgtcgttacagcaagtcacacactggtgattcattggaacacgattcacagagcgcataccatgaattcttgaaattaagagcgaaatatgaatctcttgagcggacacaaaggcattttcaaggagaagaccttgagccacttagctttaaagatttgcagagcctggagaagcaactagacataacgctcgcactaactcgacagcaccaaacgaagaaactcatggcacgagcggatgaattacgcgaaaaggaaaaagatgaattctcgagtctcatccttgacaataacaattacattcaaatgcatgctacacaagttgatcaatttgagtctgagacagcactaaacacatgtaggtttcaacatcaagaagttgtttctaaggaaaaagcaattgataccaggacagagcatagtcaaagcagtcacaacaaaaacaatggatggctgtaatgaatattcatttaatttacatgctaaaaaaatacctatcacaataactaatgggataatgcccattattggtattcacacaaatagtttatataaagtaaatgttatttctactaaacacacattattcctaataagaaattatgtattttatgcatcagaaaaggggatgaattgtgtatttcatctatcattgtataagttgtcattttaaaaaaatttcttaaatattgatatttt

SEQ ID NO: 28205 - DNA, 1052 bp, Glycine max
  unsure (1)..(1052): unsure at all n locations
  Clone ID: TF_GmC698293_1
tgagctattagaaggatacagatttatgagattttacactaaggaaaggatatattttgtgagacaacattgagatttgtcatattgcaaaatgattagtagattaatatacacatataatcagcactgctgctttggcaatccaataaatagttctgtatccacatctaaactctggctacttgaacagtggggttctgcttctgcttgtgtgtgtctaggccattgctgctgggatgacttttctgccctctgccacattgcacttaatttggcattctctttgagcaagttactctcctgggatcgtagttgatcaatctgttccgtatatagttgagtttttctctgcctgactctttgcaaacttatctgcagctgctcctcaattcctttgagttcatcataagaacaagaactcacgctttgtcccagaagctcccttttagaatgttctagaagctcaatcttctttgccaagcttgcggagtctaacttcagttgctggatataatagttgacaaaatcttactgccaggaacatctttggtatgttcacggtatcgttccaaaatctttgtcatgtcagaacttgagaactcatagagccttccgttctgtgagaagactatcacagccacttctgcatcacaaagaacggataactcgtaagctttctttagaagaccacttcgacgctttgaaaacgccacttgacggcttgttgtatcctcaatcttcttcagttgaacctttcccctcgccatctccaaaaattagcaagagacgtcttcaagaagagtttccctttaatttgtgttctttctaaagcaaatatcttcaggttgaagtaatgaaagaagagaaagtgtagggagtggtagaaagaagtggcaaatattccagaaaccctaatcacaaaaacaataaaaatgctaataaatatcatttgaaacattatcaacacacggttacgtgtcaagtatcaaactatgactgtctgnattgtcactacgtccaaaaagctgtaaaccacaagccatgcactgaca

SEQ ID NO: 28206 - DNA, 1331 bp, Glycine max
  Clone ID: TF_GmC134_1
tttctgtacggctgcgagaagacgacagaaggggtctctctctctctctttctctctcatgctttaattctccaacacgagaagttaaattttagagtgagttgggtaattgttggagggtctattttttctgtccataaatacctgtctgctaggccaacccacttccatattttgcatcctttgtacctcagttccaggttaacaccaaacaacacatatagtgcagattcataagcttccaaccatggaggatccaaatcaagctccagaagggtcttctcagaagaaaatgggaagagggaagattgaaatcaaacggatcgagaacaccaccaataggcaagtcaccttctgcaagcgccgcaacggtttgctgaaaaaagcttatgaattatcagttctgtgtgatgctgaagttgcccttgttgtcttctcaacccgtggccgtttgtatgagtatgccaacaacagtgttagggccactattgagaggtacaagaaggcaaatgctgctgcttcaaacgcagaatccgtatctgaagctaacacacagttttaccagcaagagtcatccaaattgagaagacaaattcgagatattcagaatctaaacaggcacatccttggtgaagcacttggttctctgagtctcaaggaactaaagaacctcgagggtagattggagaaaggattaagcagagttagatctagaaagcatgaaacattgtttgctgatgtggagttcatgcaaaagcgggaaattgagctgcaaaaccacaacaattatctgcgagctaagatagctgaacatgagagagctcaacaacagcaatcaaatatgaatatgtcaggaacactgtgcgagtcccttccttcacaatcatacgacaggaattttttccctgtaaatctcatagcttctgatgatcaacaacaatactctcgtcaagaccacactgctctccaacttgtctgatatgctggaagttaaagctactggaagttcatggctctagctagctatttgaatagttacgtgtattgtctatatagtgctgagcaaataatattgccatacaggcatatatatatatatgcctgcgttaatttcctgaatcagttgcgtctttagaattgacgttaattggctagctaaaggtcattattaaactgtgaactaaatgaaccattttggactcatatttcatacgatatatataatgttaatgtatcttttaataagaactagctagtttctgtgtatttgtatttgtctgcatgcatctgttatggcctactgctataaaatggttgttgaaggatgaact

SEQ ID NO: 28207 - DNA, 1124 bp, Glycine max
  Clone ID: TF_GmC134_2
cccgggccgacccacgcgtccgcccacgcgtccgtacggctgcgagaagacgacagaaggggaagctcaagaagggtcttctcagaagaaaatgggaagagggaagattgaaatcaaacggatcgagaacaccaccaataggcaagtcaccttctgcaagcgccgcaacggtttgctgaagaaagcttatgaattatcagttctgtgtgatgcggaagttgcccttgttgtcttctcaacccgtggccgtttgtatgagtatgccaacaacagtgttagggccaccattgaaaggtacaagaaggcaaatgctgctgcttcaaacgcagaatccgtatctgaagctaacacacagttttaccagcaagagtcatccaaattgagaagacaaattcgagatattcagaatctaaacaggcacatccttggtgaagcacttggttctctgagtctcaaggaactaaagaacctcgagggtagattggagaaaggattaagcagagttagatctagaaagcatgaaacattgtttgctgatgtcgagttcatgcaaaagcgggaaattgagctgcaaaaccacaataattatctgcgagctaagatagctgaacatgagagagctcaacaacagcaatcaaatatgatgtcaggaacactgtgcgagtcccttccttcacaatcatacgacaggaattttttccctgtaaatctcatagcttctgatgatcaacaacaatattctagtcaagaccacactgctctccaacttgtctgatgatatgctggaaattagagctactggaagttctgccacagtcattatatatatatatatatcggttgatgtagctctagctatttgaatagttacgtgtagcacctatatagtgcagagcaaataatgccacacatgcatgcctgcgtttcctgaatcagtttgtgcctttagaattgacgttaatttgctaaaggtcattattagactgcgaacttataaatgatccattttggactcatatttcatacgatatatataatgttaatgtatcttttaataagagctagtttctaacccataaaaaaaaaaaaaaaaaaaaaaaaaaaaaagcggccgctctagagga

SEQ ID NO: 28208 - DNA, 1092 bp, Glycine max
  Clone ID: TF_GmC940_1
gagataaaactcggagagaaagggtactagtacgtacctgcaggctgcagcaacctcgaagctagttcaaactagtgggaggttgtgtgcatagaagcacaaacaaattacagaaaaagtcatcatcatactcagaattaatacaaattaagcattgatcttgaattaatggctcgcggaaaggttcagctgaagcgaattgagaaccctgtgcacaggcaagttaccttctgcaagcgccgagctgggcttcttaagaaggctaaggagctctctgtgctgtgcgatgctgaaattggccttttcattttctccgcccatggaaagctctatgaactagccaccaaaggaaccatgcaagggctcattgagaggtacatgaagttcacacgaggggctcagcctgaagcagcagcacctgaagcacatcctcttctggttgctaaagaggaaactaacgcgctaaaacaagaaatccaaacattgcaaaagggtatcagttatttgtttgaaggaggaaataagactatggcaattgatgaattacaactgctagagaagaatctcgaaacttggatatatcatattcgttcaatgaagatgaacattatgttacaagaaattcaagctttgaaagataaggagggaacacttaaagcggcaaataaatatctccatgacaagattgtggagaatactgcgatttctaactttgctgaatttgctactgatacttcttacccactaattgtacaagatgggggttttcaactctattaaatgggttgtttctacaatgttttgtttacatgctttaataaaggaaataatggcgactgggctgtgtttcataacattaaatagtgaagtatgaagcatgaacgttgcacaagcctaatttgcaataatttgtaacattaatattgtgttattctaatatttttatagataagtttgtaatgtaaaagtcagaaaagtgtgatttctgaccattaaattttcttttgtcattaaccaataatgtaaaatattgtgtgagtaacaatgactcaatgatgaggatattatgtattgtatttaatatgtttgtat

SEQ ID NO: 28209 - DNA, 1212 bp, Glycine max
  Clone ID: TF_GmC694_1
cttacgcgtgggcggacgcgtgggtgaacataacttcttcactttgtttcctcaccagcttgcaaaaacatggcttttccaaaccaatccatgtcatcagagtctccccagagaaagatgggaagagggaagattgagatcaagaggattgagaacaccaccagtcgacaagttaccttctgcaagcgcagaaatggcttgctcaagaaggcatatgagttatctgtgctttgtgatgcagaggttgctctaattgtcttttcaaaccgtggccgcctctatgaatatgctaataacagcgtcaaagcttcaattgagaggtacaagaaagcaagttcagattcatctagtggtggacgatctgcttctgaggctaatgctcagttttatcagcaagaagcagccaaactgcgtgtgcagatcagcaatctgcagaatcacaataggcaaatgatgcgagagggtttgagcaccatgaatggcaaggatctcaaaaacctagagactaaattagaaaaaggaatcagcagaattcgttccaagaagaatgagaggctatttgcagaaattgagcacatgaagaagagggagatacacttgaacaatgacaatcagcttcttagagcaaagatagcagcaggtgagaggagtcaccataatgttaacgggttgtctggaagcataagctatgaatcgatgcaatctcagtttgactcccgcggcttcttccaagtaactggattacaacctaataataatcagtatgccggacaagacaacatgtcccttcaatttgtttgaagagtttaagcttaagaaggagaaagacttagatttcctattgtttgtatttgacatctagaatgatatataggaatgctaaagcctatgaagtatgcagaattcaatggagggaattcatttaagtattcccctcagtactatgttatggactatttagtatgcatacaggtactctgagtacagagattgcaccctgccatattttgtcaacttttgtttactttccctatttctcctgtaagataggcttctatatatgtctattaatttcatacttcacttactatgaattcaaggtcctactcatacatgcaactgttcttgagtatgattttttctcgggggatcattgttattggtgcaaagtattcccatcttttttagtatgattaatttaagatttaaaaa

SEQ ID NO: 28210 - DNA, 1270 bp, Glycine max
  Clone ID: TF_GmC1013_2
tcgtagggcgctttgtctgttataatcaacgcgctcctcacgagtgaatttctggttcggaaggatctgattgttagggtttggtatggggagaggtaagatcgtgataaggaggatcgacaattccacgagcaggcaagtgacgttctcgaagcgaaggaacggtttgctgaagaaggcgaaggagcttgcgatcttgtgcgatgctgaagtcggagttatgatcttctccagcaccggaaaactctacgatttcgccagctccagcatgaaatcagtaatggaccgatacagcaaatcaaaagaagaaccttgtcaacttgggagttcagcctctgaaattaagttttggcaaagggaggcagcaatgttaaggcaacaattacacaatttgcaagaaagtcaccgcaggaaaatgatgggggaagaactgtcaggcttgacagtcaaagaattacaaaatttggagaaccaattagaaattagccttcatggtgtccgaatgaaaaaggatcaacttttaatgggtgaaatacaagagctaaatcgaaagggaaacctcatacaccaagaaaatgtggaactgtataagaaggtctatggaacacaagatgataacgaaacaaacagagattctgttctcacaaatggtctaggcataggagaggatttgcaagtgcctgtgaatctccagctaagccagccacagcaacaacactacaaggaaccttcaggaactacaaaattgggattgcaattgcattgatccatttacaggatgtgtgtttcacaattgctatcaagaaaaatggactcagatttaaacctcaatgtcttcgtataaatgtggcatatagaccacagactaattggcttaaagattttaatttgaaattattagaaaaagtaaaagcaaccctagcatgtatgtaagaaacaatgaagcatcttatgagaaactaagactcaaatcaaggaagaaattcttcaacccgcactacttgattattcactcatcgatctgtttttctttctcttttcgtcaattttgcctttcgaaatttgtgctatcgatgttgaatgctgtttgtgttgtgtttgttcatacccgcgcattattacttcgtttccgaagatattagacacaacctttgcacttgatgattgcatataatatttgaaaatccattcctatagtgaattacctgaaccgattaacgaaagcacttggttaggttagggacccttctgtcgtcttctcgcagccgta

SEQ ID NO: 28211 - DNA, 1212 bp, Glycine max
  Clone ID: TF_GmC4870_1
gggggaaaagcgtagtcatcagtttgccgatagaagtagaaaatggaatcttgatcgtattatctttgttgctcatccattactccttctgcagtagaataatatataaagagagaagagtgcaatctagaaccacatagttattttactgtgtgagagagagagagaaaattaaacatgggaagaggaagggttgttctggaaagaatagagaacaagatcaaccgtcaagtaacattctcaaaacgcagaagtgggttgctgaagaaggcctttgagctttctgtgctatgtgatgctgaagttggccttatcatcttttctagccgtggcaagctttttcagtacagcagcactgatattaccaaaatcattgagaggtatcgccaatgtcgttacagcaagtcacacactggtgattcattggaacacgattcacagagcgcataccatgaattcttgaaattaagagcgaaatatgaatctcttgagcggacacaaaggcattttcaaggagaagaccttgagccacttagctttaaagatttgcagagcctggagaagcaactagacataacgctcgcactaactcgacagcaccaaacgaagaaactcatggcacgagcggatgaattacgcgaaaaggtgcataagttggaggatcttaacaaacaattggagtccaaggttttctctttaaataaccatgaaaaagatgaattctcgagtctcatccttgacaataacaattacattcaaatgcatgctacacaagttgatcaatttgagtctgagacagcactaaacacatggtttcaacatcaagaagttgtttctaaggaaaaagcaattgataccaggacagagcatagtcaaagcagtcacaacaaaaacaatggatggctgtaatgaatattcatttaatttacatgctaaaaaaatacctatcacaataactaatgggataatgcccattattggtattcacacaaatagtttatataaagtaaatgttatttctactaaacacacattattcctaataagaaattatgtattttatgcatcagaaaaggggatgaattgtgtatttcatctatcattgtataagttgtcattttaaaaaaatttcttaaatattgatattttacctattggcgtcatcattgtaatcagtttctagtagtagagagaaataattttatcctaaaa

SEQ ID NO: 28212 - DNA, 668 bp, Glycine max
  Clone ID: TF_uC-gmflLIB3275P070a02a1
ctccatatgcaacatatatagctcaataatcgtaatgatatgcagcatacacgttatataatattgatagtttcgtaattagatcgaattcaataatcgtatagcaagttttagagctacgtacactaccgagctttaagaaatacgaattcaataattcttttagatttggctgttttaggctagctgcgcgttgcatatgcgaattgaatccccttttgatctcgtcaaatccattgttcatgcatgtttccaattccttctactgccaaatgctgttgcagaaggaaactgagttccttattttgctcctccaaaatcttgccatttctcttgaacatcctgtgcacttccatctttttctcacggactccactgaggccattttcaagggcatcctctagtgccatcagttccttgtaattgagtgacgtgatgtcctcccctttcaagtgcctgagctcaatttgcatgctgtcattctctttcttgagtctatcaatttcattgctgaggttctcatgcttagcatcccagagggtcttcccagaagctcttttgtatctgtccagaacgtcaatcaacgtggtgtaggggctgatgtattcatgcatcttcccggagacaccaaagatgataagggaaacttgagcatcacatagaacact

SEQ ID NO: 28213 - DNA, 1825 bp, Glycine max
  Clone ID: TF_GmC87_1
gaattcggcccgaagtttcatgaaatggcttaataagcttttcagaggtgggcccaatagaggaaggggtggtcgccacctgcatgagccagcagaggaaagcagagtttggggtgctccatctagagcgttggatgatcgtgctagagctcagaaggagaaagaggatctaggccatgcaatggcactttcttcagccgaagatttaaagagaccaaacgctcatcaaggatataactggggagaagacactggtgatgattactcgaaggcacctcgtgatacccttaactcatctgcacaccctccatttgcccctacaccattttatccccacgaatatagaagaatatgtggtggctgcaaccaagagataatgtatggaaattgtttgggctgcatggatacttattttcacccaaattgttttcgctgtcactcttgtggttaccccattacagagcgtgagttttccttgtcagggaagcatccatatcacaagtcatgttttaaagagttgaatcatccaaaatgtgaagtttgcttccaatttattcctataaatgctgctggtttgattgagtataggtgccaccccttttggtcccaaattattgtccatctcatgaatatgataatacagctcgctgctgtagttgtgaaagattggagcctttgaacataaaatactatagactagaagatggacggagtttgtgtttagagtgcatggaatctgctataatggataccggtgattgccagcccctttaccattctatcagagattactatgaaggaatgcagatgagaatagatcaacaaattcccatgcttctagttgagagagaagcacttaatgaagctattgtaggggagaaaaatggttttcatcacttttaccagaaacaagaggcttatgcctttcagaagagcagactgtcaccagtatacatagaagaccaagaattggaggccatcgactaatcgggatgcgaactcaacctcaaaaactgactagaaaatgtgaagttacagcaattcttgttctatatggtcttcctaggtaactagtggacaatggaaactttgctttttgtccccttcgaattacagctgattgattcccttttgaatataattgtgagttcagatatttttccaatacccataagacacagtaccaatgacagactataatgttactttcttctcattgatgatgttcaaacttcattataggagttctcatattttaatgggatgcaggttactcacaggtgctatacttgcccatgagttgatgcatgcatggctacgccttaatggttatcgcaaccttaatcctgaagtagaggaaggcatttgtcaggttctttcgtatatgtggcttgagtcagaagtaatgcctagctttcaaaacatgccatcaacatccacaagtgctgcctcttcctactcctcctcaaagaagggtgcaaagtctcatgttgaaaataaattgggtgaatttttcaagaatcagattgccaatgattcttccccagcttatggtggtggctttagagctgctaatgaagctgttaatagatatggtttgcgtagaacacttgaccatattcattggactggttttttcccagtgtaataagtatggatagaagtgctttgttttcattttctttggttctacaagtggatggaccaggaccaattcaaagtaaagacagaagcttggacaacttctgatatttgggtcctacgaggaagtccaagtctaatttgaccaaaaaataaataaatgcatgacaagttcgtattcaaa

SEQ ID NO: 28214 - DNA, 409 bp, Glycine max
  unsure (1)..(409): unsure at all n locations
  Clone ID: TF_LIB3242-630-P2-J2-F5
aattcggctcgatggcactttggtaaggtgagagaataggaaaaagggaaatatggcatttgcaggaacaactcanaagtgcaaccaaggtatatgatccctttgtgtgagctttaaatagaggggaagagcagaacaaatgaagaagagaggagataaggatcatataccttggttgcactttggtaaggtgagagaataggaaaaagggaaatatggcatttgcaggaacaactcanaagtgcatggcttgtgacaaaacagtttatctggttgataagttgacagcagataaccgagtgtaccataaggcttgcttcagatgccaccactgcataggaacactcatgcttatcatctataactcttttgagggggtgctntactgcatgccacactgcgaccaact

SEQ ID NO: 28215 - DNA, 515 bp, Glycine max
  Clone ID: TF_GmC7454_3
caaagtctaaatttggagtctcctcccagatatggaaacgaaaatatgtatcaaccaccaattcagtatttccccttggggtccaggatttgtgctggctgctatactgagattggttttggacgatatctaaattgcttgaatgcattctggcatcctgaatgcttccgctgccgtgcttgcaacctaccaatctctgattacgagttctccacatctgggaattacccttaccataaatcatgctataaggaaagctaccatccaaaatgtgatgtctgcaagcacttcattccaacaaatcctgctggtcttattgaatatagggcacatccattctggatccagaaatattgccctactcatgaacatgatggtactccacgctgttgcagctgtgagcgaatggagtcacaagaggcaggatatattgctcttaaggatggccggaagctctgcttagagtgtctagattcttctatcatggatactaatgaatgccaaccccttcatgc

SEQ ID NO: 28216 - DNA, 382 bp, Glycine max
  Clone ID: TF_uC-gmflLIB3275P088g01b1
accacgcgatagctcacgcgtccgactgttatgcctcagtctcctgctcaatcttcattgacctgtaatttcccttgatgacaaaccaagactaacacacacagaacatagcttgtgttggagaggtgagaagacacagaaagaatggcaactgcaggaacaacacagaattgtaaggcctgtgacaaagccgtatatctggtagatacgttgaccgcggataaccgagttttacacaaagcatgcttcagatgccatcactgtcaaggaacactcaagctgagcaactacgactcatttgaggtagtgctatatatgtagccacactttgaccaactgggcaaaagaacagggagcctagacaaaagctttgaaggaacac

SEQ ID NO: 28217 - DNA, 871 bp, Glycine max
  unsure (1)..(871): unsure at all n locations
  Clone ID: TF_GmC5988_8
atctattcctgcacctctctacacacaaatacacaaatgttggacatatttaatgagagcgtgagagcgtgagaggtgagacaaaggattgccaacctgaatgtgaataattttgcatgaaatgggttggtttaccaagttgcttaagggctctgatcataaaattttacgaggacaataccatggcaaatatggagaggacagaatttgggataatcatcatagttcaatggatgatttgactgatattgagaaagaagacattgaccgtgcaattgcactttctctgtcagaggaggatcataaagggaaaaaagttgttgatgaggaactttgtaaaattgatgatgatgaggaggatgaacatcttgttaaagttcatctagatgaagatgaacgtcttgctaaaattcagcaagaagaagaagaacgtcttgctaaaattcaacaagaagatgagcatcttgctaaaattcaacaagaagaagaagaacgtcttgctaaaattcaacaagaagatgaatgtcttgctaaaattcaacaagaggatgaacgtcttgctaaagctcaacttgaggaagacgagcaacttgctagggcaattcaagaaagcttgaaaattggttctcctcctcaatatgacaatggttcttcaattctatcttttcctcaccttttcccccctggatacagaatctgtgctggatgcaagactgagattggccaaggaagatttttaagttgcatgggaggtgtctggcatccagaatgcttctgctgccatgcatgccatcttccaatcactgattatgagttttgcatgtgtaggaatgggacttaccatgngtggtgctgtggggagaagggtggg

SEQ ID NO: 28218 - DNA, 2485 bp, Glycine max
  Clone ID: TF_GmC7403_1
ggggactttgtttcttcatacacagagagaaagtctggttttatgaaatggtttggtaagattttcaacattggatccagtagaggaaggggtggtggtcgtcatctgcagcagcctgttgaggaaaacatggtttggcctgctcctgctagatccttggatgaccgtgctagatctcggaaggaggaagaggatctagatcacgcaattgcactttctttaggcgaaaattttaagagaccaactggatatagatggcgaacaggaactgatgaagattatgcaaaggctcttcaggatcgcaggttctcatctgcacatcctccatatgcccctgtacctttttatccccggggatatggtgtgccattgcataacagaacatgtggagggtgcaaccaagagatactctatggcaattgtttaggagttggccatagttattttcatccagactgctttcggtgtcactcttgtcgttaccccattactgagcgtgagttttctttgtcagggaagcatccatatcacaagtcctgttttaaggaattgacacaccctaaatgtgaagtttgccatcaatatataccaataaatgctgctggtttgattgaatatagatgccacccctattggaaccaaaagtattgcccatctcatgaatatgataatacagctcggtgctgtagttgtgaaagattagagtcgcggggtgaaagatactatagattggaagatggaaggattttgtgttttgagtgcatggaatctgctataacagacactggtgaatgtcaacccctttatcattccatcagagactattatgaaggaatgaacatgaaaattgatcaacaagtaccaatgcttctcgttgggagagaagcacttaatgaagccattgttggggagaagaatggcttccatcactcaccagaaacaaggggcttatgcctttcagaagagcaaactgtcacaagtgtatatagatggccaagaattggaggccatcgattaataagcatgagatctcaagctcaaaggctgcctagaaaatgtgaagttacagctattcttgttctctatggtcttccaaggttactcacaggtgctatacttgcacatgagttgatgcatgcttggttacgcctcaaaggttaccaaaaccttagtcttgaagtagaggaaggtatttgtcaagttctttcttacatgtggcttgatgcagaagtcatgtcatgtgctagaaccacgccctcaacatcatcatcagcttcttcctcctcttactctaactcatcaaagaaaggtgtgaaatctcttgttgaaaataaattgggtggcgttgggtggtggcatttgggtgcggcgatggtgttgggcggaggttttggggagagacaattaaggcttttgcttggaagatgaaggataaaatgggggatatttgccattttggtagtgcaccaaataaaaatggggtgtataaagcaattgcccataggttccttttttcttcttgttagttagggcactttttgcatggagttaggcatcctgtatcctcctattatgtttgaaattattttattacccttaatgaattaacatcaccttccccaacccactcgtgaaggcttctcccttcctccttcgtctcgaaaccgtgcatcctcgttcctgtgctcctttgtcattgaaggtcagcttcttcctttctagtgtggttgaggttggtttctggtggggttggggttgggttctggtgaaggtgagtttcggtgagggtgggtttcggggtggatgaggtcacattccataatgacctttccataagcaaaaaaccctactaaaatgagttttccataagcaaaaaaaccttatggaatgacctttctgaaagctaaaaaaacttccaaaatggttgttctagaagtactttagcttaagactattccggaagcaaatttgttaatccaaaacatcctttctagaaatgtattttatatattctggaaaacgggttccagaaatcagtatcgggcttacgaaaagcccattttgaaagctacaactacaatctgaagtagcatttccaaaagttattttgcatcttttggaaaggtcattttggaaagtacgattttggtttatggaaggaccattccagaagaaaaaattgcaatccagaatagcctttttggaagtacattttgtaccttttggaatgattgttccagataacactatttttgtttacgaaaaaggttttcataagattttccttttggaataaccatttcgaaagaaaatttattcccttatagaaagcctattctggaaacaggtccacaatgagaatgtaaatacattaaaaggtacatgcaaagtggagagttggagaatgagaaggacttctacgacgtcaagttggacttgctttgtacctccgatggctgtgggaagaagagttggagaagaagag

SEQ ID NO: 28219 - DNA, 712 bp, Glycine max
  unsure (1)..(712): unsure at all n locations
  Clone ID: TF_LIB4390-036-R1-K1-B7
tggggtttatagttcttctcgctcagagagaaagtccggtttcatgaaatggcttagtaagcttttcagaggtgggtccaatagaggaaggggctgtcgtcacctgcatgagccagcagaggaaagcatagttcggggtgctccatctagagctttggatgatcgtggtagagctcagaaggagaaagaggatttaggccttgttttggcactttcttcagccgaagatttaaagagaccaaacggatataattggggagaagacactggtgatgattactcaaaggcacctcacgatacccttaactcatctgcacaccctccatttgcccctacaccattttatccccatccccacaaatatagaagagtatgtggtggctgcaaccaagagataatgtatggaaattgtttgggctgcatggatacttattttcacccaaattgttttcgctgtcactcttgtggttaccccattaccgagcgcgagggaagcatccatatcacaagtcctgttttaaagagctgactcatcctanatgtgaagtttgcttccaatttattcctataaatgctgctggtttgattgagtataggtgccaccccttttggtcgcanaagtattgtccatctcatgagtatgataatacagctcgctgctgtagntgtgaaagatgggagcctctngacataaatactatagactagaaga

SEQ ID NO: 28220 - DNA, 2093 bp, Glycine max
  Clone ID: TF_GmC7454_1
ggcctttgaggtctcagggctccgaaaggaagaggaagaaggaggaggaccgcacccccctccagcctccagcttttattttcgttgattgttccttcctccttcctttctctttaatcccgaacaaacgctgcctcctcgtttcttctattttgactttcaaatcgcgtgcaattctaatttcctcacctcaccttatcatgtctgcgattttctatgatcatctgtcttccctatcctatttgttgtttcacttctcccctttgacattaaaaatcactaacaacaaccaaataattattttacactaaggaaaattgttctagttgggtgctatcttgtaattggttatatatgatatctaactccactaactacaccctaattcttcaattgcgtctcgagccctgcctcatctgtaccaagtacaaattttaattgttaaacatctttgtttgagagtaagcatggatagtgctttaaggacagcgactgtatcagatatgtcgcctgtttatagagatgggtttaaagcaggtctagaagcagtgcgtaaatatggtctacaaaggacccttcttcatatcaggttggcagggacttttccatgctaggaacagaggccccccctttaacagatttgaactcattctttctagatataacacttggcctgttactagtagcgaaaccgaggccaaggtgtgtaaatattatagcttcacaattagaagaagatgaactacttgtaaagagctatagcgcaaagtctatcttgattactttcaccccagtttttaatgtatcacaatgtatctaccaccaattcagtatttccccatggggtcctggatttgggctctctgctatactgagattggttatggacgatatctgaattgcttgaatgcattctggcatcctgaatgcttccgctgccgtgcttgcaacctaccaatctctgattacgagttttccacatctgggaattacccttatcataaatcatgctataaggaaagctaccatccaaaatgtgatgtctgcaagcacttcggcacatccattctggatccagaaatattgccctactcacgaacatgatggtactacacgctgttgcagctgcgagcgaatggagtcccaagaggcaggatatattgttcttaagtatggccggaagctctgcttagagtgtcttgattctgctatcatggatactaatgaatgccaaccccttcatgctgatatacaaagattttatgaaagcctaaatatgaaactggaccaacaaattccacttctattggttgaaagacaagcactgaatgaagcaagagaaggagagaagaatggccactatcacatgccggaaaccagagggctctgcctctcagaggagctcagcactttctcgagacgacctagacttgggacaacaatggacatgagagcacagccatacagaccgactacacgctgcgatgtgactgcaattctcattttatatggtcttccaaggttacttactggatcaatcctagctcatgagatgatgcatgcatggctgcggcttaaaggttatcggactctaagtcaagatgttgaagaaggtatctgtcaggttttgtctcatatgtggttggagtctgaactttcttctgcatcaggcagcaactttgtatcagcctcatcctcgtctgcatcacatacatctagaaaaggtaaaagacctcagtttgagaggaagcttggggagttcttcaaacaccagattgaatcagacatttcccctgtttatggaggtgggtttagggcaggtcaaaaagcagtgagtaaatatggtctacaaaggacccttcatcatatcaggatgacagggacttttccatattaagtacaaagataccccttttaacagattgtttctcattatttctagatataaagcctggcctgttattattagaaaccgaggccaaggtgcttaggcataagcttccacgaattgttgattttttgtacttgtaattattgataccgttcattcacattttttcttttgatttatcagactgctactttttggcatt

SEQ ID NO: 28221 - DNA, 389 bp, Glycine max
  Clone ID: TF_uC-gmroLIB3258P128b11b1
gctttctgctacttaatcatcacagacctggaatttcccttggtgacaaaccaagactaacacacacagaacataacttgtgttgttgaggtgagaagattaccatagaatggcctttgcaggaacaacacagacttgtatggcctgtgacaaaaccgattatctggttgatcagttgacccccgataaccgagctttccacaaagcttgcttgagacgccattattgcataggaaccctgaggctgagcaactacaactgttttgacggagttctttattgtaagccacactctgaccaactgttcaaaagagcagggagtccttgacaaaagctgtcaaggagcaccaagaattgccaagccacataaaaatctgtaagagaaacct

SEQ ID NO: 28222 - DNA, 1211 bp, Glycine max
  Clone ID: TF_GmC1586_1
aattcggctcgagctgaggtgcaataaggttatgagtgctgttttctcttcttgaacttctctttaatcctcagatcctggattaaaggaaaaacataaacatcagccagaaaattcctgagccttgttttacatctttcttcaggaaggaaaagaagaagcaaaatgtcattcacaggaactacagataaatgcaaggcttgtgataagactgtttatgtggttgacatgttaactcttgaaggtataccttaccataaaaactgcttcagatgcagtcactgcaagggatacctaacgatgaacacctactcctcaatggatggtgtcctctattgcaagccacactttgaacagcttttcaaggaatctggcaatttcagcaagaactttcaaacagcaaagtcttctgataaacaaaatgagacgaataaggcccccaacagactgtcatccatgttcagtggaactctagacaaatgctcagtttgttcaaaacagtctatcctctggaaaagatgacactggaaggggaatgctatcacaagaattgctttaggtgtgctcatgcaggttgccacctcacacattcctcttatgctgccctggatggtgtcctctactgtaggcaccatttccaacagcttttcatggagaaagggaactatcatcatgtactccaatctgctaaccacaagaagaatgtcactcctgaacctgctgaacctgcagctgaaggagatgaagagccaccaaagccagaagaatctgattctgaggaacacacagaagaaaagcctcaaaatgaagcataggacatgagctgcttcctccctttctttcaggatcctactatatataaaaaggtgtcttttgttagagtgttgttggcacactcttttgtctggttgaattccactgtctaacatttctttttacaaattagtttaattgtaagctaatttgagaggtttattatgtatttaaacaaagagttgttaaatacaatatattttttacccttttgttggaggtttttctcctgcagtgatatgatatcatatcactactgtgtaataacataagggacacagtctcatattgttcaccaatttgtctgccgatttgcacttcaacccaatatataatatatattagtattttagtttaaaaaaaaaaaacaaaacaaaaaaaaaaaaaacccacccaaa

SEQ ID NO: 28223 - DNA, 1346 bp, Glycine max
  unsure (1)..(1346): unsure at all n locations
  Clone ID: TF_GmC102_1
acaggtgtttgaaggaccaacattcaagattctggaacggtgcagctgttgttgctttctgttcctctgttgccgtttgcctgatgcagacttagttttatgtcatttgtctcaacttgctcttcttcttctctttcaccctccaaattttctcacctctctctttattcaacttcctcttcgtttttttttcctttccttaaccgtcacactatttccccctcttcttcttcaccttttcagtttaaagcttcagattctcaacagatccacaatttttcagtccaatagcttccagatcacaaccgatccaccattcaccactatctcttaagcaaactcaatgttactgacaggcaaatctaccaagaaaagtggtctctgaagtcgatccagtgccttgtgaatttggaattggtggtgaatttatgatctaaaagccatagcaatgtcttttatcggtacccagcaaaagtgcaaggcttgtgagaaaacggtttatcccgttgatcagctttctgctgatggtactgcttatcacaaagcttgcttcagatgctctcactgcaaaggaacattaaagctgagtaactattcctcaatggaaggtgttctttactgtaagcctcactatgagcagctcttcaaggagagtggctccttcagcaagaacttccagtcacctgcaaagctagctgataagacaactcctgagctgacaaggtctcctagtaaagctgcgagcatgttttctggcacacaagaaaagtgtgccacatgtggcaaaactgcttatccattagagaaggtaacagtggaagggcaggcctatcacaaatcatgtttcaagtgttcacatggtggatgtcccataacgccatcgaattatgcagcccttgagggcattttgtattgcaagcaccacttctcccagctttttaaggagaaagggagctataatcatcttactaagtctgcatcagtcaaacgggcagccgcagccacagcagcagcaacaacagctgcctctgttccagaatcttgaatgttggttccttcaattgccttttctttttcaaatacattttggtttgtgaagcaagtgtttgtatgtgtggcctttttggtttttgattgttctctcgtgactttgatcatttctgatatttttacttacacatgcgtggcgtgcaaatcttgtgtggtttattcatataatggacatttagtaaagacgagactaatgagagcgtgatttgcaagatatatcattccaggttgatgacaatgccgcccctccccttctcgaccgtgtgctctcctttattttattgtccttatcttnc

SEQ ID NO: 28224 - DNA, 860 bp, Glycine max
  Clone ID: TF_GmC102_4
agcaggtgtttgaaggaaccaacattcaagattctggaacagaggcagctgttgttgctgctgctgtggctgcggctgcccgtttgactgatgcagacttagtaagatgaatttagatctaaaagccatagcaatgtcttttatcggtacccagcaaaagtgcaaggcttgtgagaaaacggtttatcccgttgatcagctttctgctgatggtactgcttatcacaaagcttgcttcagatgctctcactgcaaaggaacattaaagctgagtaactattcctcaatggaaggtgttctttactgtaagcctcactatgagcagctcttcaaggagagtggctccttcagcaagaacttccagtcacctgcaaagctagctgataagacaactcctgagctgacaaggtctcctagtaaagctgcgagcatgttttctggcacacaagaaaagtgtgccacatgtggcaaaactgcttatccattagagaaggtaacagtggaagggcaggcctatcacaaatcatgtttcaagtgttcacatggtggatgtcccataacgccatcgaattatgcagcccttgagggcattttgtattgcaagcaccacttctcccagctttttaaggagaaagggagctataatcatcttaataagtctgcatcagtcaaacgggcagccgcagccacagcagcagcaacaacagctgcctctgttccagaatcttgaatgttggttccttcaattgccttttctttttcaaatacattttggtttgtgaagcaggtgtttgtatgtgtggcctttttggtttttgattgttctctcgtgactttgatcatttctgatatttttactt

SEQ ID NO: 28225 - DNA, 1439 bp, Glycine max
  Clone ID: TF_GmC5796_1
attattttatattattttttgtctatagtaagtttgaaaattaggtactacatcatatgcatgatcagcatttgtaactgctcctctgaatttgtctgagtctgagctgttgattctcccaacacaactaaaaaaaagaagaaaaacttagagtggtagttgtaggaaagcaagaacagtgaagtgttctcctaattcagtgagtgaggttctgaattcttcaacttgagatgatggcatcatttgcagggactactcagaagtgcaaagcatgtgagaagactgtgtatttggtggatcagctcactgctgacaacaagatctatcacaaatcatgtttcagatgctaccactgcaagggtacccttaagttgagtaactattgttcctttgagggtgtgttatactgtaagcctcattttgatcaactctttaagaagactggcagcttggacaaaagttttgaaggtattccaagaactgctagacttgaaagatctactgatcaggtccaaaccaatagcaaggtttcaaatttgtttgctggaactcaggaaaaatgtgttgcttgcaagaaaacagtttacccaattgaaaaggtagctgttgatggaacatcttaccataaggcttgtttcaggtgcactcatggggggtgtgtaattagcccctcaaattacgttgcccatgaacatcgtctttattgtaggcaccatcacactcagttgttcaagcagaaaggtaacttcagccaacttgacaagcaagaaaatgatgaaggggtgactgagaacacaataactgagtaatagcatgcatgcaactttcaagttactttggcaatacaagttcagttggtgactcattttaaggcatcaaatgcccttgtctcaatccacattaaattctgtttactgtgtatgtgaaaagttttgtgagacaaattttggggttgataattgagaagaattagtagatagtttggcttaattatacggctgaccagtctgcatttttctttgaagcttaatgaagtttgtatttttcattattgtgataaaatctggttttctctgtgtatttactgttgcttttggttattcgcataatatttcaaaaaaagctaaaaaaaaaaaaaattttacaatttgccaattgcaaattcttgatgtcagcactctacatgctgctctgccacattccactgctgttagaatcatctcaaattctcgtttgtatacacgtaaatcacttatctattagtaggattttaatgtatttcaaatatttgtataagtagaaatttctttctgtcatctgggttttggttcaattatgtatgtggtttaacattcatagctgcatgaccaccaagttctcaaatactgtaaatagctgccaaaaaatatatccaacatcaaagattacaaaaataaatt

SEQ ID NO: 28226 - DNA, 1167 bp, Glycine max
  Clone ID: TF_GmC1184_2
ctgcttttgtctcctgcctcccacatttcaccaccccctttatccttatctcctctcttcattgttctgctcttccccttaacaaacaataactctatttaaagcacacacaaagggatcatatatcttggttgcaccttggtaaggtgagaaaatatggcatttgcaggaacaactcagaagtgcatggcttgtgacaaaacagtttatctggttgataagttgaccgcagataaccgagtgtaccataaggcttgcttcagatgccaccactgcaaaggaacactcaagctcagcaactataactcttttgaaggagttctttactgcaggccacactttgaccaactgttcaaaagaactggtagtcttgacaaaagcttcgaagggacaccaaaaattgctaaaccagaaaaaaccggggaagagaaacctgcagcaaccaaagtctcaagtatgtttggtggaactagagataaatgtgcgggttgtcagaaaacagtgtatcccactgaaaaggttaccgtgaatggaactccttatcacaagagttgtttcaaatgcactcatggagggtgtgttattagtccctccaactacattgcacacgaaggcaaactctactgcaagcaccaccacatccaactgatcaaggagaagggcaatttaagccaacttgaaggtgaccatgagaagagtacagaggaagagaaaatcaacggtgaagtggttgcagctgagacatgaaatgaaggctcgagcttgagttatgacaaatgaatattctcttcctcaagttccatatttctgtatcatgtgtttgtgctatatctcctgctttatcattatggagtccataatgctcttgaaaaatatggtaatcccttttttttttgtggtcggggacttggggtgtgtgaaaatccgtcattttgttttctgttgctgtgaggttgtggatactaaaaatgagacttaatggcatgcgattctgaatgtgattcagaagccagtgctactgaatttgtatgaactctcttttgtattcatattgatacatatacatacatcttaatccccgaaaaaaaaaaaaaaaaaaaaaaaaaaaaaaaaaaaaaaaaaaagctaaaaacaataaaaaaaaggggctgcccttcaccatttggc

SEQ ID NO: 28227 - DNA, 816 bp, Glycine max
  unsure (1)..(816): unsure at all n locations
  Clone ID: TF_GmC102_3
cgctaagcctcggagattcggtttcgagtaaaatctcttcatttttctctctttgttacattttcattatggtgaccaagatatgatctgttatcaatatatattcaatgacatacacagtcccgagtgctaaacctgagtttaaagcttcagatcacaacagatccaccattcacctcaccactttctcttcacaaggcaaatctaacaagaaaaagtagtctctgaagccgatccagtgtcttgtgaatttggaattggtagtgaatttagatctaaaaagccatagcaatgtcttttatcggtacccagcaaaagtgcaaggcttgtgagaaaacggtttatccagttgatcagctttctgctgatggcactgcttatcacaaagcttgcttcagatgttctcactgcaaaggaacattaaagctgagcaactattcctcaatggaaggtgttctttattgtaagcctcactttgagcagctcttcaaggagagtgggtccttcagcaagaacttccagtcacctgcaaagctagcagataagacaacacatgagctgacaaggtctcctagtaaagctgcgagcatgttttctggcacccaagaaaagtgtgccacatgtggcaaaactgcttatccattggagaaggtaacagtggaagggcaggcctatcacanatcatgtttcaagtgttcacatggntggatgtcccataacgccgtcgaattacgcagcccttgagggcattntgtattgcagcaccacttctnccagctttttaggagaaaggagctatatcatcttactagtctg

SEQ ID NO: 28228 - DNA, 768 bp, Glycine max
  Clone ID: TF_GmC102_5
catttccccacgcgtccggtcccgagggctaaacctgagttgtgtctcaagttgctcttcttctttttttcttttctttcaccctcaaaatttctcactctctttatcttcaccttttcagtttaaagcttcagatcacaacagatccaccattcacctcaccactttctcttcacaaggcaaatctaacaagaaaaagtagtctctgaagccgatccagtgtcttgtgaatttggaattggtagtgaatttagatctaaaaagccatagcaatgtcttttatcggtacccagcaaaagtgcaaggcttgtgagaaaacggtttatccagttgatcagctttctgctgatggcactgcttatcacaaagcttgcttcagatgttctcactgcaaaggaacattaaagctgagcaactattcctcaatggaaggtgttctttattgtaagcctcactttgagcagctcttcaaggagagtgggtccttcagcaagaacttccagtcacctgcaaagctagcagataagacaacacatgagctgacaaggtctcctagtaaagctgcgagcatgttttctggcacccaagaaaagtgtgccacatgtggcaaaactgcttatccattggagaaggtaacagtggaagggcaggcctatcacaaatcatgtttcaagtgttcacatgggtggatgtcccataacgccgtcgaattacgcagcccttgagggcattttgtattgcaggaacacttctccagctttttaggag

SEQ ID NO: 28229 - DNA, 557 bp, Glycine max
  Clone ID: TF_21600799
cctcgtgccgaattcggcacgaggcaaccattcccttctggttcattctttgaaaaaggtggaatgccttactgtcaatcttgcttccaaggaactttcagttcaaaatgcgctggatgtggaaatatggcgtctggtcaattgatcaacgctttaggtcaaaaatggcactcacaatgcttttgttgtagttattgtagaagaccattcaatggccttccttattttgaaaaagatggaaaaccatattgcgaacaacattatcacacttctgctggttccatttgtgcaggttgtagaactgcaatcgttggtagatgtgttgatgcattaggtcaaaaatggcaccctgaacactttgtgtgttcttattgtatgaacccactctctggcggtggttacactgaacaacatggtagcccttattgtcaagaatgctttgctaatctattttaaaattgataaattttggaatcgcttcagtaaggaaatattgttttattacagaattgtatcttaaataaattagtgtttcaaaccgaaaaaaaaaaaaaaaa

SEQ ID NO: 28230 - DNA, 377 bp, Glycine max
  Clone ID: TF_LIB3107-008-D2_FLI
tacggctgcgagaagacgacagaagggtacggctgcgagaagacgacagaagggtacgcctgcgagaagacgacagaagggggttgcactttggtaaggtgagagaataggaaaaagggaaatatggcatttgcaggaacaactcagaagtgcatggcttgtgacaaaacagtttatctggttgataagttgacagcagataaccgagtgtaccataaggcttgcttcagatgccaccactgcaaaggaacactcaagcttagcaactataactcttttgagggggttctttactgcaggccacacttcgaccaactgttcaaaagaactggtagtcttgacaaaagcttcgaagggacaccaaaaattgctaaacc

SEQ ID NO: 28231 - DNA, 976 bp, Glycine max
  unsure (1)..(976): unsure at all n locations
  Clone ID: TF_GmC102_2
caatcaatttaatatattcatatccttccacctgagttcttagtcctgaatgtccttgtctgtctcagtgtctctcttcacaacctcaccgatctgccatttcacactcataacaactttgtacaatttgactcgatatgttgaagtttctctgcagctaaattgaccaatagtttggtgcacttagatctaaaagctagaaagatgtcttttattggcactcaacaaaagtgcgaggcttgtgacaaaacagtgtaccccgttgatcagctttctgctgatggcactgcttatcacaaagcatgcttcaagtgctctcattgcaaaggaaccttgaagctcagcaactattcctccatggaaggtgttctatactgtaagcctcattatgagcaactcttcaaggagacaggatctttcaagaagaacttccagtcacctgctaagcaagctgtcaaaacaactcctgagctgacaaggtctcctagtaaagctgctagcatgttttctgggacccaagaaaagtgtgctacatgtggcaaaactgcttatcctttggagaaggtaacagtggaaggtcaggcctatcacaaatcttgtttcaaatgttcacatggcagctgtcccataactccatccaactatgcagccctggagggcgttttgtattgcaagcaccatttttcccagctttttaaggagaaagggagctataatcatcttattaaatctgcatcaatcaaacgggaagcaaactctgttccacaagcttgagtcatggtgttgtcttttgttgttattatcatctttggaataagtgtttgtgtttttttcattttgattctacttaccatgacaagtttccttcttgttcactttatatgtgggtgtcgctagtgtgcaatttacagtgtgtgatgtatttgaccaatgcacattcagtaataatagtgtgatttgcaagatgtcgcgtnta

SEQ ID NO: 28232 - DNA, 1432 bp, Glycine max
  Clone ID: TF_GmC1061_2
gcttgtgttagtgaggttagaagataaagaaagaatggcatttgcaggaacaacccagaagtgtatggcctgcgacaaaacggtttatctggttgataagttgaccgcggataaccgagtgttccacaaagcttgcttcagatgccatcactgcaaaggaaccctcaaggtctctctccctcttttacaattcttgttgattatatagtctctatctagttcaggcttctagctttggatctggtgtctgtaatttggttattagaaggcatgtgaatgtgctggatagcgtgtttggaaagaattgggtcgcagatcgccaccttctctccatgtctaaggatcaaaatacatggaagttacttcaagttgcttctgatgaatgtggtttatcacgtttgcactgtgtttccaaacacacagggaaacagaataatgactaacatcaatcttagaagcatttcctttaagtagtaattcagagttctttttctttatatataattttaagcactttcttcttaagaacatattatgtctctgtctcaaaactttccatgatttcatgataatactgataaatgatataggaaattaggaacctcttttcccttttggtgtattaaaggcttgttagcacattgcaattttcattaaatgatgttttctgactaattaatgtatctatctgcagctgagcaactacaactcttttgagggagttctttactgcaagccacattttgaccaactgttcaaaagaactgggagccttgacaaaagctttgaagggacaccaaaaattgccaagccagagaaaaatttggaagagaaacctgcagcagccaaagtctcaagtatgtttggtggatcaagggaaaaatgtgctggttgtcagaaaacggtgtatcccactgagaaggttactgtgaatggaactccttaccataagagttgttttaaatgctgccatggagggtgtgttatcagtccttccaattacatagcacacgagggaaaactctactgcaaacaccaccatgtccaattgatcaaggagaagggcaatttaacccaacttgaaggtgacaatgagaagagtgcgactaatgggaaaatcaatggtgaagaagtttccgcagagacatgaaggagtcgagtctcagaattttgctttctcaagtttcatatttgtgcaccatatatttctactctctcttgcttttaccattactttgcagtccgggaagctctttacccgtgacaaatatggtattctattttttgttagacaaagtgtgcggatcttcaccatatgtttttggttgttgtgagcgtttgattcaaaatgtgtgatttagaagtacatgttactgcacttcttaacactctcatggacttccaattgatattatatacaatcgttacaccc

SEQ ID NO: 28233 - DNA, 1026 bp, Glycine max
  unsure (1)..(1026): unsure at all n locations
  Clone ID: TF_GmC1586_2
aattcggctcgaggttcaattcccttttgtctgaggtgtgtgcattcttgtttaactcctctttgttcctcagacatcccagaagggaaccaaaaataaaaaataaaaaaataaacacaatcaataaaggggagaaaacaaacatgtcattcacaggaactcttgataaatgcacagcatgtgacaagactgtctatgtggttgacttgttaactcttgaaggaattccttaccataaaaactgcttcaagtgcagtcactgcaagggatgtcttacgatgtgcacatactcctcaatggatggaattctttattgcaagacacattttgaacagcttttcaaggaatctggcaatttcagcaagaacttcgcaaagtcttctgagaagcaaaatgagttgaatagaacccccagcaagctatcttccatgttcagtggaacccaggacaaatgctcagtttgcacaaaaacagtatatcctctggaaaagatgacacttgaaggggaatgcttccacaagacttgctttaggtgtgctcatgcagggtgccctctcacacattcaaactatgctgcccttgatggtgttctctactgcagggtccactttgcacaacttttcatggagaaagggaactacaaccatgtgctccaagctgctgcacacaggaggactggttcctctacacctccactactagaggagccatcacaagagccagcaccaccagcatctcatgaggaccaaacagaagaagagacacctcttgaatgagactggaagttgacatgaattgtttcaattccctccatccccttctttcagaatattgagcaaggtctttggtttaagttcagtacagtgaaaatatttgtaacaatatctttttgagtttcattgtaaactaacaacttgagaggtttgtttattatgtattcaaaatttttaaacnnnnnnnnnnnnnnnnnnnnnnnnnnnnnnnnnnnnnnnnnnnnnnnnnnnnnnnnnnnnnnnnnnnnnnnnn

SEQ ID NO: 28234 - DNA, 484 bp, Glycine max
  Clone ID: TF_LIB5119-034-A1-PF1-B9
tacagtattcttgtgttcgcagcgtttgttttgtcccggagcggtgttttttactcttgtgacgtctactcttgtaagccctctctcaacttcttgtcattcgcgcgatgccgaacccgaagtgcgaagcttgcggcaagactgcctatccccttgaaagtgttactgcccttgagaagaccttccataaaggttgtttcaagtgcaccacttgcaagacgactttgaatttgaagaacttcaagggctacgaaggccagatctattgcatccctcacaccccgaccccgaaggccacagctgtcactgacagcgtgctgatcaaggccgcagttaacgcgcccaagaagaaggctgagggcctcgctattgcgcaccgtggtgcacgtgagctcgcgccggccgccgccgacttcaccgtcaatgacacgaacgtcgaccagtcgaccgagaaccagcccgaccagtcgcacatccagtacga

SEQ ID NO: 28235 - DNA, 803 bp, Glycine max
  Clone ID: TF_GmC102_6
ccacgcgttcaacttgctcttcttcttctctttcaccctccaaattttctcactctctctttatcttcaccttttcagtttaaagcttcagatcacaaccgatccaccattcaccactttctcttcacaagctcaagttactgacaggcaaatctaacaagaaaagtagtctctgaagccgatccagtgccttgtgaatttggaattggtggtgaatttagatctaaaagccatagcaatgtcttttatcggtacccagcaaaagtgcaaggcttgtgagaaaacggtttatcccgttgatcagctttctgctgatggtactgcttatcacaaagcttgcttcagatgctctcactgcaaaggaacattaaagctgagcaactactcctcaatggaaggtgttctttactgtaagcctcactatgagcagctcttcaaggagagtggctccttcagcaagaacttccagtcacctgcaaagctagctgataagacaactcctgagctgacaaggtctcctagtaaagctgcgagcatgttttctggcacacaagaaaagtgtgccacatgtggcaaaactgcttatccattagagaaggtaacagtggaagggcaggcctatcacaaatcatgtttcaagtgttcacatggtggatgtcccataacgccatcgaattatgcagccctttgaggcattttgtattgcaagcaccacttctcccagctttttaaggagaaaggggagctatatcatcttactaagtctgcatcagtcaaacgggcagccgcagccacagcagcag

SEQ ID NO: 28236 - DNA, 522 bp, Glycine max
  Clone ID: TF_GmC5796_4
ttgtcaattgaacatgatcgcgacccaatttccaaatttacccatcacagaattttggagaaagaaaaaaatacaaggaagaaagaaagtcttcaacctctattcaattctccaagtgggattttgagatggcatcatttgcaggcactacccagaagtgcacagcatgtgaaaagaaagtgtattgggtggaacagctcactgctgacaacaaggtgtaccacaaatcttgcttcagatgtcaccactgcaagggcaccctcaagctgagtaattattgttcctttgagggtgtcctatactgtaagcctcatttccatcaactgtttaagatgactggcagcttggacaaaagttttgaaggtgttccaagaagtgttagagtggaaagatctgctgatcaggtccaaaccaacaaggtttcaagattattctctggaacacaagaaaagtgtgttggttgcaagaaaacagtgtacccaattgaaaaggtggctgttgatggtaaatcttaccacaagt

SEQ ID NO: 28237 - DNA, 1248 bp, Glycine max
  Clone ID: TF_GmC1603_1
acggctcgagcacttcgctgaacggttcgagcttagctcaaacctcacctcaataatctttcgtgctagctagcttaatcatattccaattccaacagaaccaaattctgctagctagctagtacgtcaaaggaaataaaataatatggcattcagcgggacccaacagaaatgcaaggcttgcgacaaaactgttcacttggtcgaaggtttatctgtcgatggggctgcttatcacaagaattgcttcagatgcagccattgcaatggccttcttgcgataagcaactactcatccaccgaaggggttttgtactgcaaggtgcactttgagcagcttttcaaggaaactggcgcctaccccaagaaatcccagtcgtctggaaagcctccactcgagctgaatagagcaccaagcaaactttctgccttcttctctgggactcaagagaaatgttcaaaatgcaagaaaaccgtatatccattggaaaagttgaccgtggaaggcgagttttaccataaatcatgctttaggtgtgcacatggaggatgtttcctgaccccttcaacctatgctgctctagatggatatctttactgcaagccccacttctctcagttgttcaaggagaagggtagctacagttatctgtccaagcaagcttcattgaagaaaagtgaaatgcaacaacaagaacaagaggctgtggagaaagctactacaacaacgatgatgatcgctcagagtcagagccagagacgaccaacaacaacaacaaaggaagctgaacaagctgatgatgatcactctgagcaagaacactagattgattgatggaacattaattttgcaaggggaggcttcacttgtgtctttgagtaaaattgatctttctggctacaaatagaacaaccccatttgggacattttgaagttcctgattcattgggttgtgtggctttgtgtcatttgggaagattcccgcaaaagggctattacagtattatgtgttccataatttgcaaacagtcagtgtagacagttaaccgttaagcctttctgttctttggggcatgtacatgactttctcaagccaaagtgcatgcatgcatgctacaatcatttcagatgtatttcattctttgtattcagaaacagatatcagagtagaaaaagaagattttattgtctgaatccatgatggattacaatagcaatctcttttctaaaaaactctccttaattat

SEQ ID NO: 28238 - DNA, 1169 bp, Glycine max
  Clone ID: TF_GmC5988_6
tagctacttggtacctgggcatatccattactttactctattccctttatgatcgtttttttcatgacttattttattctgattcttcagattccgttgtctctgcagattcttaatctctttctggttaaaagtttctagaggatggtcatgctgcagttgaattttgaaacaagggtttgccaacctgaaggtaaataattttgcatgaaatgggttggtttaccaagttgcttaagggctctgattataaaattttacgagggcaataccatggcaaatatggagaggacagaatttgggataatcatcatagttcgatggatgatttgacagatattgagaaagaagacattgaccgtgcaattgcactttctctgtcagaggaggatcataaagggaaaaaagttgttgattacgactctcaatctgaagatgaggaactttgtaaaattgatgatgaggaagatgaacatcttgttaaagttcatctagaagaagaagaacgtcttgctaaaattcaacaagaagaagaagaacgtcttgctaaaattcaacaagaacgcttctcaacaagaagatgaatgtcttgctaaaattcaacaagaggatgaacgtcttgctaaagctcaacttgaggaagacgagcaacttgctagggcaattcaagaaagcttgaaaattggttctcctcctcaatatgacaatggttcttcaattctatcttttcctcaccttttcccccctggatacagaatctgtgctggatgcaagactgagattggccaaggaagatttttaagttgcatgggaggtgtctggcatccagaatgcttctgctgccatgcatgccatcttccaatcactgattatgagttttccatgtctagcaatcgcccttaccataaatcatgctatagggagaagcatcacccaagatgtgatgtttgcaagaactttatcccaactaattcatctggcctcattgagtatagagctcatcctttctggctacaaaaatactgcccatcacatgagcttgatggcacttctcgttgttgtagttgcgaaagaatggagccaagggatacaaaatatcttttgcttgatgatggtcgaaagctatgtttagagtgtctagactcatcaattatggatactcatgaatg

SEQ ID NO: 28239 - DNA, 373 bp, Glycine max
  Clone ID: TF_uC-gmropic020d02b1
ccctctcgtccgcccacgcgttcgtccacgcgttcgcccacgcgttcgaattctcccaacacaattataaaaagaagaaaaacttagagtgatagttgtaggaaagtaaaaacataagtgttctcttaattcagtgaggttctgaattgttcaacttgagatgatggcatcatttgcagggactactcagaagtgcaaagcatgtgagaagactgtgtatttggtggaattgctcactgctgacaacaagatctatcacaaatcatgtttcagatgctaccactgcaagggtacccttaagttgagtaattattgttcctttgagggtgttttatactgtaagcctcattttgatcaactctttaagaagact

SEQ ID NO: 28240 - DNA, 1262 bp, Glycine max
  Clone ID: TF_GmC1061_1
gggaagctctttacccgtgacaaatatggtattcaattttttgttagttgaactgtgtggatcttcaccatctgtttttgggtgttgagagcgtttgattcaaaatgtgtgatttaaaagtacatgctactgcccttcttgaaactctcatgcaccagtttgggcgcgtcctgtgttatccaacggctgcgagaagacgacataattgtatggaaggttgctttagtctccgcaattttctgcttgcttcttcacttttttttttcctctgtctcctcctcaatcttcattgtcctgttctttcccttggtgacaaaccaagactaacacacacagaacatagcttgtgttggtgaggtgagaagataaagaaagaatggcatttgcaggaacaacacagaagtgtatggcctgtgacaaaaccgtttatctggttgataagttgaccgcggataaccgagttttccacaaagcttgcttcagatgccatcactgcaaaggaaccctcaagctgagcaactacaactcttttgagggagttctttattgtaagccacactttgaccaactgttcaaaagaacagggagccttgacaaaagctttgaaggaacaccaaaaattgccaagccagagaaaaatttggaagagaaacctgcagcagccaaagtctcaagtatgtttggaggaacaagggaaaaatgtgctggttgtcagaaaacggtgtatcccactgagaaggttactgtgaatggaactccttaccataagagttgttttaaatgctgccatggagggtgtgttatcagtccttccaattacatagcacacgagggaaaactctactgcaaacaccaccatgtccaattgatcaaggagaagggcaatttaacccaacttgaaggtgacaatgagaagagtgcgactaatgggaaaatcaatggtgaagaagtttccgcagagacatgaaggagtcgagtctcagaattttgctttctcaagtttcatatttgtgcaccatatatttctactctctcttgcttttaccattactttgcagtccgggaagctctttacccgtgacaaatatggtattctattttttgttagacaaagtgtgcggatcttcaccatatgtttttggttgttgtgagcgtttgattcaaaatgtgtgatttagaagtacatgttactgcacttcttaacactctcatggacttccaattgatattatatacaatcgttacacccaaatttcgtttcc

SEQ ID NO: 28241 - DNA, 1378 bp, Glycine max
  Clone ID: TF_GmC1061_3
aaggttgctttagtctccgcaattttctgcttgcttcttcacttttttttttcctctgtctcctcctcaatcttcattgtcctgttctttcccttggtgacaaaccaagactaacacacacagaacatagcttgtgttggtgaggtgagaagataaagaaagaatggcatttgcaggaacaacacagaagtgtatggcctgtgacaaaaccgtttatctggttgataagttgaccgcggataaccgagttttccacaaagcttgcttcagatgccatcactgcaaaggaaccctcaagctgagcaactacaactcttttgagggagttctttattgtaagccacactttgaccaactgttcaaaagaacagggagccttgacaaaagctttgaaggaacaccaaaaattgccaagccagagaaaaatttggaagagaaacctgcagcagccaaagtctcaagtatgtttggaggaacaagggacaaatgtgctggttgtcagaaaacggtttatcccactgagaaggtgactgtgaatggaaccccttaccataagagttgtttcaaatgctgccatggagggtgtgttatcagtccttccaattacatagcacacgagggaaaactctactgcaaacaccaccatgtccaattgatcaaggagaagggcaatttaagccaacttgaaggtgacaatgagaagagtgcaactaatgggaaaatcaatggtgaagaagttgccacggagacatgatgaaagagtcgagtctcagaattgtactttctcaagttccatatttgtgcaccatatgtttctgctgtctctcatgcttttaccattactttgcagtccgggaagctctttacccgtgacaaatatggtattcaattttttgttagttgaactgtgtggatcttcatcatctgtttttggttgttgtgagcgtttgattcagaatgtgtgatttagaagtacatgctactgcacttcttgaaactctcatggacttccaattgatattatgtaaaatcgtctcaatacccaaatttcgtttcctactaaatcaatggtcaagaagtttccgcagagacatgaaggagtcgagtctcagaattttgctttctcaagtttcatatttgtgcaccatatatttctactctctcatgcttttaccattactttgcagtccgggaagctctttacccgtgacaaatatggtattccattttttgttagacaaagtgtgcggatcttcaccatatgtttttggttgttgtgagcgtttcattcaaaatgtgtgatttagaagtacatgttactgcacttcttaacactctcatggacttccaattgatattatatacaatcgttacaccc

SEQ ID NO: 28242 - DNA, 1117 bp, Glycine max
  Clone ID: TF_GmC1184_1
ctgcccacgcgtccggcctccaataatttaggacaaatattggacaaaatgattgtcaacgacagtatatttgttggggtgtctgctttttgtctcctgcctcctacatttcaccaccccctttatccttatctcctctcttcttcatttgttctgctcttcccctctatttaaagctcacacaaagggatcatataccttggttgcactttggtaaggtgagagaataggaaaaagggaaatatggcatttgcaggaacaactcagaagtgcatggcttgtgacaaaacagtttatctggttgataagttgacagcagataaccgagtgtaccataaggcttgcttcagatgccaccactgcaaaggaacactcaagcttagcaactataactcttttgagggggttctttactgcaggccacacttcgaccaactgttcaaaagaactggtagtcttgacaaaagcttcgaagggacaccaaaaattgctaaaccagaaaaaaccggggaagagaaacctgcagcaaccaaagtctcaagtatgtttggtggaactagagataaatgtgccggttgtcaaaaaacagtgtatcccactgaaaaggttactgtgaatggaactccttatcacaagagttgtttcaaatgcactcatggagggtgtgttattagtccctccaactacattgcacacgagggcaaactctactgcaagcaccaccacgtccaactgatcaaggagaagggtaatttaagccaacttgaaggtgaccatgagaagagtgcagagcaagagaaaatcaacggtgaagtagttgcagctgagacatgaaatgaaatgaaatgaaatgcttgagttatcacagatgaatattcccttcctcaagttccatatttctgtatcatgtgtttatgctatctctcctgctttgccaatatggagtccataatgctcttgaaaaatatggtactccctttttttgtggttggggtgtgtgcaaatccatcgttttgttttctgttgttgtgaagttgtggattctaaaaatgagacttaatggcatgcaattctgaatatgtgattcaaaaaaaaaaaaaaaaaaaaatctttaaaa

SEQ ID NO: 28243 - DNA, 2749 bp, Glycine max
  Clone ID: TF_GmC1928_1
gattctgctaatgaaagattctttaacattattttatcatttatactcataaatatcctgctgattggaggggaatcttccttgcgttttcaatttgtcttcagaagaacatcatttagtcttttacatatccttttcgttttttttttcattttctctgatgtatctgaatgttgaggacctgagaaactgggtaacacgtgattcccaaaataagaggtgatatggtctttatattccatgatctgtctgttggtcatgttgcctatttcttgccttgcaaagcttataggaagtacctcaaatccgactggattgaatcccttttggcctccctgtatttgcgtgtgatccaagtactccccttttcactctttgcactcaaaaagctattccaagaatcacataacaaagagagagagagagagagagaaaaagctattactatgtggttgactatgcgtaaaaaagaatcagaattcagaaaaaaaaagtgtacttgaactgggattcatctgattccttaacttgtctctctgctgattcataatctcttttaaggaagaggttttgccaaccccaacctgcagcaaataatattgcatgggttggtttactaagttgcttaagggatccaaccgtaaatcgtcaggaggaagatatcatgggaaatatgaagatgacagaatatcggacaatcttgattgttcagcggatgatttgatggatattgagaaagaagaaattggtcgggcaatagcactctctctttcagaggcagataagaaagggaaaaaagttattgaggacgactctgaatctgaagatgatgaactgtgtccacttagcgacgaggaagctgaatctgttggtgaagttcagcaagatgaagatgaccatcatgctaaaattcaacaggatgaagacaaacatcttgatgaagttcaacttgaggaagatgaacaacttgccagggcaattcaagaaagtttgagcattagttctcctcctcgatctgagactgattctttatttcaaccttttgcacacttatttccacctgtatacagaatctgttctggctgtaatgctgagattggccatggaagatttttgagttgcatgggaggttattggcatccagaatgcttttgttgccatgcttgcaaacttccaatcactgattatgagttttctatgtctggaaatcgtcgttatcataaatcctgctataaggagttgcatcatccaagatgtgatgtttgcaagaactttattccaccaaattcagctggtctcattgagtatagagcacatcctttctggctacaaaaatattgtccatcgcatgagcgtgatggtactcctcgctgttgtagctgtcaaagattggagtcagtggataccaaatatctgttgcttgacgatggtcgaaagctgtgcctggagtgtcttgactcagctatcatggatactcatgaatgccaacctctctatgtcgaaatacaagagttttatgagggtttacatatgaagatagagcagcaagttccgatgcttttggttgagagacaagcactgaacgaggctatggagggagagaagaatggtcatcatcacttacctgaaaccagaggactttgcttgtccgaagagcaaactgttcccactattttaaggagaccaaggataggagcaggataccagctcatagatatgataaccgagccttttaggctggtccgtcgttgtgaagtgacagccatacttgttttgtatggccttcctaggttattgactggatcaatcctggctcacgaaatgatgcacgcatggcttagacttaaaggctatggcaatctgaggccagaagttgaagagggaatttgccaagtcttggctcatatgtggttagaatcagagattattcctggcactggggatgaaggtgcatcatcatcatcatcctcatcatcctcatcgccttcgtcttcttcatcatcaaagaagggtaaacgttccgactttgagaagaaactaggtaagtacttcaaacaccagattgagtcagatagctcagcagcttatggagatggattcagagagggtaaccaggctgtggctaagtatggacttagaagaacccttgaccatatccgattgacaggaagttttccatattgaaaaatggtatttgacccttttagagtgagtaattcactttaaagagcaaagtaagggacctcaactgttgatgagataattaaagagttgtttgttaaactttaacaaatccatgaaccgttgatttttcatcaatggttgaaacttacttttctctgtaaagtaaagattcactttagagaaatcaaatccagaaatatgatacaattttctttcctttacaccaaccaatatatcaactttgtcttttaaattatgtaggattcaaaggttccaaaattatatagttttcacgctactccggactagtaaggaatgaaaaatgctcctgttagtctgcggttgccgaaatctttcttttccttttttttttctttttcttttaggggggtgctgatgaggagtgatgaaatgtgcagtttctgcaagttccagataaatgtaggcagataaatgtaggcacctcagattcgatatgtattacaaaataccttgcaacagttgaaaatgataaaacagttgaagtaattatagtaaaagtttgtatattttgtattttgctgat

SEQ ID NO: 28244 - DNA, 253 bp, Glycine max
  unsure (1)..(253): unsure at all n locations
  Clone ID: TF_700681638H1
tcaagcgcctttgctggcaccagagagaaatgtnttggatgncagcaaccacagtctatccaactgagagggtcactgttaacaacactatgnaccacaagagctgcttcaagtgctgccatggagggtgcaccatcagcccttctaactacattgcgcacgangggaagctgtactgcaagcaccaccacatccagctgatcaaggagaaggggaacttcagccagcttgagaatgaccacggaagacatca

SEQ ID NO: 28245 - DNA, 646 bp, Glycine max
  unsure (1)..(646): unsure at all n locations
  Clone ID: TF_jC-gmst02400027e04a1
ggctcgaggtgaagtgttctcctaattcagtgagtgaggttctgaattcttcaacttgagatgatggcatcatttgcagggactactcagaagtgcaaagcatgtgagaagactgtgtatttggtggatcagctcactgctgacaacaagatctatcacaaatcatgtttcagatgctaccactgcaagggtacccttaagttgagtaactattgttcctttgagggtgtgttatactgtaagcctcattttgatcaactctttaagaagactggcagcttagacaaaagttttgaaggtattccaagaactgctagacttgaaagatctactgatcaggtccaaaccaatagcaaggtttcaaatttgtttgctggaactcaggaaaaatgtgttgcttgcaagaaaacagtttacccaattgaaaaggtagctgttgatggaacatcttaccataaggcttgtttcaggtgcactcatggggngtgtgtaattagcccctcaaattacgttgcccatgaacatcgtctttattgtaggcaccatcacactcagttgttcaagcagaaaggtaacttcagccaacttgacaagcaagaaaatgatggaggggtgactgagaaacacataactgagtaatagcatg

SEQ ID NO: 28246 - DNA, 887 bp, Glycine max
  Clone ID: TF_GmC1463_1
gcgaagctcggaggggggcggaggcaaagagagagagagagaagaccaaaggagggtaaggaaaaacttcagcagaggaattccttgcagaagggtgcaactttactccctctctttctctcttgctctttcttgtcagggtttggtcatataagaagccatggccagttttggaggaaccacacaaaagtgcatggcttgtgccaaaactgtgtatcttgttgataagttaactgcagatagccgtgtctatcataaggcttgcttccgatgccaccattgccgtaatacccttaagcttagcaactactgttcttttgagggggtgctctactgcagacctcactatgatcaactctacaagcgaactggtagcctggacaaaagttttgaaggaatacccaaaattcagaaaccagagaaaccggtcactggtaatgagaatactaaggtcctcgcaaacgtgttcttgggcaccagagacaaatgtgtgtgttgcaacaagacagtgtatcccactgagagggttacggttaatgggacaccctaccacaagggctgcttcaagtgtacctatggaggttgtactgtaagctcatcaaactttatcacacacgagggaaagccctactgcaaacaccatcacattcaacttttcaaagagaaagggaattacagtcagctcgagaatgaatgctagctagcaatgtcgtatactactaccatggataatgcaccattgtcagcaacgcataatatatagtgttgtccttgtaaaatgcatgcattgatgagatagaaagtttgctgtgtgtgtgtgtgcgcattttgattcttgagaatgctttcagcagtttcattttaacaaagaatttttttaagttcat

SEQ ID NO: 28247 - DNA, 394 bp, Glycine max
  Clone ID: TF_LIB3049-029-Q1-E1-G6
gatcatcagaatccacagtttccgttagcgctctccaatacaaaataaccactcactgaatattcggtcgaagatgtccgccgccgaagaagctaaagttcccgccgtcgaaaagccggtggaggaggtgaaggcgccgaagcttgccaaggagaagaaacctaaggctccgaaggaaaagaagccgaaacaggccaaaactgcttctcatcctccatatctccaggtaatttcgcgtaaatttctttcatgaatccacaattattacgtgattgttatttttttgtttgttgatttttttttggttgtcttaatgtttgtagatgattaatgacgctttgattgctctgaacgagaaaggaggatcgagtccatatgcgatagcgaagtacat

SEQ ID NO: 28248 - DNA, 2059 bp, Glycine max
  Clone ID: TF_GmC6822_1
gaaaaacagcattaacacaaataaactagaaaacatttttttttctcgttattctccggttcctcgcaggcaccaattccacatatctgcgtgtaaatactccaacttgtcccaattcacacctttgcctcgcgattctccgatgcgttacacctttgtccaccgattcctctttaattttcttccctttttcccccaattcaactaaattttctgctatctatattcccaggtaagtaaagtcagatttttcttggtggacggacatgcagaagaaggctgcactcaacttccaagctttcctctagaacaaaagcaaagattatactgtcataaaaaggttttgtacttattttaatgggtgctcctaagcagaaatggaccgcagaggaagaagcagcattgaaagctggagtagtcaaacacggggctggaaaatggcgcaccatacttacagacccagagttcagttccattttgcgcatgcgttcaaatgtagatctcaaggacaaatggaggaacataaatgtgacagcaatatggggatcgaggcagaaagcaaagctagctcttaaaaagaacctactaccatccaccaaaattgacaataaccacttggccttgagtactgtagttcaacgtgacaaagaagttgcaaatcccaagcctttggcagtttctagtgggacatctcctaattcaaaggaaaaaatatcgaagctacagaacttccagttggataatcttatattagagtccattatcaagttgaaggagccaaggggttctgaccaggcagcaattgctgcatatatagaggatcaatactgttctacgccgaccctcagaaagttactgtcaacaaaactgaagcacatggtggctagtggaaaattaatgaaggtaattttactgttagttaatcccttaacaaggcacattgttcttggcttattggaacttagtttcccaataatcaacatttttatctgcaaacctttgtaatgaagcatagtcagtctggataaattttagatcatgtatgacagatactttactgacaacattttttatgttatttattgaaggttattgacaaaatatgatttgcgacaagaaagtaattggttatatgtgtgcacagatgtgaatagaaatatgttctcttgtggcagttgaactatgcatatctgggcacgctctttagcaggagtgaaaaaactattttgaattgataaaattttcccatttaataaactaatattactgttaaataaatattgggtatgcaattaaactctatttggtcaatagatcctgagtgtgacatatctaacgagtaatgacaggtaaagcataagtacaggattgcaacaaatttaacaatatctgagaaaagaagatgctcttccctgttactcctggaagggaggcccaaagattctccaaaagcagagaagactggtgtcaacatcctttcaaaatccgaaattgatgcagagctatcgaaaatgaagggtgtgacacctcaagaggctgcggcggcagctgcaaaagcagttgcagaggcagaagctgccattgccgaggctgaggcagcagctagggaggcagatgctgcagaagccgaggcagaggctgcacgagtgtttgcaaaagcagcaatgaaagcactaaaatgcaagacacttcgtatttgatggtgtcagcttctgcgttgctgacatgaggagtatttgagatcataattctgctgctagacttcctgcatgtattcaattactgtacataatttaggcttgtaaatttggaatatgcgggattgatctatgaaacgttttgtcaggagtcattatgagcgtattatttatttatttattttgaccttatttttaagaaagacaatgaggcgagagtacaaagtattagtggaagagtggaatcagtgatctagtgttatgatggaatgtgtgatagacatcctctattagtaaatggaagaatacaatttttattagagttccaatgacaatgctgagtgccactttctcgtgattca

SEQ ID NO: 28249 - DNA, 294 bp, Glycine max
  Clone ID: TF_LIB3055-003-Q1-N1-D4
gtatctttcaatttccatccacgggtatagccttttctatttgggcgttctaatgttcaacggcatgcacaccaatggccaataaaacggcgtagtccaggaggcccttttaccatcctactttgacaggatgtaacggagccttagcaattctcaaggagagaaccggttcgagccattacgcgataaccaatttcatctaaggcaggcccaaggagttgcctccaacctacaaaaagcttgttctcgttcatctcaagaagtctgttgttgctggcaagctcgttaaggtca

SEQ ID NO: 28250 - DNA, 320 bp, Glycine max
  unsure (1)..(320): unsure at all n locations
  Clone ID: TF_LIB3167-016-P1-K1-F5
gaaaaaccggggcgacgcacgcgtccgctctctcagaatttctatctatctcttgttttaatttcaacaacggttactccttttgcggggtgagtttcaatcacgccgtcgtcatntctaccgcatcgcaacccaaggccaagaaaacggcgtcgtccaagaagcccctctcccaccctcccttcgccgtgatgatagcacatgccattgcgagtctgaaagagagaaccgtgtcgagccaatactcgaataccaaatacattgaagggtaacacaacgagttgcctgcaacctacaagaatcttgttctcgttcatctt

SEQ ID NO: 28251 - DNA, 381 bp, Glycine max
  Clone ID: TF_jC-gmst02400046d07a1
ggctcgagcaaacttgaacggatccatcatacacagagcccaatcgtctctcgagccctgattgaccctcagatacatggccacagaagagcccactggcggggagggacccgatcccgagcctgactgagtccatccttccccggacgagaaggaggagaccaaacctagaagccaaggctaagaaaaccaaggagcccaaacccaacaaggctctcagacctggccaccctcccactcaacctatctacgaaaagatcgttaaagatgcaaatacctcgctgaaggagaaaaccggtgcgagccaatacacgattgcaaagttcatccaaggaaagcacatgcatgatacacctgacttaatgaagcaaaaactctacc

SEQ ID NO: 28252 - DNA, 1278 bp, Glycine max
  Clone ID: TF_GmC13_1
ccgcgcgcccacgcggccggcgaagaagtagagaacaaagaaagagagagagaattgaatgtgaatggggaatcagaagcagaagtggacgcaggacgaagaagatgctctcatcgccggcgttgaaaagcacggccccggaaagtggaagaacattctcaaggatccccaattcgcccctttcctcacttcccgttccaacatcgacctcaaggataaatggcgcaatttgagcgtcagcaacggtgctcagggctccaaagaaaaatctagggttcccaagcttaaagccctccctgctcctcctgctcctaccgccactcctcagaacgccgctcctgctctgcaaaacgcagcatctgatgtcactcccccagatgcttctcagaatgaccaagatgccaaaaaccctccaaggtataatgcaatgatttttgaagctctatcagcgctgaaagatagtaatggatctgacatgaatgccatcattaaattcatggagcaaaaaatcttcaggtaaaccaaaattttagaagggcattaagtacaaagttgaggaggcttgttagtcaagggaaacttgaaaaggtacaaaatggttacaaggtgaaaaaggaagcctcctcggggacaaaatcaccttcaccaaaaccaaaggatgtccggccaccacaaccacaacagcaatccccagcttctgtcttaatgactaatgacacaataaaggaagctgcggatactgcagcctacagagttgctgatgctgaaagtaaatcatatctggctgcagaagcagtaaaggaggctgaaaaaaatatcattgctggttgaacatagtgattcaatgttacagctagcaaaagatatatatgaacaatgttcccgtggtgaaattatcctcttggcttaagatggtctaagtaaggtctataaatagattcgtcctgatgttggtttctaaatgtaaaattttgttgatacaatgaaatactattttaacttttatttttgtattttatcagattcccttaaacatttgtattccttaaaattgcatggaaagtcatgtttatagtaatatcatcggtccaccaaatcttgccagattttggatccaaaatgtaagcaatagaaactcatttatgttttttttggcgatgtaatacagatcattcatgtcttgattcttgactctagtctagaactcgatccttcgtatccaatttttttaattaaaagtgaaattttcacgtaaaaaaaaaaaaaaaaaaaaaataa

SEQ ID NO: 28253 - DNA, 407 bp, Glycine max
  unsure (1)..(407): unsure at all n locations
  Clone ID: TF_uC-gmflminsoy035f03b1
ccggggggaccggaccggaaanaccgggacgacccacgcgcccggtttttttctccaacgcaaccaccacacacagagccgaggcctctctcaagccctaacggcccctcaacaccatggccacagaagagcccactggcgcgggggaacccgcgcccgaacctgccaccgccgaacctcccccggaggagaaggaggagaccaaacctgaagccaaggctaagaaaaccaaggagcccaaacctaaaaagggggccagaccgcgcaacccacccactcatccaaactacgaagagacgggaaaagaggcaaccacctcgctgaaggagaaaaccggatcgagccaacacgcgaacgcgaagaacaccgaggagaagcacacgcagcgcccaccgaaccgcaagaag

SEQ ID NO: 28254 - DNA, 402 bp, Glycine max
  Clone ID: TF_LIB3108-006-Q1-K1-H9
cgaggcgatcgcgtcgctgaaggagaggaccggatcgagccagtacgcgatctcgaagttgatggaagacaagcacaaggctcacctcccggccaacttcaagaagctcctcctcgttcagcttcggaaacttaccgccgccggcaaactcaccaaggtcaagaactcttataagatctctgccaagcccgccactgctgtgaagccgaagtccgctgctgccgccccgaaggcgaagccgaagtccgcaactgctgcagctaaggcgaagctaaagccgaaatctgctgcagcgaagctgaagaaggctgctgtgaagccgaaacggaaatcctctgctgtgaagcctaaatctaaggctgcggtcgtgaaatctaaagctgttgcccctaagcctaaagc

SEQ ID NO: 28255 - DNA, 929 bp, Glycine max
  Clone ID: TF_GmC1613_7
tacggctgcgagaagacgacagaagggtaccgctgtgagaagacgacagaaggggatccataccatacctttcactttcctaaagaaaattggaacctgcctctgttgttaaagtttgtatttttttttgagtgggtggattgagagaactgtgcaagctttggaacttcttcaaagtctggtacttcaatggctactgaagaggttaataaacttcaatcacttcctccttaccctgagatgatagtgaaagcacttgaagccctgaatgaggctgatggatcgagtaaatcagcgatatcaaagtacatagaaaccacctacggtgagttgccagatgaaactgttttggggagtcacctgaacaagatgaaagagagtggagagcttgcgttcaaacagaacaattacatgaaagctgatccaaatgccccaccaaagaggggacgtggaaggccaccaaagccaaaggttccattgccaccaggcactgttgtgtcccctccaaggccaaggggtcgtcccccaaaagaccctaatgcccctcctaagtcccctaaggctaaggccacccctgccactggcaggccaagaggaaggcctaagaaggttgctcgctcaccggccgtgccgtctcccaccgccgtctccactggaaggcctagaggcaggcctcccaaagtgaagcctcagttgacagaagtcagtgttgagtcatagaatggtttctttctttctttctaattgatgtcaaatgtagtgatctactcttgtcgaagtgatggtgggtgtggtcttagatattgggtcaatttaatttctttgtaaaattaagtagtggtagcttgcttattatgaggctttgtcttggttattcttgctaattactaccaaagagaacagtgacttgagctaatggtgatttggtg

SEQ ID NO: 28256 - DNA, 908 bp, Glycine max
  Clone ID: TF_GmC101_2
ccggaattcccccccccgtccggcgtccgctttccaatacaataatcactaactgaatattcgatcggagatgtctgccgccgccgaagaagctaacgctcccgccgtcgaaaagccggttgaggaggtgaaggcgccgaaccccgcgaaggagaagaaacctaaggctccgaaggaaaagaagccaaaacaggccaaaacagcttcacatcctccatattttcagatgattaaggaggctttgatcgctttgaacgagaaaggaggatcgagtccttatgcgatagcgaagtacatggaggagaagcacaaggcggtgctccctgcgaatttcaagaagattctaggtctgcaactaaagaaccaagctgcgagagggaaactcgtgaagatcaaggcttcgtacaagttaaccgaagccgcgaagaaggagaacaccgccaaagtgacgaaggccaacgctgagaaaaaggaatcgcgtccaaaacgaagcaaaaccgcaaccgccgctgctccgaagaaaaccgaggcggttaaaagggcagcgaagaaggtagggccgaagaagacgaagaaagtgtcgacgcctgcgaagcccaagcagcccaagtccattaggtctccaaccaagagggcccggaaagcagccgttgctgcggcttgatacttgtcttgtttagttaaaactatgacatatatatgtagatatgaaaaggtgtgggtgtgggtgtatgtgtgtgccttgctgcacaatcttgaagaaagttgtgtagtgtaggatggtagatagtttagtgttctgcaatgttcgctctaataagtgatctaatggagatgagttttactgttttaaatcaaaaaaaaaaaaagttgacggctccctagcggacgcacgcgtgcgtccgcgt

SEQ ID NO: 28257 - DNA, 1024 bp, Glycine max
  Clone ID: TF_GmC101_1
gatctcgagccgctcgagccgctcgagcccctctgtttccgtataacgctctccaatacaaaataaccactcactgaatattcggtcgaagatgtccgccgccgaagaagctaaagttcccgccgtcgaaaagccggtggaggaggtgaaggcgccgaagcttgccaaggagaagaaacctaaggctccgaaggaaaagaagccgaaacaggccaaaactgcttctcatcctccatatctccagatgattaaggacgctttgattgctctgaacgagaaaggaggatcgagtccatatgcgatagcgaagtacatggaggagaagcacaaggcggtgcttcctgcgaatttcaagaagatactaggtctgcaactgaagaaccaagctgcgagagggaaactcgtcaagatcaaggcttcgtacaagttagccgaagccgcgaagaaggtgaaggagagcaccgccaaagcgacgaaggaatcgcgtccgaaacgaaacaaaatcgcaaccgccgttgctccgaagaaaaccgaggcggttaaaaagcccgcgaagaaggtcgggccgaagaaaacgaagaaagtgtcgacgcctgcgaagcccaagcagcccaggtccattaggtctccgaccaagagggcccgtaaagctgccgtcgctgcggcttgatgtttgatgtttttcttgtttagttaaaactctggcatataatatatgtagatatgaaaaggtgtgtgttaaccttgttgcacaatcttgaatatagttgtgtggtttaggatcgtagatagtttagtgttctgcaatgttcgctctaagaagtgatcaattggagatgaattttactgttatcaatctccttctttcaagttgattgtttttttttcactgttggttttatcgtcgaattttctggaacgccgaaagggtttgtgatgccatgcgggtgcggttgaatgtttttaattggccggttgttcttttttatttttggtggtttgtgattgggcttggagcaagaaa

SEQ ID NO: 28258 - DNA, 656 bp, Glycine max
  unsure (1)..(656): unsure at all n locations
  Clone ID: TF_LIB4165-011-R1-K1-A4
gtacgccctcgcaggntaccccggtnccggnaatnntcccgggtcgacccacgcgtccggggaagcacaaggagttgcctgcaacctacaagaagcttgtcctcgttcatctcaagaaatctgttgctgctggcaagcttgttaaggtgaaaaactcctttaagctcgcaccgactaagcctgctccggttaaggccgctgctcccaaaaagccaaccaaagctgccactaagcccgcttccaagcccaaagctgctactcctaagaaaaaggctgttgccaagcccaaggccaaagctgcggccacgactgccaagcccaagtctaagcccgctaaggtcgcggccaagaaggtcgctgctaagccagctaagaagaagacacccgtaaaggccgtgaagaagcccaagagtgtcgtgaagaaacctaagagcgtgaaatcaccagcgaagaagactaaggctaaggctaagaagtgatgatttggattggggtttggttttggtttggcgttatagttttatgcattccgggttcattcgtagtagtataggtgaatatatttttagaagagtattgatgtaaattcctttttctagaaattcaacaagtgttcttgtttgcattgaatacaatttcgttttctttaaaanaaa

SEQ ID NO: 28259 - DNA, 817 bp, Glycine max
  Clone ID: TF_GmC796_5
ggccggaattcccggctcgacccacgcgtccgatttggctcgggatgcaaacaaatctgggaccttaaatcaccaatccaatcccaatcaattcattttcctccaattccaattaagctgagagtgtttttgatctacacgcgatgggtgctccgaagcagaaatggactgcagaagaggaacaagcacttaaagctggagttgtcaagcacggtgttggtaaatggcgcaccatactgaaggatccagagtttagtggtgtcttatacctgcggtcaaatgtggatctcaaggataactggagaaatctgagcgtgatggcaaatggatggagctctagggaaaaatctaggttatcagtcagaagggtgcatcaggtcccgagacaggatgagaactccatggctatcactcctgttgttccaagtgacgaagagattgttgatgttaagcctcttcaagtttctagagatattgtgcatattcctggtccaaagaggtctaatttaagtttggataagcttataatggaagcaatcactagcttgaaggagaatggtggttctaataagacagctattgcagcttttatagaggaccaatattgggcactgccaggcttaaaaagtatgttgtctgcaaaattaaagtttttgacagcaagtggaaaactgatcaaggtaaatcgcaagtatagaattgcacctatagcagcatattctgacagaagaagaaactcatccgtgttatatttggaagggaggcagaaagcctctatgaaaattgacagggatgagaccaacatccttactagatc

SEQ ID NO: 28260 - DNA, 1563 bp, Glycine max
  Clone ID: TF_GmC137_2
gcgtacgtaagctcggaattcggctcgagcttcctctctctctctgtctctctgtctcctccatggccatctccttcagtcccaaacaccctccttacgatgagatgatatacacagcaatcggagctctgaaggagagggatggttcgagcaagcgagccataggaaagtacatagaacaagtctacaaggaccttccacccactcaccctgctttgttgactcaccatctcaaccgattgaaatcctctgccctcctcgtcctcgtcaagaaatcctacaagcttcctggatctcatcatctgcctgcgctccagccccaaaagacccgtggtcgtcctcccaagcccaagccccaccccgtctggcctgctgcagccctcaccgacagccctgctcttctatccgccaaaagaggccccggtcgtcctaaaaagattggtgtcagcccgccaggcccaaggggtcgtccacccgggactgggagatctaagctgcccaagaggcctggccgtccccccaagcccaaatccgtctcggcgatctccagtggtctcaaacgacgtcctggacgcccacccaaagcccaatccaacgtaaacgtcatccccttcgcagccccagttgctcccggcctgcctactgtgcagcccatccttcctactgcttccgtgcccaatggatctcccaggccccgaggaaggcctaaaaagagttttactgctgcgggggctccggcgctatctgccgttgccggtgcagcgcgtggtcgtggccgcggacgtccacgtggggtcttcccggtggttaggcccggccggcctcagaagctcgccgtaggaaggtccaagaatcctgtaagaaggcccgtgggccgccccaagggatcgacagctgctgcaatcacagcacataaggctgctaatgaagatctaaggaagaagcttgaacactttcaatcaaaagtgaaggagtcccttggcacgcttaagccttattttaaccatgaaagcccagtcactgcaattgcggcaattcaagagttggaagtactgtcaactttggaccttaaagcgccattgagggatgagacccagcaacagccaccgccactgccacagacacagacacaggtgtatgaacagcaatatccccagccacagtcacagcagctgccgcaattttttcaaccacatacatcagccccgagctaggcctgaacatgatgaaggacaacttgtacaagtgttattaacaaggcacaagaggtaaaagatctgtaaagcggttaggaagtagtggtactgatttttctgagggtgaaatgactctgtctattttagtttgttgttgtgcaacatttagtttgacccctgaagtgattagcgggtactcatgattctgttgttctttaagtaatatttatttgacttttacagtttactttagtcacattaatgtgtatgtttgtatcagcctcttttgttgtttaatatttttaattaatggttactgcttgctatttctcatttccccttaaaaaaaaaaaaaaaaaaaaaaaag

SEQ ID NO: 28261 - DNA, 867 bp, Glycine max
  Clone ID: TF_GmC1479_1
ctgcatctgcactaaaatatactattttgttgatttgtttttctgtttctgtcaatccggccgaaattctgcagaaaaaatgtcaaaagcaaacgcaaagaacaaatccccctccaccgagctccaccctccttacttcgagatgattgcggatgcgatatcgtccttgaaagaccgcacgggttcgagccagccagcgatagccaagttcatcgaggacaagcacagcaaagtgctccctcccaacttccggaaacttctctccgttcagttgaagaaactcgtcaaatcggagaagctttacaaggtcaaaaactcttacaaactttcttccgccacggacaaagagacccagaagaataccgaaaccgagcccaaacagaaggttgaaaagaagaagaagaagaagaagaaggtgggtgagaagattaagaggctgagccaagtgaagacacccgaaactctgaagaagaaagcacccaccaagaaggacgcggcggcaactaagaagaaatctgcgtcggcggtggaaggttcaggaggagggaaagtgaagtgtttgagtcaggtgaagacccctgaggccttgaagaagaagaagcccaatttgacacccaaaccttccaggcccaacaggaatgctaggaaatgaaaccaccacttgtgtcgtatgtatgttaatgcttttttttttttttaagttctgttgccttgaagtggattattgttatgatcaacttataacagttgacgattgcaatgtggtagtttctgcgattatttattcgatgtgggattttttcctcctaatcatttttttgggtgtgcgtttattttagttttatataacaccggaaaatgttcctg

SEQ ID NO: 28262 - DNA, 2846 bp, Glycine max
  Clone ID: TF_GmC206_1
ccatcctcatctctctccatccctttcgccttaagtcccctacatccaatccaattcccaattttcgaatctaccctttctctctctacgatggagccttcctcgatctctccaccgccagctccgcctgccaccgccgtccccttccccgccgaacccaacgaccaccttccaccacccattcccgaaccaccttctaaccacccaccctacgccgagatgatatacacggcaatcgaggcgctgaaggagaaagacggttctagcaagagggcaatagcgaagtatattgagcaagtgtatacgcagcttccaccgaatcactcagacttgttgactcagcacttgaatcacttgaagagtaggggattgctccaaatggtaaaaaaatcttacgcccttcctagatctgtgcccgtgtctgttcctggacctgcacccacacaagggacatcagcagtgccggctgctgttgttgccatcacgacgactccgaggcccagaggtcggcctcgcaaggcccaaaatccagttcagaactcgcctctgcgtcaggacactgtcaacgtgcaggttcagcagaatgacgcgccggtctgggcagcacaaggtcggacagacaagcccgtgcacagcgagaaggcagtggcccgaagcgaggtcgtcctccgacaaaaagcatcttaagagcgcgcatagcaaaaagaggccagtcctcccggcatcgaggaaaaaagccgggccgtcctcccacagcaaccacaacagatgtttctgcttctgctgggcccaagagacgtccaggccgcccgcccaagaatcagtcgcagcccactctcattccctttgctccggctgtatctgccgcttccgtggatacagagcacgtggcagcatcagctgaaactgcgccggttgatgctgacgcggctctcggaccaagagcccgtggacggccgaagaaatatgctgacgagatgattgctgcgggccgaggcaggggacggggccgtgggcgcggtggcggcggaagaggacgagggagagggcgtggtgaattgcctgcacagcccagaaaaccaggggcaaggcccgtgggtcgtccgaaaaagggttcaacttctgctagtacttctcaaaatgctgcaaatgaagatctcaggaggaagcttgaacactttcaatcaaaagtcaaggaatctcttgcagtgcttaagcctcattttaaccatgaaagtccagtcactgcaattgctgctattcaagagctagaagtactgggaactatggacctcaatgtaccactaagggatgaaacacttccacatcaagtggagctgccaccaccacagccaccagtgcagcagcagcagcagccaccacagcagcagctgcagcagccaccacagcagccaccacaagcaacacctagcaccacaacaactgccgccacagccaccgatatttcagcaaacatatcctccatttcatctgccgcagttccaccatcaccagccttcgctgcagttccagcaacagcagcagcagccgccacagccaccgccacagctattccagcaccaggcacagcctccttcccaccaacagtttcatccttaggaatcaggcccaggctaggaagaattacatggtcctcaatttgataatatgatgctaggaagaattacatggtcttcgatttggttatgaacaatctgaaacaagtgttttaacaaggcacatgaggggtaacatatttgtaaagcgagtaggcagtagcagaactgatttttcgtcaagtgaatcgattgtccatttagtttgttgttgtgcactattctagattgatccctgaagtaatttttagattttagagtactgataattctgttattgaagtaatatttgtttgactttggcagctttagattattagtcatattgttcatgttggtctaacacgttattgaatccgtttcctgttgctttccaatacccacgtctggttgctcggttagaccttccaccattaggatatttcctatctctgtgacagaaaaagaaccattgcctatctcccgttttcaatatagattgcccaggcaaatcctcgggatcccacttatacacatcggtttcatgaatcacgtcgagcttcagcctcttcccacaaatcttccgcttcagatagtacatcaccaactcctcatccgtgggatggaagcgaaaacccggcatcgacgacatcatctggctgaaacaatcagcggaaccagctcccgaagcctcacccattctcgatcgcaagaaaaaaatcaaacaacccttgatcacccaacacaaaaaacggaaacttttttaatcaaaacggaaaacccccaacacgattcgagcctccgagtattcgaaatcgccgatcgaatagagttaaaaaccctaactggggaaatcaaattaggggaaaaaaagaaaccaaaattattggaatcaagaagtggcaaagccgaaatcccacaactacatggtacgaatcgtacctctgggtgagaggattcgaaaggctgagtcgcggaacgaaaaaactagagcgagagagagagtcttgaaaggaaagaaacgcgtgaattgcgcgtgaattgggaaattggcgagggttttcctgcaaaatattacaagcctttagtcagtaatcaaacaagaacatattgaaggctagtcagagttttatttcagattaaagatcccttgccagtatatatgacagatcgatagagatgcacaccatatgctacatatataatatttgcctaaaagtagccagaactttagaactccaaagcattgac

SEQ ID NO: 28263 - DNA, 601 bp, Glycine max
  unsure (1)..(601): unsure at all n locations
  Clone ID: TF_LIB4167-040-R1-K1-G8
ccacgcgtccgccaacttcgatccctccccctccgggcccaccgtccccttcactgtcgaacccagcaatcacgtgacccccgccgacaacaccaacaccaaccaccctccttacgatgagatgatatacacagcaatcggggctctgaaggagaaagatggttcgagcaagcgagccataggaaagtacatggaacaagtgtacaaggaccttccacccacccactctgctttgttgactcaccatctcaaccgattgaaatccgctggtcttctcatcctcgtcaaaaaatcctacaagctccaggcccaaaagccccgcggtcgccccccaaagctcaaatcccagcccaacactgagctcacatggcctgcgctagccctcaacgacaaccctgctcttcaatccgcaaaaagaggcccgggtcgtcccaaaaagattgcaggacccgtaggtgtgagcccgggcccgatggtgccgggcagaaggggtcgtccacctgggaccgggagatctaagctgcccaagaggcctggccgtcctcccaagcccanatcccgtgtcgccgatctccagtgggctcaaacgacggtccgggcc

SEQ ID NO: 28264 - DNA, 858 bp, Glycine max
  Clone ID: TF_GmC333_7
ctcatctttcaatttcaatcaacggttatacccttttctatttgagcatcatcatgtccaccgcagcgcaccaaggccaagaaaacggcgtcgtccaagaagcccctctcccatcctaccttcgccgcggtacttcctaattactctctttcgattcaatttcgaaatcaattgtgtttaattagtttcattgttttgtagatgatagcggaggcgatagcgagtctgaaggagagaaccggttcgagccaatacgcgataaccaaattcatcgaaggcaagcacaaggagttgcctccaacctacaagaagcttgttctcgttcatctcaagaagtctgttgctgctggcaagctcgttaaggtcaaaaactctttcaagctcgcaccgactaagtctgctcctgttaaagccgctgctgctcccaagaagcccaccaaagctgcggctaagcccgccgccaagcccgcttccaagcccaaagctgctgcacctaagaagaaggctgttgccaaacccaaggccaaagctgcggccaccaagcccaaggccaagcccgctaaggccgcgccgaagaaggtcgccgctaagcctgcgaagaagactcccgtaaaggccgtgaagaagcccaagagcgtcgtgaagaaacctaaaagcgtgaaatctccagcgaaaaaggccaaggctaagaagtgagggattggagtgggttttagtttggcgttatagtgtttatgtatttcgggttgaatcgtagtataggtggatatatttttagaagagtattgatgtaaattcctttgctagaaattttaacaagtgttcttcttttgcattgaatacagtttcgttttcttc

SEQ ID NO: 28265 - DNA, 557 bp, Glycine max
  unsure (1)..(557): unsure at all n locations
  Clone ID: TF_LIB4391-008-R1-K1-F5
ctttcaatttcaatcaacggttatacccttttctatttgagcatcatcatgtccaccgcagcgcagcccaaggccaagaaaacggcgtcgtccaagaagcccctctcccatcctaccttcgccgcggtacttcctaattactctctttcgattcaatttcgaaatcaattgtgtttaattagtttcattgttttgtagatgatagcggaggcgatagcgagtctgaaggagagaaccggttcgagccaatacgcgataaccaaattcatcgaaggcaagcacaaggagttgcctccaacctacaagaagcttgttctcgttcatctcaagaagtctgttgctgctggcaagctcgttaaggtcaaaaactctttcaagctcgcaccgactaagtctgctcctgttaaagccgctgctgctcccaagaagcccaccaaagctgcggctaagcccgccgccaagcccgcttccaagcccaaagctgctgcacctaagaagaaggctgntgccaaacccaaggccaaagctgcggccaccaagcccaaggccaagcccgc

SEQ ID NO: 28266 - DNA, 971 bp, Glycine max
  Clone ID: TF_GmC772_1
ctcacgcgtccgacggctggaagacgacagaagggggtgtgtgtgaaaagaagaaactttgtaagctcaatttgtttccaaggttgctctgggaatccgaggttctaaactctgcaactaactttaatggcaactgggcaagtcattaataaacctccttcacttcctccgtaccctgagatgattcgggaggcaattgaagcactgaatgaagagaatggttcgaataaatcatcaatttcgaagtacatcgaatccacctatggtggattgcctcaggcccacaaggttttgctcaatgtgcacctcgcgaaaatgagggaaagtggagtgctagtgttttggaagaacaactacaccaagcgtgacccaaatgcgccgccacggcggggccgtggcaggccacccaagcccaaggagcctctgccaccgggcactgtcttatcaccgcccaggcccaggggccgtccttcgaaggacccaaatgacctgcagaagcctcttaaggcttcggtggtgggtagtggtaggcctcgaggccggcccagaaaaatggcctggcccactggaggccttggtgaagtatcgcaggcctctaaggcgaagcctgtcactagtaatgggaggcctagaggtaggcctcccaaagtgaaggccgtattcactgaaattagtgtttgactataaaggcttatagggcttgcatggaatagggaagtgttgtttctacaaaaagttggactgagtaacggttttgtgtgtttactagattcttctcttatgtgttacacttagctgaaatgctgaattgttgtgtacaatcgtgtagtgtagtgtagtgtagttagttgctgaggctttgttcgtttgtaaattgtaactgtgaaaataggacaatgggtggagctaatggacgcaatctctcaaattcttgatgccggggtgtttggggtaataaataaaaagtggga

SEQ ID NO: 28267 - DNA, 1147 bp, Glycine max
  Clone ID: TF_GmC1641_3
tacggctgcgtgaagggaccagagggcgactgacaccaaaatttgccaattgccatttcaatccccagtttcttcttcaacgtcctcttacgagcagatcccaattctccttcccagtttcaaaccctaattccctcattcccatggcctcagaagagcccactgtcgcggtggaacccgctcccgaacctgccaccgccgagcctcccccggaggagaaggaggagcccaaacctgaagccaaggctaagaaaaccaaggaacccaaacctaaaaaggtttccagaccacgcaaccctcccactcatccttcctacgaggagatgattaaagacgcaattacctcgctgaaggagaaaaccggttcgagccaacacgcgattgcgaagttcatcgaggagaagcacaagcagcttccaccgaacttcaggaagcttcttctctaccatttgaagaaacttgtagccgctggaaaactcgtcaaagtcaaaggctccttcaagctcccacctacccgaccttctgcatcttcttcttcttcgccggcgaagaagaagaagcccgcacctgctaagccccaacccaagcccaagcctaagcctaagcccaagcccgctgctaaagccaaggacactaaggcaactaagtcaaaggcaccagctaagcccaaggcagctgctaagcctaaagccaaagttccagccaagcccaagcccgcccctaaaccaaaggctgctgctgctgctgcttccaagcccaagcctgctgccgccaagcccaaagggactaagccagctgccaagcccaagcccaagcccgctgctaaaacaaaggctgctgctgccaagcccgcggcaaagcccaaagcgaagcccgccaaggcttcaaggacgtcgacacggacttcaccagggaagaaagcagctcctgctgcgaagccggcagcgaagaaagtagcgcctgctaagaaagcgccagtgaagagtgtgaaaccaaagagtgtaaagtctccagcgaaaaaggctacggctaagagagggggtaggaagtgagaatgtggtgggtagagtggttttagggttagttttgtgaagttctttaagctttcagcgaagtaggctacgtctcagatagggctatggaagat

SEQ ID NO: 28268 - DNA, 2567 bp, Glycine max
  unsure (1)..(2567): unsure at all n locations
  Clone ID: TF_GmC206_2
cggtccggattcccgggtccgtctcgagtccgcgtaaatccaatccaattcccaattttcgaatctaccctttatctctctacgatggagccttcctcgatctctccaccgccagctccgcctgccaccgccgtccccttcccggccgaacccaacgaccaccttctcccacccatttccgaaccaccttccaaccatccaccctacgccgagatgatatacacggcaatcgaggcgctgaaggagaaagagggttcaagcaagagggccatagcgaagtatattgagcaagtgtacaaggaacacctcccaccgaatcactccatcttgttgactcagcacttaactctcttgaagagcagcggaatgctccaaatggtcaaaaaatcctatgcgctccctagatctgtgcctcttaccggagctgcacccgcacaagcgcatgatgccgccacctctgctctgcagttgacttccccgaggcctagaggccggcctcgcaaggctcaaattccggtccaaaacttacctcaggacattaatgtgcaggttcagcagaatgccgagcccgtctgggccgcgctcggacttgcagatgagcccgtgcagacagaaggcagcagcaagaagcggggccgtccgaagaagagtgtcactcccggagcaggtccggcaaagagaggacgtcctcccggttctgggaaaaggttgggccgtcctcccaaggagaagtctgtcactgcaacaacaacaacggatgtctctgggcccaagagacgcccgggccgcccgcccaagaatcagtctcagccaactcccattccctttgctccggcggatgcagccgctgccgtgggtacagagtatgtcccacgcgctgaaactgtgccggttgatgctgcggctgctctggggcctagagctcgtggacgaccgaagaaatacgctgatgagatggttgctgcaggccgaggtaggggacgaggccgtggacgtggtggcggcggcggaagaggacgagggagaggacgcggtcaattgcctgcgcagctcagaaaatcaggggcaagacccgtgggtcgtccgaagaaggggtcaacttctgctagtacttctcaaaatgctgctaatgaagatctcaggaggaagcttgaacactttcaatcaaaagtcaaggaatctcttgcagttcttaagcctcattttaaccatgaaagtccagtcactgcaattgctgccattcaagagttagaagtactgggaactatggacctcaatgcaccactaagggatgaaacacttccatcgcaagaggagcagccaccactgcagcagcagcagcagccaccgcagcaacagttcccaccaccacaacagcagccaccacagcaacacctagcaccacaacaactgccgccacagccacaggcaccaatatttcagcaaacatatcctccatttcatctgccgcagttccaccatcaccagccgacgctgcagttccagcagcagccacagccgccacagctattccagcatcaggcacagccaccttcccaccaacagtttcatccttaggaatcaggcccaggctaggaagaattacattgtcctgaatttgataatgatgctaggaagaattacatggtcttcaatttggttatgaacaatctgaaacaagtgttttaacaaggcacatgaggggtaacagatttgtaaagcgagtaggcagtagcagaactgatttttcgttaagtgaattgattgtccatttagtttgttgttgtgcactgttctagattgacccctgaagtaatttttagattttagagtactgataattctgttatttaagtaatatttgtttgactttggcagcttaagattattagtgatattgttcatgttggtctattttgtagtccccttttacccctccgttttttgttgtgttctgggaatttttttcactctatctgatagggattatttgcatatcacgtcancgatcctttcctgtgctttccaatacccacgtctggtgctcggttagaccttccaccattaggatatttcctatctctgtgacagaaaaagaaccattgcctatctcccgttttcaatatagattgcccaggcaaatcctcgggatcccacttatacacatcggtttcatgaatcacgtcgagcttcagcctcttcccacaaatcttccgcttcagatagtacatcaccaactcctcatccgtgggatggaagcgaaaacccggcatcgacgacatcatctggctgaaacaatcagcggaaccagctcccgaagcctcacccattctcgatcgcaagaaaaaaatcaaacaacccttgatcacccaacacaaaaaacggaaacttttttaatcaaaacggaaaacccccaacacgattcgagcctccgagtattcgaaatcgccgatcgaatagagttaaaaaccctaactctgggtgagaggattcgaaaggctgagtcgcggaacgaaaaaactagagcgagagagagagtcttgaaaggaaagaaaccggacgcgtgg

SEQ ID NO: 28269 - DNA, 1338 bp, Glycine max
  Clone ID: TF_GmC796_2
acggctgcgagaagacgacagaagggggttcttttcatgcatgtgttgaatgcacatgctggtctccggtccggttagggcatttctgggaccttaaatcaccaatttctcacccaatcaattccaattaagctgagggtgtttctgatctatatgtgatgggtgctccgaagcagaaatggactgcagaagaggaacaagcacttaaagccggagttgtcaagcatggtgttggtaaatggcgcaccatactgaaggatccagagtttagtagtgtcttgtacctgcggtcaaatgtggatctcaaggataaatggagaaatctgagtgtgatggcaaatggatggagctctagggaaaaatctaggttatcagtcagaagggtgcatcaggtcccgagacaggatgagaactctatggctatcactgctgttgctccaagtgatgaagaaattgttgatgttaagcctcttcaagtttctagagatatggtgcatattcctggtccaaagaggtctaatttaagtttggataaacttataatggaagcgatcacttgcttgaaggagaatggtggttctaataagacagctattgcagctttcatagaggtaaatcgcaagtatagaattgcacctatagcagcatattctgacagaagaagaaactcatccgtgttatatttggaagggaggcagaaagcctctatgaaaattgacagggatgagaccaacatccttactagatctcagatagatttagagttagaaaagataaggtctatgactccacaagaggcagctgcatttgctgctcgagcagttgctgaagcagaagccgccattgcagaagcagaggaggcagcaaaggaagcagaggcagcagaagctgatgcggaggctgcacaagcttttgcagatgctacaacaaaatcagcgaaagggagaaaatccccaaagaggatccatgcttgatggaagtttgaagaattagactcgaggagagatgaacggtggaattgagtaggacagccagccagctaaatatcatttgctggtatagtctatagtttgcaatattggaggctcttgtgactatgcaagtttcacctttattaggatatatttttggatattgaaatatccttcttgtagatagaaccattgtttgaatctttattgtaatttctttatagctgttgttaccttagcgctctgtccatgtacttgttgtttatagaaagtagatgtttagatgaatgggaattcgttcaaaaaaaaaaaaaaaaaaaataaaataaaagcggccgctccacccgacccaagaataagaaagaga

SEQ ID NO: 28270 - DNA, 974 bp, Glycine max
  unsure (1)..(974): unsure at all n locations
  Clone ID: TF_GmC333_5
tttctctctctctcagaatttctatctatctcttgtttcaatttcaacaacggttactcctttttcgttttgagtttcaatcaagccatcatcatgtctaccgcatcgcaacccaaggccaagaaaacggcgtcgtccaagaagcccctctcccaccctcccttcgccgtggtactttcccaaaatactctccttcaaaatcaattctcttagtttatttcttttccaattgtatttaatttgattattctgtagatgatagcagaggcgattgcgagtctgaaagagagaaccggttcgagccaatacgcgataaccaaatacatcgaagggaagcacaaggagttgcctgcaacctacaagaagcttgtcctcgttcatctcaagaaatctgttgctgctggcaagcttgttaaggtgaaaaactcctttaagctcgcaccgactaagcctgctccggttaaggccgctgctcccaaaaagccaaccaaagctgccactaagcccgcttccaagcccaaagctgctactcctaagaaaaaggctgttgccaagcccaaggccaaagctgcggccacgactgccaagcccaagtctaagcccgctaaggtcgcggccaagaaggtcgctgctaagccagctaagaagaagacacccgtaaaggccgtgaagaagcccaagagtgtcgtgaagaaacctaagagcgtgaaatcaccagcgaagaagactaaggctaaggctaagaagtgatgatttggattggggtttggttttggtttggcgttatagttttatgcattccgggttcattcgtagtagtataggtgaatatatttttagaagagtattgatgtaaattcctttttctagaaattcaacaagtgttcttgtttgcattgaatacaatttcgttttctttacgtaaaaaaaaaaaaaaannnnnnnnnaagcggccgctctagaggatccaagct

SEQ ID NO: 28271 - DNA, 1904 bp, Glycine max
  Clone ID: TF_GmC1641_1
ggctgctgctgcctaacaggccgcgctacatcctacagcgaacccgccaaggcttaaaggacgtctcacacggacgttcaccagggcaagaagcagctcctgctgcgaagccggctagcgaagaagtagcgcctgctaagaaagcgccagtgaagagtgtgaaaccaaagagtgtaaagtctccagcgagaaaaggctacggctaagagagggggtaggaagtgagaatgtggtgggtagagtggttttagggttagttccacgcgtccgtacggctgcgagaagacgacagacagggactgacaacaaaatttgccaattgccatttcaatcctcagtttctttcttcaacgtttccatcatacacagatcccaatcctctctcaagccctaatttcccctcatttccatggccacagaagagcccactgtcgcggtggaacccgctcccgaacctgcctccgccgatcctcccccggaggagaaggaggagaccaaacctgaagccaaggctaagaaaaccaaggagcccaaacctaaaaaggtttccagacctcgcaaccctcccactcatccttcctacgaagagatggttaaagatgcaattacctcgctgaaggagaaaaccggttcgagccaatacgcgattgcgaagttcatcgaggagaagcacaagcagcttccaccgaacttcaagaagcttcttctctaccatttgaagaagctcgtcgccgccggaaaactcgtcaaagtcaaaggctcgttcaagctcccacctaccagacctgctgcatcttcttcttcttcttcttcgccggcaaagaagaaaaagcccgcagctgccaagtccaagcctaagcctaagcccaagcccgctgcgaaagccaaggatactaaggcaactaaatcgaaggcaccagctaagcccaagccagctgctaagcctaaagccaaagctccagccaaggccaaacccgctgctaaaccaaaggctgctgctgctgccaagcccaagcctgctgccgccaagcccaaagccgctaaaccagctgccaagcccaagcccgctgctaaaacaaaggctgttcctgccaagcccgcggcaaagcccaaagccaagcccgtcaaggcttcaaggacgtcgacgaggacttcaccagggaagaaagcagctcctgctgctaagccggcggcgaagaaagtagcggtggcagcgaagaaaacgccagtgaagagtgtgaaaccaaagagtgtaaagtctccggccaaaaaggctacggccaagagagggggtaggaagtgagaaagagtggtcggtggggtagggttgttttggggttggttttgtgaagttctttgtcctcttggtgtagttgggggttacagatgatgttcctataatatatgaaatctgattttatgaaacctttgttatttccctttttagttttgatttttttttggttcgacctaggaagtagataaaaacaatgtttctagctatgcctttcagctaaatgagttaatcataaaatgtatcttagagtgtgaggtttctttgcgttatagtacctttgatggatcaatgtagtataagcacctttttcacatgaatggatttgtagtatatgctttctgtgtatttaaatttatgaagtttctctttataattaaatgaggatactaattattgtagctgatatgcctgcatttgcttgattgaccttcttgtatgaattgattagctattggtcgtttgcatctccacttcttccctgccttcagttgattttttttttttcagtgcaatttctggttcgatccgaaaccataattctaattctagttctaataataactctaattctaattctcttacaatttttgtgatctgaacttggatc

SEQ ID NO: 28272 - DNA, 345 bp, Glycine max
  Clone ID: TF_LIB3108-022-Q1-K1-E10
cctctgcagaaatgtcagctgccgagctagcccccgccccagcccctgccaaggtgaccaagcgctaaggcgccaaagaagacctccgctccaaagaagcctgcagcccatcctccctacatcgagatgatcagcgaggcgatttccacgctgaaagagcgtggtgggtcgagccagtatgcaatctccaagtttattgaagacaagcataaggctcacctcaccggaaacttcaagaagctccttctcgtccagctcaggaagtccacagctgccggcaagctgactaaggttaaaaactcttacaaagtggctgtgaaaccagctgctgcaaagaagcctact

SEQ ID NO: 28273 - DNA, 375 bp, Glycine max
  Clone ID: TF_uC-gmroLIB3259P207c02b1
catatactgaggggaggcactcattgagcctatgatatgaaagataaaacggaacaaaataaagggcggacaatgccccatggctgacataatgtcggataacactggatttagacaacactatactcattgatcaaaatcaacagacctaaccactctctctcattaccaattatgcgaatctctctgctgcatggacccaacttcgatccctctctctacggccaccaacatccccttcactgtgcaacctagtaatcacgtgaccctcgtctacaacagcaacaccaacaccaaccaccctccttacgatgagatgatgtacacagcaatcggggctataaaagagaaagatggttccagcaaacgagccat

SEQ ID NO: 28274 - DNA, 1094 bp, Glycine max
  Clone ID: TF_GmC1613_5
tgtatttgtcatccatatcatacccttcactttcctgaaaaaaagaattttgaacctgcctctgttaaagtttgcattttttttgggtgggttgatagtactgtgcaagctttggaacttcttcacaagctgctacttcaatggccactgaagaggttaacaaacctcaatcgcttcctccataccctgagatgatagtgaaagcacttgaagccttgaatgaggctgatggatcgaataaatcagcgatatcaaagtacatagaaaccacctacggtgagttgccagatgaaactgttttggggagtcacctgaacaagatgaaagagagtggagagcttgccttcaaacagaacaattacatgaaagctgatccaaatgccccaccaaagaggggacgtggaaggccaccaaagccaaaggttccattgccaccaggcactgttgtgtcccctccaaggccaaggggtcgtcccccaaaagaccctaatgcccctcctaagtcccctaaggctaaggccacccctgccactggcaggccaagaggaaggcctaagaaggttgctcgctcaccggccgtgccgtctcccaccgccgtctccactggaaggcctagaggcaggcctcccaaagtgaagcctcagttgacagaagttagtgttgagtcatagaatggtttcttagttataatgccaaatttagtgatatgctctgtagtggtggtgggtgtggtcttagattttgtgttgatgtaatctctttgtaaaattatgtagtggtagctaacctattgtgaggctttgtgttggtttttctttctaattattatccaatagaacaatgacttaaactaaaaaaaaaaaaaaaaaactcgaggtttcaaggccttcgagccaatcctcctcctcggctcgcaccgcttcgccggcgtggacatgcgcatcagagtcaagggcggcggtcacacctcccagatctacgccatcaggcagagcatagccaaagccctcggtgcttactaccagaagtacgtatacgaagcagccaaggaagatatcaaagacatcctagacaagtacgaccgacaccttctt

SEQ ID NO: 28275 - DNA, 976 bp, Glycine max
  Clone ID: TF_GmC1613_6
ctctttccattttttaatttatttatcttcctttaaattcaatcctcagatctttgtaagagtcatccatatcatacccttcactttcctggaaaaaaattggaacctgcctctcttaaagtttgtatttttttgagtgggtgggttgattgagagtactgtgcaagctttggaactttgtcccaacctgctacttcaatggctactgaagaggttaacaaacctcaatcacttcctccataccctgagatgatagtgaaagcacttgaagcactgaatgagccaaatggatcgaacaagtcagcaatatcaaagtacatagaaaccacctacggtgagttgccagacgcaaccgttttggggagtcaccttaacaagatgaaagacagtggagagctttctttcaaacagaacaattacatgaaagctgacccaaatgccccaccaaagaggggccgtggaaggccaccaaagccaaaggctccattgccaccaggcactgttgtgtcccctccaaggccaaggggtcgtcccccaaaagaccctaatgcccctcctaagtctcccaaggctaaggccacccctggaagtggcaggccaagaggaaggcctaagaaggttcctcggtctccggccgtcgccgctccgaccgccgtctccagtggcaggcctcgaggtaggcctcccaaggtgaagcctcagttgacagaagtcagtgttgagtcatagaatggcttctttctttctaattgatgtcaaaactcttgtagaagtgatgatgggtgtggtcttagatattgtgttaatgtaattcctttgtaaaattaagtagtggtagcttgcttattatggggctttgtgttggttattcttgctaattactactaccaaagagaacagtgacttgagctaatggtgatttggtttcttgtggtttgttccttagttctaacttataaatccataatgtagaagg

SEQ ID NO: 28276 - DNA, 1075 bp, Glycine max
  Clone ID: TF_GmC1613_8
gtgcaaaagacaacagtgtaccttcaaatatttctgagaagtaacacatccctgccacggcatcgatccgagtgaccttcttcacaatagatcctcagccgcacgatcattgtcttttgggtgattcctagccgtccataatctcgaaaagatgaacaaaggagacatgtaaaagagatctttgtaagagtcatccatatcatacccttcactttcctgggaaaaaattggaacctgcctctgttaaagtttgtatttttctgagtgggtgggttgattgagagtgctgtgcaagctttggaactttttcccaacctgctacttcaatggccactgaagaggttaacaaacctcaatcacttcctccataccctgagatgatagtgaaagcacttgaagcactgaatgagccaaatggatcgaacaagtcagcaatatcaaagtacatagaaaccacctacggtgagttgccagacgcaaccgttttggggagtcaccttaacaagatgaaagacagtggagagctttctttcaaacagaacaattacatgaaagctgacccaaatgccccaccaaagaggggccgtggaaggccaccaaagccaaagactccattgccaccaggcactgttgtgtcccctccaaggccaaggggtcgtcccccaaaagaccctaatgcccctcctaagtctcccaaggctaaggccacccctggaagtggcaggccaagaggaaggcctaagaaggttcctcggtctccggccgtcgccgctccgaccgccgtctccagtggcaggcctcgaggtaggcctcccaaggtgaagcctcagttgacagaagtcagtgttgagtcatagaatgacttctttctttctaattgatgtcaaaagatgtagtgttctactcttgaagaagtgatgatgggtgtgatcttagattttgtgttgatgtaatttctttgtaaaattatgtagtggtagctaacttatcatgaggttctgtgttggtttttcttcctaaattattatcaaagtgaacagtgacttgaactaatgtgcatttagttttcagtgtt

SEQ ID NO: 28277 - DNA, 2085 bp, Glycine max
  Clone ID: TF_GmC333_1
ctcatatttcaatttcaatcaacggttatacccttttctatttgatcatcatcatgtccaccgcagcggaggcggaggccaagaaaacggggtcgggcaagaagcccctctcccatcctaccttcgccgcggtacttcctaattactctctttcgattcaatttcgaaatcaattgtgtttaatttagcggcatcgtgttccggctgatcgggaaagcagaaggcggaaaccttattctctccttctcccgccgcaactcactgtcttccttctctagggtttttagctcccccaatttcttcgctcaacatggttcttcaaaatgatattgatttgctaaatcctccggttgagcttgagaagaggaaacacaagctcaagcgtcttgttcagtcaccaaactctttcttcatggatgttaagtgccagggttgcttcaacataaccactgtctttagccactctcagactgttgttgtatgcggaaactgccagactgtcttgtgtcaaccaaccggtggccgggcaaggctaaccgagggatgctcctttaggaagaagggagactgagtggattgccatctttttttgtttgtgattggagagtttcagtaatgccttcttttgttttggttatgatgatatgttaattttgttaaatttgtaagacttgagtctacaagcttatccaagacattagggattatttacacctttcccacgcgtccgcacggctacgatatgactacacaagttgatcatcatttttttctcatctttcaatttcaatcaacggttatacccttttctatttgagcatcatcatgtccaccgcagcgcagcccaaggccaagaaaacggcgtcgtccaagaagcccctctcccatcctaccttcgccgcgatgatagcggaggcgatagcgagtctgaaggagagaaccggttcgagccaatacgcgataaccaaattcatcgaaggcaagcacaaggagttgccttccaacctacaagaagcttgttctcgttcatctcaagaagtctgttgctgctggcaagctacgtttaaggtcaaaaagctctttcaagcacccgctccgactaagtctgctcctgttaaagccgctgctgctcgcaagaagcccaccaaagctgcggctacgcccgccgccgagcccgcctccaagccccaaagctgctacacctaagaagaaggctgttgctaagcccaaggccaaagctgcggccaccaagcccaaggccaagcccgctaaggtcgcaagccgaagaaggtcgccgctaaagcctgcgaagaagactgcccgtaaaggccgtgaagaagcccaagagcgtcgtgaagaaacctaaaagcgtgaaatctccagcgaaaaaggccaaggctaagaagtgaggggattggagtgggttttagtttgggcgttatagtgtttatgtatttcgggttgaatcgtagtataggtggatatatttttagaagagtattgatgtaaattcctttgctagaaattttaacaagtgttcttcttttgcattgagaaaagaagacaaagactaaggctaagaagtgatgatttggatgggtttggttttgtttgcgttatagttttatgcattccgggttcattcgtagtagtataggtgaataattgggtgttctctttactgccgttccgttcatgtggccatgttagatgcttacttttaaattagagtgcatgggatgggaaacgtatctttctgtttctccagtagatgtttttttctgataaaaaaaaaaaaaaaaaaaaaaaaaaaaaaaaaaaaaaaaaaaaaaaaaaaaaaaaaaaaaaaaaaaaaaaaaaaaaaaaaaaaaatagggggccctccgacccccagtttttttccccttttaggggggggaaatggcggcttggggaaaaaaagggggaaagtggttccttgggagaaatttttttcccttcaaattcccacaaaaaaaaaggcggggaggaaaaaagggaaacgccggggggccttaaggggggggctccccccctttattgggggggccgtctttgccctttttc

SEQ ID NO: 28278 - DNA, 787 bp, Glycine max
  Clone ID: TF_GmC333_10
ctcagaatttctatctatctcttgtttcaatttcaacaacggttactcctttttcgttttgagtttcaatcaagccatcatcatgtctaccgcatcgcaacccaaggccaagaaaacggcgtcgtccaagaagcccctctcccaccctcccttcgccgtgatgatagcagaggcgattgcgagtctgaaagagagaaccggttcgagccaatacgcgataaccaaatacatcgaagggaagcacaaggagttgcctgcaacctacaagaagcttgtcctcgttcatctcaagaaatctgttgctgctggcaagctcgttaaggtcaaaaactcttttaagctcgcaccgactaagtctgctcctgttaaagccgctgctgctcccaagaagcccgcttccaagcccaaagctgctgcacctaagaagaaggctgttgccaaacccaaggccaaagctgcggccaccaagcccaaggccaagcccgctaaggccgcgccgaaaaaggtcggcgctaagcctgcgaagaagactcccgtaaaggccgtgaagaagcccaagagcgtcgtgaagaaacctaaaagcgtgaaatctccagcgaaaaaggccaaggctaagaagtgagggattggagtgggttttagtttggcgttatagggtttatgtatttcgggttggatcgtagtataggtggatatatttttagaagagtattgatgtaaattcctttgctagaaattttaaccagtgttcttcttttgccttgaaaacagtttcgttttcttcgcg

SEQ ID NO: 28279 - DNA, 1204 bp, Glycine max
  Clone ID: TF_GmC333_6
caaggctaaccgagggatgctcctttaggaagaagggagactgagtggattgccatctttttttgtttgtgattggagagtttcagtaatgccttcttttgttttggttatgatgatatgttaattttgttaaatttgtaagacttgagtctacaagcttatccaagacattagggatccacacctctctctctctctcagaatttctatctatctcttgtttcaatttcaacaacggttactcctttttcgttttgagtttcaatcaagccatcatcatgtctaccgcatcgcaacccaaggccaagaaaacggcgtcgtccaagaagcccctctcccaccctcccttcgccgtgatgatagcagaggcgattgcgagtctgaaagagagaaccggttcgagccaatacgcgataaccaaatacatcgaagggaagcacaaggagttgcctgcaacctacaagaagcttgtcctcgttcatctcaagaaatctgttgctgctggcaagcttgttaaggtgaaaaactcctttaagctcgcaccgactaagcctgctccggttaaggccgctgctcccaaaaagccaaccaaagctgccactaagcccgcttccaagcccaaagctgctactcctaagaaaaaggctgttgccaagcccaaggccaaagctgcggccacgactgccaagcccaagtctaagcccgctaaggtcgcggccaagaaggtcgctgctaagccagctaagaagaagacacccgtaaaggccgtgaagaagcccaagagtgtcgtgaagaaacctaagagcgtgaaatcaccagcgaagaagactaaggctaaggctaagaagtgatgatttggattggggtttggttttggtttggcgttatagttttatgcattccgggttcattcgtagtagtataggtgaatatatttttagaagagtattgatgtaaatcctttttctagaaattttatcaagtgttcttgtttacattgaaaaaaaaaaaaaaaaaaaaaaaaaaaaaaaaaaaaaaaaaaaaaaaaaaaaaaaaaaaaaaaaaaaaaaaaaaaaaaaaaaaaaaaaaaacccccaaaaaaaaaaaaaaaaaaaaaaaaaaaaggggccctttttaagggcccaaatttttttccccgggttttgcaacttaaaactttttttttggggcccccaaattaaat

SEQ ID NO: 28280 - DNA, 2203 bp, Glycine max
  Clone ID: TF_GmC137_1
gtttagttaccgacattcccaaaattggatgcatatccgcaacggaggcagagattgagcgtatgatatgagagagaagacggaacaaaatcaagggcggagaatgccccatggctgacatcatgtcggttaacactttattcagacaacactatactcattaatcaaaatcaaatgacctaaccactctctctttttcccaattttcgaatctctctcctccatggacccaacttcgatccctccccctccggccaccaccgtccccttcactgtcgaacccagcaatcacgtgacccccgccgacaacaccaacaccaaccaccctccttacgatgagatgatatacacagcaatcggggctctgaaggagaaagatggttcgagcaagcgagccataggaaagtacatggaacaagtgtacaaggaccttccacccacccactctgctttgttgactcaccatctcaaccgattgaaatccgctggtcttctcatcctcgtcaaaaaatcctacaagctccccggatctgatcctcttcccgtgctccaggcccaaaagccccgcggtcgccccccaaagctcaaatcccagcccaacactgagctcacatggcctgcgctagccctcaacgacaaccctgctcttcaatccgcaaaaagaggcccgggtcgtcccaaaaagattgcaggacccgtaggtgtgagcccgggcccgatggtgccgggcagaaggggtcgtccacctgggaccgggagatctaagctgcccaagaggcctggccgtcctcccaagcccaaatccgtgtcggcgatctccagtgggctcaaacgacgtccgggccgcccacccaaagccgaatccaacgtaaacgtcatccccttcgcagcccctgttgctcccggcctgcccacagtgcagcccatcgttcctactgcttccgtgcccaatggatctcccaggcccagaggaaggcccaaaaagattgttgccggtgcgggggctccggcgctctcttccgttggtggtgcaccacgtggccgcggacggccccgtggggtcttgccgttggtgaggccgggccgccctcagaagctcgccgttggaaggcccaagaatcctgcaagaaggcccgtggcgccccaagggatcgatgcaatcacagcacataaggctgctaatgatgatctaaggaaggaagcttgaacacttccaatcaaaagtgaaggagtctcttggcacgcttaagccttattttaaccatgaaagtccagtcactgcaattgcggcaattcaagagttggaagtactgtcaactttggaccttaaagcaccattgagggatgagacccatcaacagccacagccacagacacaggtgtatgaacagcaatatccccagccacagtcactgcagcagcaattttttcaaccacatacatcagccccgagctaggcctgaacttgatgaaggacaacttgtacaagtgtttttaacaagacacaagagataaaagatctgtaaagcggttaggaagtagtggtactgatttttctgagggtgaagtgactctgtctattttagtttgttgttgtgcaacatttagtttgacccctgaagtaattagcgggtactgttgattctgttgttatttatttgacttttacagtttactttagtcacattaatgtgtatgtttggttcagcctcctttgttgttttatatttttaatggttactgcttgctatttctcatttcccattaatcattattgagtggttgtgtgaaaaaaaaaaaaaaaaaaaaaaaaaaaaaaaaaaaaaaaaaaaaaaaaaaaaaaaaaagaaaaaaaaaaaaaaaaaaaaaaaaaaaaaaaaaaaaaaaaaaaaaaaaaaaaaaaaaaaaaaaggggggggccctttttaaagaaccaattttttttccccggggtgggaaagatttatttttttttttggggccccaaaattaaatttctgggccctttttttaaaaacttggaaggggaaaaacccggggtttccccaatttataccctttggaaaaaatcccctttttcccggggggggaaaaaaaaaaaaggccccccccattccctttttcaaaaattttcccatccttattgggaaatgggccccccccttttggggcctttttagccggggggtgggggggttttccc

SEQ ID NO: 28281 - DNA, 881 bp, Glycine max
  unsure (1)..(881): unsure at all n locations
  Clone ID: TF_GmC875_3
attctttcttctttgtttgtttctgaaaggtctctttctcaatctgaaatcctagccggtgattacattgatttcatggactggccttcaacgtccggttcgcattaatttctaggtcattcccttaaaccctcatgtattgcatccatgattttatggttgtcagactgagatattttttcatgttctaattggacttctttgccttttcattcatcagcaagtcagaaattcacaagtgtctggttttctgaattttgaagtaaatcacctttgaaatttcacatacctcataagttttttgggaaaccattggtattgaactctgttcagcttcctgctattttctgcacatcaggctgcaccttgtagtccaacacatctgctccctaagtttatagcatttagcatgctggcaaggttaatatttgtggtactcaccatagaacaaatcagagtttgtggcatataagatggccttaacctagatttagagcagttaggtagaaacttttcctctccttctaataaaactcggtagttgcttcaaacaagactagatgactgtggatgaagtggatagtagctctgagtggagcagagagcaggataaagcatttgaaaatgcattggcaactcatccggaagatgactcagatcgttgggagaagattgccgctgatgtgccggggaagactatagaagaaatcaaacagcattatgagcctcttggttgaagatattaaccagattgaatccgnnntgcgtgcctcttccatcttataattcttcttcagagggctncaacagccantgccagtgatgaaggagctgggcagaaaaggcagcgtcctgggcattatagcgggtgagtctaatca

SEQ ID NO: 28282 - DNA, 419 bp, Glycine max
  Clone ID: TF_LIB3170-061-Q1-K2-G10
gtaaaccgtgccactccttttttcctcttcttctcgtgcttcagtggaaatcggcgtagctccacgaccgacataagagctcaatggcaccaacaaggaaatctagaagtgtaaataagcggatgtcaagttcaaatgacaattcccctgagaaagatggagttaattcaaataaaagcaagcaacggaagaaaaagttgactgataaattgggatctcagtggagcaaggaggaacttgagcgattttatgaagcatataagaagtatgggaaagattggaagaaggtggctgcttgtgtacgcaatagatccactgaaatggttgaagctctttacagtatgaatcgggcatacctctctctgccagaggggacggcttctgttgttggccttatagcgatgatgacggatcattac

SEQ ID NO: 28283 - DNA, 1982 bp, Glycine max
  Clone ID: TF_GmC5883_1
ccacgcgtccggggagaacgaacctgtttaattcccccaaatcggaagttgatcctgaaaccctaaatagcccttaacgttgtgtctatgtttttgaattatggacgcgaaggatatcctgggattgcccaaaaactcgttcccatctctcgagaagaaatctcgtcctcccaaagagtctcaaagaaaaccagatggcatttcgcgcgaggtgtatgcgcttacgggcggattggcctctctcatgcctgcaattgaagcctctcagttgaagaaaaagcctcttcctctcgaaaaaatcacttggcagtggcttcctttcaccagttctgctcgtaaagataatcttcatctttaccattgggtacgagtcatcaatggtgttcctcctacgggggactattcttttgccaagtataataagtccgttgatgttatcaaatacacagatgaggagtatgacaagtatttgtcagatcctacgtggaccaaagaggagacagatcaactatttgacttgtgtgagagatttgatctccgatttattgtaatagctgataggtttccatcatctcggactgtagaggaattaaaggatagatattatagtgtttcccgggctatattgattgctagggctccatcttctggagatgttgtggcacattctattgttaaggaaacatataatgttgcacaagaaatggagcgaaaaagagcactgtccatggtcctctctcgcagaagctacagagagggctgtccctggtgaaaccatatctccatcaaatgtgcaaattccaatggctgttccagataatgcatctactctagctactcttcggatgctacgtctatatctgaagatatatgcactggagcaaatggtgcaagctgcgaacgcatctgctggacttcggactatcaaacgggttgaacaaactttgcaagatcttggggtcaatttgaagccaagggttccaacgaaagctgtttgtgcagagcatcttgaattaagaaaagaaatactaactttggcttaatctccagaagcaggtgcaatataaagaggctgaaggttcctcttttcgtgatgggtcatatggtgaaacacctggaacaccaaaggaccgaacatttgttccagattcaacgaatttcggagtggaaagggttggcaaaaaggaccaaaagcgcaaggcacctggagctccatcagctcataaaagacctagaaaactaaaggcctcagatctttagtttctcaggtggcaaccgggaaaggtgtttcaattcacagaattctttcaatcaaactgaaatttggtttacttcggtctgcaattttagattaatgccactcttgttattcgatgtaaaaagaaaagtgagatccctgagatgagtgagatctgccatcttaaccatgccctgagaagctggactttatttcttgtgctgttaatgctttgtagaattgtagggagaccaggtacaaaaaaggcatcttatttgaatatgcatgtatataagtttggacatgggaattccagatgcctttgacagcttatgtcgggatgtagaaattgggtgcggatggaacaagtgtcctgcttcataaatgtttctaatcgttcacacacccaatgaaaaaaaaaatgtttttattcctgctaaggatttgtagaattgtagggattccaggtacaaaagaggcatcttattggaatatgcatgtatataagtttgacatgggaatttcggatgactttgatagcttatgaagataattttattgtcattgtaagaaaatcgtggaatagcccaggagcataaggaagaagccaggagtaactgattgaacttatcaccttcccatatctataactattaataatgggaatcatccaatttggtgtacatatttcaatggataattttatcattaaacccctttttaaattttttttttttttcctttg

SEQ ID NO: 28284 - DNA, 1275 bp, Glycine max
  unsure (1)..(1275): unsure at all n locations
  Clone ID: TF_GmC600_1
ggataattaaagtgaagaaagaattaaagtagcaacaaatactcttccctacacttggcagaaaaaaaatggttcaacaagaaatccgaaggggtccctggacagaacaggaggactacaaattagtgtattttgttaacatgtttggagatcgtagatgggactttatagcaaaggtatcaggtttgaaggtggagggagactgtaaataggtatgaatatttggacatgctaagttatacatgaagcacccctttaaccacctcactttgttgtaggtttgaatagaacaggtaagagttgcaggttacggtgggttaattacctccaccccgatctcaaacgagggaagctcacaccccaagaagaacacctcgtcatggaccttcagtgaaaatgagttattggaggactcacatgagcaaaaagaatgctaatgagaaaaagcatgcatcagcagcatcgcctgtttcttctatgttgtcaatcttcactgtcctcaaacaaccatgttgtggattcacatgcttccaaagaggttggagaagagagttgttatgacacaggtggatatgatgatggcatgatgatgggtttaattggtggtgaaaaggggtactccatggatgatatatggaaagatattatgtcagaagaagagaacaacatttataataataatcttcaacctgtctatgaagggcatagtgaagagggatgcaacttctcttgtccaccaccaccaatgattatgccttctccaccatcatgggatcagtacaacatttcttctcaacccttatgggtgatggatgaagaagaaagtaataagatgttattccctacactaagtgaccaatattttccttactatgaacaagggaacgcatttctaactggctaatcaggagattctttttttcttttgtccttaaaaaaattatcaatattttgttcttatgtgtgtgccatctgtcacaataagaaggcttaagtgttaacctgtacagcatagtatctttgagctttcggcatggtcctccatagtgtgacacagctgtaatcgatctcaaatgtaactgtagtctatgtcaaaatgtgtttgtggttttactttaaagaaaaatccaatggggaaagtggttatgttatgaattatgtaaaatatacatcaagcacttatgcaaattcaagttttaatctaatttgaaaaatgcctagcaattatagcatttcatttttattaaaaaaanaaaaaaaaaaaaaaaagagggc

SEQ ID NO: 28285 - DNA, 2008 bp, Glycine max
  Clone ID: TF_GmC5883_2
tccggaattcccgcgtcgacccacgcgtccggagaaaagtgagagggaaaactggaacaggaagaacgaacctgtttaattcccccaaatccgaagttgatcctgaaaccctaaatagaccttaacgttgtgtctatgattgtgaattatggacgcgaaggatatcctgggattgcccaaaaactcattcccaactctcgagaagaagtctcgtcctcccaaagagtctcaaagaaaaccagatggcatttcacgcgaggtgtatgcgcttacgggtggattggcccctctcatgcctgcaactgaagcctctcagttgaagaaaaagcctcctcctctggaaaagatcacttggcagtggcttcctttcaccagttctgctcgtaaagataatcttcatctttaccattgggtacgagtcgttaatggtgttcctcccacaggggactattcttttgccaagttaacaagtccgttgatgttatcaaatacacagatgaggagtatgacaagtatttgacagatcctatgtggaccaaagaggagacggatcaactatttgacttatgtgagagatttgatctccgatttattgtaatagctgataggtttccatcctctcggactgtagaggaattaaaggatagatattatagtgtttcccgggctatattgattgctagggctccatcttctggggatgttgtggcacattctattgttaaggaaacatataattttgcacaagaaatggagcgaaaaagagcactgtccatggtcctctctcaaacaaggcaacaagaacgaagagatgaagaggttcttgttgaagcaaaaaaatagcggaaaaacgcctacctcccaaggttgctggacagtctcagtttgttgcttctaatgctggtgcagaagctatagagagggctgtccctggtgaaaccgtatctccatcaaatgtgcaacttccaatggttgctccagataatgcatctactctggcttctcttcgcatgcttcgtgtatatttgagaacatatgcacttgaacaaatggtgcaagctgggaatgcatcagctggacttcggactatcaaacgggttgagcaaactttgcaagatcttggggtcaatttgaaaccaatggttccaacgaaagctgtttgtgcagagcatcttgaattaagaaaagaaatactaacacccacgcgtccgcagaaacaggtgcaatataaagaggctgaaggttcctcctttcgtgatgggtcatatggtgaaacacctggcacaccaaagcatttacatcgtggtggggatcaggatcgaacatttattccagattcaatgaatttcggagtggaaagggtaggcaaaaaggaccaaaagcgcaaggcacctggagctccatcagctcataaaagacctagaaaactaaaggcctcagatctttagtttctcaggtggcaaccgggaaaggtgtttcaattcacagaattctttcaatcaaaattatgaatgttgtggaaggtgtggctgtgaactcaacacctgaaaattcggattgtggtatatctagtccaactgaaattcggttcacttcggtctaaaattttaaactaatgccactcttggtattcgatgtaaaaagaaaagtgggatccctgagatgagtgagatctcccatcttaaccatgtcctgagaagctggactttatttcttgtgctgctaaggatttgtagaattgtagggattccaggtacaaaagaggcatcttattggaatatgcatgtatataagtttgacatgggaatttcggatgactttgatagcttatgaagataattttattgtcattgtaagaaaatcgtggaatagcacaggagcataaggaagaagccaggagtaactgattgaacttatcaccttcccatatctataactattaataatgggaatcatccaatttggtgtacatatttcattggataattttatcattaaaccacttttt

SEQ ID NO: 28286 - DNA, 443 bp, Glycine max
  Clone ID: TF_uC-gmroLIB3258087c12a1
gttgacgcagaagaggctggtgaaattgctgcttcctcatgagcctatttctagccttctctgctgcatcatagggacttttggccttttccttgaaatgagtcctccaataaatcataatctcattgccagttctccctggcaagctccttgcaattgctgaccacctgaagtttatggtttaacaatcaaggccttggaatatgtatgctgccattatatggaaacatgcaggttcaagagaatgagaaaataaatcttacctgtttccccaccttgcatgcaactctagacctatgctctcttcttgaggtgttatgtgtcccctcttgaaatcaggcctcaaatgcttcacccatctcaatctgcagctcttcccatatatttcaatcctgttaatggacaacaacgtaatacatactaatcactttgatacgtaatcc

SEQ ID NO: 28287 - DNA, 1005 bp, Glycine max
  Clone ID: TF_GmC54235_1
acgcgcgcgcgaagaccgcagatcgggacgcggcacaaaacctagtcttgtccctggtgaggaaagagcggcatggaagtagcgaaagaccctaactcacaggcggattcagattcggaactggaactctacaccatcccaagctcttcaagatggttcgcgtgggaagaaattcacgaaacggagagagcagcattcaaggaatacttcgacggaagctcgatatcgcgaagcccgaagatatacaaagagtaccgagacttcatcatcaacaagtacagagaagagccctccagaaggctcacattcagcgaggttcgaaagtcgctcgtgggagacgtcacgttccttcacaaggtcttcctcttcttggagcattgggccttgatcaactacggcaccgcagaggatgtggaggaggaccattgcaaggttcgcttcgaagaaggcgcccccagtgggattcgagtcgccgccacgcccaattccttgaagcctatgctgctgcctcgcaatgggaagagtgccgccaatgccactggggcttctctcaaattgccgcctctggcctcttactctgatgtttatggtgatttgattaggcagaaagagggcaactgtgccctctgcgctcacaaatgtggttctggacattaccgatgtacacaggataatttcattatttgtactaattgtttcaaaagcgggaattacggggagaaaaggtccacggaggattttgtattgagtgagtcaagtgaaaatagtggtaagcatgacactgtctggactgaggcagaaactcttctccttctagaatctgttttgaagcatggcgatgattgggaacttgttgctcaaagtgttcaaaccaagaccaaacttgattgtatctcgaatctcattgagctgcccattggggagctcatgttgggccctgctcacagaaatgttaacattaacgatgctaatggcatcgtgaacaatgcaaaacaaagtcaatca

SEQ ID NO: 28288 - DNA, 1592 bp, Glycine max
  unsure (1)..(1592): unsure at all n locations
  Clone ID: TF_GmC794_2
tacggctgcgagaagacgacagaagggcaattatttaaggcctgatttaaaaagaggaacattctcacaagaagaagaaaaccttatcattgaacttcatgcagtattagggaacaggtaattgtaattgtaattttaattcagtctctctcatgattgaattaatgaattctctccctttttcttttctactgtggttaacatttatttttctttttcatttgcttgacatgcatattattatcctgtgctgtctcaggtggtctcaaattgcggcacagttgccggggagaacagacaatgaaataaagaatctgtggaactcttgcttgaagaagaaactgaggcaaaagggaatagaccctgtcacacataaaccactgtctgaggttgagaatggagagaaagcagcagaagtgtctaatgaactgaacctcctgaaatcagagagctccaagtctgattcagcatcctatgagcagagaacatcaatttctccaaaagcctatgcacctgagatggatggttcctgcagctccaagattgaaatcaattttgtaaccaacaacaactgttacaacaaagacttgttcctagacaggtttatgagtagtagccgccaagagagttacaccactagttgccagccctcagatttgatggggaattttccaattcagatgagttatgcaaccaatgatcagtgtctccctaatgattcaaactctagtcattggttcagccaaactggaaggtcttttgatatgaacactgagtttcctttcaatgccgctgtcacttctatcaatcctacacctacaaccaacttgtttcttcctaataattctttttgctacaagccttcacttgctgttccctctgacaatgtttccataccctatggatcccattactgggaagccagtgcctccaacaacagcaatagtagcacagaattgagaagtagcagccccttgaacatcttttcttcttggggattggcagattgtggcacctctactactaaagaggcacaaattcatatgatggagaatcataatacagaagaagctaagtgggatgagtaccttcataaccctatctcaatgctggcttcttctgtacaaaaccaagctcctgagtctctatgcaatgatataaaaacatccatgcatttggtacctgatactttaggggctatgttacctcataaccataccaagcagcaagaacagtctcaaacttctagtttcttttccaaggacatccagaagctcagggcagcctttggacacatgtaaaaggattttagaaagggttccaattcaagggattgctattcttagtacaggtgtgtgaaaccacagattttttgctcttgtatgtaggtctaatacaaaacatttatttacacctttttttttcttttcactttgtttaacatttgagagccaaaaaccatttgtcttttgctttcttcttctcgggtgtggggtagaattgaagaataagggttgctattctgtcttctttctactctttctttctttctttctttgctacacactgtaaccgcaatggntgcattttgc

SEQ ID NO: 28289 - DNA, 618 bp, Glycine max
  Clone ID: TF_GmC27273_1
aggaaaaaaaattgcgaagcctggaaacgaagcgtttagatttagaagaacagaagatgcagcttcgtcgatcttgcttcttctttcatcattttgcatcgcgttagggtttgcagattttcaatttcccttcttttcgctacctttctcgcatagaatctcgcaattcctccgttgttccgtttccgcaactcatcaattcgaaagttattgcttcacaaggaggtagagcatgtaataaaggaaaaaaatggaggtcgaggtgccaatctcgcttgatttgaataatcaacttcagccagagactgtagtttcagttcaaaatggggatcctggtgtttcctcttctgttgcaaatgctgttaacccgcagcagccagctacaaaaaaaccgaccaggcagtgggctgcatggactcgacaagaggaggaaagtttcttcaccgcgttacgacaagttgggaagaattttgagaaaatcacttcccgtgtacaaagtaaaaacaaggatcaggtcaggcattattactaccgacttgtgagacggatgaacaaacttcttggtccaggattatgtttggatgccaaaaactctaaagatactaatgctgcaatgct

SEQ ID NO: 28290 - DNA, 678 bp, Glycine max
  Clone ID: TF_GmC189152_1
ttacggctgcgagaagacgacagaaggggacacacctttcccttcaatttaagaaataaaacactccttgttcttttttccccttatcattaatctttctcttccttttctagttctagctagcaaagtgcaacattacaatccctcttaggctcttagttgagagaagagaagaacctaaattatcattttttatcaatcattcatggcctcaagctctctcagcaaacaaaaggcttctgactcctcttggacgccaaaacagaacaagctgtttgaaaaagcacttgcaaaatatgacaaggatacccctgagcgctggcagaatgtagccaaagcagtaggtggaaaatctgcagatgaagttaagagacactatgaaatcctcttggaggatctcagacacatagagtctggccgtgttcctcttcccaagtacaagtccacaggaagcagcaccaatgttgatgaagaagagaggcttctgaagtatcttaaactgaattgatggaagcaacgtttatgttatcctgagctattggcagcatttatgtggtgttccttgaatctgcagaaatatcctccccgctgtctctctctatcttgtgtgtctctgttctatttcctgccattgtaatttagattgtttcaaattttcaatgaattatcctattttag

SEQ ID NO: 28291 - DNA, 679 bp, Glycine max
  Clone ID: TF_LIB5118-031-A1-PF1-A7
cgggaaatacaaaaaaaagttttaagatactgattctcctatatctatgctcagcttcttggtcctgctctattctgtggttcctgaggagacaaatcattgaaattatgcttcattgtagcaatatttgcaagcctagccaacttgtacctttcacacacatgtacgcttcatacatgcttaagttcttataaaaggagcatgcattgtgcttcctctctgcccatatcatcaagagtactctttcttggactctagtagttctcttaatttccactacatttgaaaccttagaccatatactcttaatatcaatcgagtcaccttatataaccattagatatggcatcaagctcaatgtcagctactggatcatggagtgctaaggacaacaaggcctttgaaagggctttagctgtttatgacaaggacaccccggaccgttggaaagatgttgcccgtgctgttggcgggaaaactcctgatgaagtgaagagccactatgagctcctcctcagagacattagccaaattgaatcaggcaaagtgccatacccaaattacaagaaaagtgcagagcatgatgaagaggagaaaaggatgagaaacctgaagatccagtgaccggccaataggaatcaacaacaaatattaatttgtgattgtcaccatccaacaa

SEQ ID NO: 28292 - DNA, 336 bp, Glycine max
  Clone ID: TF_LIB3242-689-P1-J1-D10
ggatatccatgtctacttcaaagagcgtcagcgggtctagtgaagctgacaatcaactgggacgggggccttggactgtgggagacgatcacttgctataccaatatattgttaaggatgggggaggccgctcgattatgctctctaaacacacacgattgaagagaactgggacaagtagcaggtcatggcggctaaattttctaatgccagcaatgaaacggagcaatttgaccccacaggagcagcttataattcttgaactccactcaaagttgggaaacaggttcttatcttgggcattacattcttgagccacacaggctttatcgctat

SEQ ID NO: 28293 - DNA, 1204 bp, Glycine max
  Clone ID: TF_GmC2603_1
gcgggcttgagagaaaaaatattccatttccagaagtagtactgcactagtactctcttttgtttcgaaaaaaaaaaatggttcaacaggaagtgcgtaaaggtccttggacagaacaggaagacttcaaattggtgtcctttgttggattgtttggggaccgtaggatgggactttatagctaaggtatcagatttgaatagaacaggtaagagttgcagattaagggtgggttaattacctacatcctggcctcaaacgtggaaagatgaccccccaggaagaacgccttgtcttggaacttcactcaaaatggggaaataggtggtcaagaatgtgctcgcaagttaccagggcgcactgacaatgagatcaagaattactggaggactctgatgaggaaaaaggctcaggacaaaaagcgaggagaagctgcatcatcatcatcactcaggagttgattcctcaatatcctcaaacaaccatgcagtggatccacatgcttccaagaaagcaggagaagagagcttttatgacactggaggtcatggtgtgacagcctcaacccaagatcagggtcaaaaaggtgaacaagggttgttctctatggatgatatatggaaggatattgacaatatgtcagaagagaacaacactcttcagccagtttatgaagggaacagtgaagagggttgcaacttctcttgcccaccacaagtgccttctccatcatcatgggaatattcttctgaccctctatgggtgatggatgaggaaagtttgttttgccctttgagtgaaccatatttttcctgctatgcacagggcagcgtttttttaaccggctaatattattcttttttttccaatcaatattttgttcatagcatatcatgtgtgccaccttataattaaagtctaacctgtatagcattgcatccttaaagcttttggaagggttcaccctagctagtgtgacccagctgtaataatttcaggcataactgtagtctatgttccttgtttcagtagtgcttttactttcgaaaaacatccaataggatagcgagttggtatgttctgaatgtaaaatatcaagcactggtttgcatctaagagtttttaattttaattttaatcccatctacacttctaccccaaaaaaaaaaaaaaaaaaaaaaaaaaaaaaaaaaaaaaggacggc

SEQ ID NO: 28294 - DNA, 507 bp, Glycine max
  Clone ID: TF_GmC1001_1
ttaatttgtaacacttaattttcattgattgagtgtgtgttgctacaacaatggcctcaagccagggttggactccgaagcagaacaagagatttgagaatgcccttgccatcttcgacaaggacaccccagataggtggcacacggtggccagggccgtcggaggaaaaacggtggaggaagtgaaaaggcattatgagaagctcgtggaagatgtgaagaagatagaggaaggtcacgtgcccctccccaattaccgaagtgctgcaagaggctacggttacatggatgaagaaaccaggatgaaggctctgagtctgcagtgaagtgtgatttaccaataaataatatatgttggatgcttggcttcgtaccataagatattttattcacttttttgttttttctttccatataatatataggcaaagcatcgttgccttgtgtttctgtttctataaatgtaaagatgaaattgtcccaaagacgggcccactagttaatagt

SEQ ID NO: 28295 - DNA, 461 bp, Glycine max
  Clone ID: TF_LIB3242-279-Q1-J1-C3
ataaattatagggattaaaatatcactttcaaactataaaaattaaagagaattaaaatataaattattgaaactaaaaattttacttttaaactatagggactaaaaaatataaatcatgaaactatagaaaacaaatgagtaatttaacctttatttaattaatatttttctttttattatgaaattcccttttacgcacaaacacacacatataatttagttacacactctcactgtctccatttgctagttttcatcatgtcatcatgattattagaggttctacaattttaattaacttaattaatttcaggtggtccaaaattgcaaagcatcttccaggaagaactgacaatgagattaagaacttctggagaactaggatccagaagcacattaagcaagctgagacttcacaacaacatggtaaattcatcagagaatagtaataatgatca

SEQ ID NO: 28296 - DNA, 1177 bp, Glycine max
  Clone ID: TF_GmC95896_1
ataatagcatctcagttgccaggaaggactgacaatgatatcaagaactattggaacaccaagcttaagaaaaaaatgatgggagtgaaaatgaacccttcagcactgaagaaacctcaccaagttaacctttcatccatgcttcaaaactcaacaccatcatcacccttcacctcattatccttcaaaaacaaccacaacaactcttactactaccaaccccatttgccctttacaggctccgagtccatgacatattcaagtcttctcagtgacaattattccacttttgagagccttcagaattaccaagttagtagtgtctttatggaaacaagttgcagctcttcttcagatggaagctgcaacaacaatcagatcaatcatgtcaaggaagcagaacttggatatgttggtgatggaacttttggtgaccagataataggtcgtctaagttacctcaatagtggggtggaagatcaagataccctaaagttggtgccctccaatgctggtagggttagtggggtgacagatgaagaaactagattatggggagaaagtccattagagtatggtctagaagaaattaaacagctaataagcaatagtagttgcaacaactttatgcttgatgacagcaagactggggaaatggtcatgtactactgatgctgatgctgacttgttaaaatcaagaacatttgaagggcatgggttgaagttagaacagtttcagatttgatttggtggacttggagtgttgtggggggaaaggtagtgttttaattggtccacttactttttttacagtacatgttggaagtttcagttgtattgtatcatttacttggtgcaggtattattaaccccaccataataacataaccatggtggatgtgtccaaaaacaaatgaatcagaaaggaaatgaggaagccttgtaaagtagagcacctctgaatccttcttccaccaggtttagaaagaggattgcagcagcaatccactactattatttaaatactttattatgtaacagttttgcttccaatcatgcacctaaaagcacctttaattttgcttaacgattatggttttattattgtttccccaatgtagatcgtacacgtatctatttcctccatacaaattttatttcacttagttaatttgtc

SEQ ID NO: 28297 - DNA, 576 bp, Glycine max
  Clone ID: TF_LIB5118-020-A1-PF1-E1
atttcctatttgtgtcttggaagccctcactcttccctcttttctttctttcatccccaaatcaaaacctaaattcccaccttcaactttctcccccaaatcgaccaccaccactgtcaagcccattcatttatattttattcgtatatatacatacagagagtgagtgagagagagagagagaagaatggattcggatcaaggcaagcttttcatcggtgggatttcatgggatacgacagaggacaagctcaaggagcatttcggtaactacgacgacgttttgagcacttccgtcatgcgggagaagaacactgggaagccaaggggcttcggtttcgtcgtttttgcggatcctaacattctagatagggttatggaagacaaacatgtcatagatggcagaacgcaagtggtatggggaggcaaccttgctgtgacaaacctgggatgaagaaaggtcaatggacagctggggaagacaaaaaactcataaacttcattctcaccaatggcaagtgctgttggcgtgctttttccatagcttgttgggcttcggcgttgtggcaagagttg

SEQ ID NO: 28298 - DNA, 127 bp, Glycine max
  Clone ID: TF_5263160
atcaattatctaaggcctgatgtgaagagaggcaattttacaccagaggaagaggaaaccataataaggctacacaaggccttaggaaacaagtggtcaaagattgcatcaggtttgcctggtagga

SEQ ID NO: 28299 - DNA, 615 bp, Glycine max
  Clone ID: TF_GmC1227_3
aacactttcgggcgagtgtgtgtgtagcagtttctggttcggtttttggtttcgtttcagcaaaacctctcttcttcttctgattgattccacctcgcgatttttcgattttcgtttgttttcttctttttcggtttctgatctgaactcgattcgattcgctattgccggaaaatgagtcctccggcaagtgtccggtgatgatcgctccctcgagaggttgttgaggttatcgttgttgttcttcgaagtcatggtttcgatctgaggttttggcgctctcgagttcgttttgtagcatcatcatcatcaccataccttgttcagattctgctcactttcaccacaacggctttactatttaccgcgtttcgttttcgtgtcaccgcaaataatgaaaggaggtgttccctgtatccactcctcgtcagggaagatctgaagcagtgctagctgctcacgtcctgtaatggacgcatactcctccggcgaagaagtggttgttaagactagaaaaccatatacaatcactaagcaaagggaacgatggacagaggaggagcataataggtttctagaagctttgaaactacacgggcgagcatggcagcgcat

SEQ ID NO: 28300 - DNA, 666 bp, Glycine max
  Clone ID: TF_GmC40008_1
tgtgcggcgctcgaggcggccgtccgggagtatcaactcttgaacaattccttttgagttattagaccattctctatatagtgatcctcaaacttaaaagtttttttgttgatcattttgtcttgaagaaatggcatctagctcaatgtcatccactggctcatggagtgccaaggacaacaaagcctttgaaagggctctagctgtgtatgacaaggacacgccggaccgttggtacaatgttgctaaggctgttggtggtgggaagactcctgaggaagtcaagaggcactatgaactcctccttagggatgttaggcacattgaatcagggcaagtgccattcccatacaagcaaaatggagggtctcaagaggagaaaaggctgagaaacatgaagctccagtaaccaattggcatcaggaacaaagaattttctgattttcaccatctagcaatttttctataatcccagtgctacgtaataagtagtgctagtgacgtagtaggattagaatatatattattcataagaatcgtatccgatgattccatgttgtattgtcgttgaagcaaccttaaagaatcaacgactctgtctaagttccaatcatattaataaagtttcaattttatgcgtttattttaataaaaaaaaaaggcccc

SEQ ID NO: 28301 - DNA, 436 bp, Glycine max
  Clone ID: TF_GmC119893_2
gaagctctcgagttccacattaccgagaaaagggctaaagttcatctggaattgggtgcagcattttacgactggaattttgatcaggtaggtgaagacgttaagctattgtggacagaagaagaagagaaaaaattcgaggatgcgatacgatcaaaccctccatcacctgagacatatttctgggaccatatctttagggcatttcctacaaagagcagggcagatttagttagttactacttcaatgtctttattttggagcgcagaggataccaaaataggcatactcccgatgacattaacagtgatgacgatgacgatgaagctggaccactgaggaatgttttcggacatcagacaccaaattctggatatcaggcaccgaatccgcgcggttccatcttattaacccccaaaaagtcacaaacaaaaa

SEQ ID NO: 28302 - DNA, 1533 bp, Glycine max
  Clone ID: TF_GmC1476_1
ggctcgagctcgtttcatatgtctcattcttctctggttttgttttttggcaaaatcattcggattaattcaatttctctgtgtaaatactttaacgtttccaattctcaccttcgcccagtgatttgtagtcagcttttttcttgttcaaagatgcactagtagaagagggaattaccaagtttccaagctttcctttagagtagaagcaaagaggtaaagtgtcataaaaagctgtaggcttccttcaatgggtgctcctaagcagaaatggactgcggaagaagaagcggcactgaaagctggtgtactcaagcatggggcaggaaaatggcgcaccatacttacagatcctgagttcagtgccattttgcatatgcgttcgaatgtagatcttaaggataaatggaggaatataaacgtgacagcgatatggggatcccggcagaaggcaaagcttgctcttaaaaggaacctgccagcccccaaaattgacaataaccatatggccttgagtacctagttcgacatgatgagttcttgatactaaacccatagcagtttctggtggaccattgcaatcccccaatttgaaagaacaaatatcaaggttggtggataatcatatattagaggccattgtcaatatgaaggagcagaagggttctgacaaggttgccattgcttctttcatagagcttctttcatagaggaaaaatatcggtttccaccaaatctcagtaaactactgccagccaaactgaagcatatggtggcaagtggcaaaataatcaaggaaaagcataagtacaggattgcgccaagttcaacagtgattgacatcagaagtacttcttcaagagaagcccaaagagacagcagaagtacataagaatgatgatgtcagcatgattttaaaatcccaattttatgcagagatttcgaaagtgaagggcttgacagctcaagaggcagctgctgcagctgcaaaagcagttgcagaggcagaggctgcaattgcacaggctgaggcagcagctagggaggctgaggctgcagaagctgaggctgaggctgctcaagtgtttgcaaaagcagcaatgaaggcgctaaaatgcaaaatgcttcatatttgatggtgtggacttactcatgttcatcatcagcagagttggcttgagatgatagttctgctgctgtgcttcctgccagtttttttcgtaactgtacataattttcggcttgtaaatctggaatatgcaggatgattcatgaaatattctgtcaggaatcaataacagcttttttttttttcaattcatttttattttaaccttttcttataaaggaagacaatgaggggaaagctacaaagcagtaacggaagagtggaaatagcgatgtttttttgtaatggaatgattgacatccgcgtagagtaaatgaaggaaacaatttttagtggtgttcaaatagcaatatggattgtcattgacatgcagatcatatattcaaggatgcttgttctaagac

SEQ ID NO: 28303 - DNA, 376 bp, Glycine max
  Clone ID: TF_LIB3242-435-P1-K1-C6
cgaaaacactcgcttattatatatatcatccccacctaggttcttccgtttttgaagctggggtttataccctttgaggtttgaaaggaaatccaagcaaaggtagaaagaatgaggaagcctagttgtgatatcaaaaaattgaacaaaggagcttggtccaaacaagaagaccagaaactcgtcgattatatcaagaaacatggggaagtttgttggcgtacactcccccaggctgtaagaatatatgaatttttttttatcaataaatattaatttgttaggttttgctaagaatatcaattaaaatatttgaatctttgacatttgaaatctccttttatttttttctaaatattatataaagcttatatct

SEQ ID NO: 28304 - DNA, 355 bp, Glycine max
  Clone ID: TF_jC-gmro02910037f03a1
ggctcgagggatgagtgaggtgaatgaatgagaacaaaagcgtcctcatcgatatcgtgaataactaaagactctggcgctctgaaggttcgctacgtgaccgtatatgggacattattgctcacgtattacgtttgaaggtggcggaagaaagtaagctgggcatttgaaagaaagaagtaatgaaactaatgcttattcgtgcatcaggctacaaaaaatagattgatggaagaagcagctagcctctaaccacctccttttgtggtacgtccgaatagaacaggtgagagttgcagattacggtgggtgaattacctacatcctggcctcaaacgtggaaagatgacccccc

SEQ ID NO: 28305 - DNA, 453 bp, Glycine max
  Clone ID: TF_jC-gmXLIB3563P034be05a2
ggagtgtggactttatatgggtactctatcagtttgttgcttgtgctatttgtactttgttcatgtgctgtgcgtctgctgttgttcgactgagcagagctttgcctatagattaatgggactatcaccttgttgtgacctgattggtctgatgatcggaccttggacagctgccgaggatgaaattctttctacttatctcatgaacaatggcggtcatggtagctggcgtcctcttccaaggatggccggtcttgttcgttccggctcgagtcgcaggcttaggtggtcgactatctgacaccagctttaaccgtagtccctttactcttgcaggaatgatatactatgcatacagctccatggtctcctaggtaatgcgtgggctgcagtcgcctctcacttaccagggagatcagacggtgagatctagacctctggaacatcctcttg

SEQ ID NO: 28306 - DNA, 932 bp, Glycine max
  Clone ID: TF_GmC739326_1
tcttggcacatatagaaagatcacagcccagccacaaggcacagacactagactgagagatcagacaacaataaaacccaactgactctgtcatccgttaatgttaaaccccacctagctgcatcgtgtccccatggcatgccttgcatgcctcgcttggctcgctcggcggggacttagatccttcttccttctccctcaccgacacctcagagcaggcttacgcccttcttcctccatgaagatcaattacctaggtcaaattcgtccatgtatatctagccccttatgaggtgtgaaacatatttcttctcttacctttatttgtttgatgtgagattttgtcattctccgagactgctcaagcaatacatacgccagcaagagggccaataaggatttgatctcaacctttgttcttcctccatgttactgtagcctctcatgctgcttcctcctgttgcagctacatttctacaattagctataggcacgtgaccgacttcacactgaagcaagtaatcaaccaccatcgcactgggacacttatcttcctcttccgtcttcccgcccgcggcccggccctagttctccctcacaccgggggtgcccctgtcgtgcatggccttcgctttctctttcttttcgacctgctttcttctcccagctgaccttgacctctgtggctccctcctccggttgctaatccgttgccgataatggtaatgagcacccaatgttatctcgtccgcttcaaatcatcaacgagcatctcatagtgccttttcacttcctccacagtcttacctcccaccgccctggccaagttctgccaccgatcgggggtatccctgtcgtagatggccaaagcattctcaaactttttgttctgctttgttgtccaagctgagcttgaggccattgagacaacc

SEQ ID NO: 28307 - DNA, 466 bp, Glycine max
  Clone ID: TF_LIB3242-144-Q1-J1-B10
cacctcctttccctctacaaataatgttgatgaggagtaacaggtgtcctttcagtttgaacagctgtggattctcaaacaattaaggagatcagggatggctccttctaggaaatctagaagtgtaaataagaggttttctactgttcgtgaggctgcatctagtaaagacaaaattacagagaatgctagcaaaaataggctgaagaagagaaaattggctgacatgttagggccacaatggaataaggaggagcttgagcatttctatgaagcttaccgtaaatatgggaaagattggaagaaggttgctcttgcagtgcataatagatctgtggaaatggtagaggccctgtacactatgaatagggcatatttatctcttccagagggtactgcttctgttgttggactgatagcaatgatgacagatcattatagtgttctgggaggaagtgacagtggt

SEQ ID NO: 28308 - DNA, 496 bp, Glycine max
  Clone ID: TF_LIB3242-142-Q1-J1-C2
acatttggccagataaataacatcaaatagtggtttctgggctatctggagttgttttctttggaaatgttggatgtctaagagatgattgaagttaattgggaattgagataagtaaagtcagatttttcttggtgaacggacatgcagaagtagtctgcactcaacttccaagctctccactagaacaaaagcaaagattatactgtcataaaacgtttgcagacttattttgatgggtgctcctaagcagaaatggactgcagaggaagaagcagcgttgaaagctggagtagtcaaacatggggctggaaaatggcgcaccatacttacagacccagagttcagttctattttgcgcatgcggtcaaatgtagatctcaaggacaaatggaggaacataaatgtgacagcaatatggggatctaggcagaaggcaaagcttgctcttaaaaaaaacctactaccatcccccaaaattgaccataaccacatg

SEQ ID NO: 28309 - DNA, 378 bp, Glycine max
  Clone ID: TF_LIB3242-179-Q1-J1-B9
aattcggctcgagacggctgcgagaagacgacagaagggatatgagagaacttttacaaaattagtttatgtctaaattaatggtagcttatgaagaagtttatgggatgtttcgtgcttattttcttctccaattagtgttaagttcttactagatgaaaatggtggacaaatttttaatacattgaattgctttcttattcttttcctgctaggtggtcaagtattgcaaagcacttaccaaagcgaactgataacgaaatcaagaactattggaactcatatctgagaaagcagtttgaaaagaatgccggggattcctcaagtccaaaaccaattatttctgacagtttcccatgatcaaaattccatgacatg

SEQ ID NO: 28310 - DNA, 278 bp, Glycine max
  Clone ID: TF_LIB3028-053-Q1-B1-G10
gggttcacgaatggaagcggatccacgaggaagagagtttacagaggtggaccctctcggatggacatgctacccataagaaggagaagctctacgtatacgagatcgagagtcgtggacctcgtaactggtccctcatcatcaggtccatcccgggccgctctggcaactcctgtaggctttactggtgcacgcagctgtccccttcaggctcgcgcactcggccttcaaccactaatccgacgacaccactatcccggccccatgcccccttcggc

SEQ ID NO: 28311 - DNA, 406 bp, Glycine max
  Clone ID: TF_GmC126456_1
tacggctgcgaagacgacagaagggacaagtcaatttctaatataatgtagaagcttcattgttgagttttgagtcattaaatttacaaataaatgaattgtgtgtataaaatggaaaaaaaataatcattaaggatctgtttgtttgctttaatttgataacattagatgtttttgatgaagtttgtgaagtgtgtaaatgggtgcagatgggctgctatagcttcctaccttccacaaaggacagacaatgacataaagaactattggaatacccatttgaagaagaagctgaagaagatgcaaagtgggggtgatgatgatgataataatggtgacaaattaaactcttgttattcacaaaataagggtcaatgggaaagaagactttaaacagattttcaca

SEQ ID NO: 28312 - DNA, 476 bp, Glycine max
  Clone ID: TF_LIB3242-051-Q1-J1-E9
cggctcgagccttgagtctgatcactacacactactcttcagccttttcatatcaccctttgctaccaaaccaattcagtctctttgcttgttctacctgagtttgaaacgtaaccttagaaccatttcacacaacactttctgttccttaattcctgaaagaaaatggcatcttgttcaatctcagcctcaggctcatggagtgttaaggacaacaaggcctttgaaaaggctctagctgtttatgacaaggacacccctgaccgttggtacaatgttgctcatgctgttggcggcaaaactccagaggaagtgaagaagcactacgaactccttgttcaggatgttaagcatattgagtcaggacgtgttccattcccaaattacaagataactacttcagagtcaactgatcaggaggaaaaaaggctgaggaattggaattggaacctccatgaccccccaacccccatccc

SEQ ID NO: 28313 - DNA, 733 bp, Glycine max
  Clone ID: TF_GmC4605_1
tgatcactatatacacactactcttcagccttttcatatttcataacacccctttgctaccaaaccaattcagtgatctttttgctttgctctttcctgagtttgaaaaccttagaaccatttcagtacacaacactttctgttccttaatggcatccagttcaatctcagcctctggctcatggagtgttaaggacaacaaggcctttgaaaaggctttagctgtttatgacaaggacactcctgaccgttggtacaatgttgctcatgctgttggtggcaaaactccagaggaagtgaaaaggcactacgaactccttgttcaggatgttaagcatattgagtctggacgtgtgccattcccaaattacaagaaaactacttcagggtcaactgatcaggaggaaaaaaggctgaggaatttgaatttgaacctccagtgacccccctcaagaacaacaaattgattttctaattttcatatcaaccaacatcattaatttccagcatccctggtagtactacgtggtgttatgtcacacataattgctagtgcaatagcatcttaggctatattagtcatcataagaatcatatgtcccgtgattccatctggtactttcttgtcgttgaagcttcctcttgaaagggtcaacgaccgtttcagttcctcatcgtcctaaataaatttataattttataataaaaataattaataaaaaaaagaatatag

SEQ ID NO: 28314 - DNA, 2336 bp, Glycine max
  unsure (1)..(2336): unsure at all n locations
  Clone ID: TF_GmC21781_1
ggttatatttgtgtactgctagagatttgaataatctgagatgtggaagttggaatcaagtcaagagggcttttggagaattattatagatgaaaaatggatgaattttgattttggtcgctttgattggagaacaatactaaaagcacctacggtactgtaccttaattttttctttccaatatatgtatatgtattttacaagtgaaaatcacatgtctatatatgtggatataaatgagaacaaaatgattaagctgatgcacattgaaattgttttacttggtcccttctggaacaatccatctcccgcattattcgtaaattctagaaaaaacaacacttttaatatattacatctgcatgaattagaaaacaactgtcatttcgctcctgcgtttcgtaacgcttttttggcggttttggcctttttcggtttcgaacattcggacgaatttctctctctctctcttcaattcaacacttggaggacatgagatggatcgggaagaatatttggggaagtgttccaatatgaaatgccaaagagttcaggtggatgaatcatatgtacatgctcttcaagatgaagtaatggaagttgagcatttgcttgcagaacctagaaatgatcatgcttccctggatggtagtttggattctcatacaactttgaatgacaaggatgatttggaactggaggtccttgatggattgctggatgatgttgaaatcgatgatcttgaaggaactggtggttttgctggtgcatgtgaagaatattttttggattttggatttgccgacaaatttgaggaggtactaggctcaggtccttttgaaggttcactcttgcaaatttcaagttctgaaagtcattcttccggattaagcggaagtagcattgttggtggggttttagaatcaaccaaagtacctattgcaaaatctgaatgcaaaaatgattctctagatgagacaataacctatgaagcacatggtgccttcaggaacaatccaagtcaaccatcaaaagtaaattgcagatacaacatttcacttgatatacaacatctgcaagagttggaaaacaatcgtcatttagctgctggtatattgacttgtaagaaggaaaagggtcctgttgaaaaaggccaacctgctgtacctagagagaagagattccgaaagcctactcagaggtacattgaagaattttcaaattcaaggtcaaaggaaaaggcaccaactgctgttacaaaaactgaatatttaagtgactcatcatgtgatgtacttcatataagaattaaagcattgaaaaagagtccaagtgaaaagtctagtaatgaaaatagagatgtgatgcttcctgagttgcaagttcacaaagggcgtccgaagaaagagaaacttgagtatgacatcgagtcatttcccttggaatctgaggatgaatggttgacatcaaaaagatctagaaggaaagatcgaagaaagcatcagaagatgtggactctccctgaagtgttgaagttggttgaaggcatatctgaatatggagttggtcgatggactgacataaagaggtttctgttttcttctacaagctaccgaactcccatagatctcagggacaagtggcgaaaccttttgagagccagttctgcacagaaaagcacgagagaggctgaacaaaatgacgagcttgccctgcgtcccttgccatttaatgtggtacatcgtgtgcaagaattggctaaaattcacccatacccaagggaacgtggatcaaagaggttgcgtgttagccaagctggctcttctgtcattgctaaagattctcctccccttagtcttagcaaaagaaatgtacgtaggaagtttacttagaagtccatatgtaaaacaatccatggaaatctatagtcaaaagaatcttgttgaaatttaggtaatcacatttgcacaattttatactgtgaattaattttatgtttacaaaggcacagaaattttgaattgtaattatgaggaatcattagttgtcctacaatagtttgcgatgcttaatacctgacacccttatggaattaatggtggcatggctttgagggatggaactgatgcatctggcaggaaaggaaagggaaagggtgtttaccagtttgtagacaaatacggtgctaatgtcgatggttacagttctatctacgacaccaaggactggtctccaaccggtgatgtctacgctggcggtacgactggcttggcttattccttaagggcggggtggaactgtgactctactnggctttagctggtggtgcactttt

SEQ ID NO: 28315 - DNA, 1267 bp, Glycine max
  Clone ID: TF_GmC341_1
cccacgcgtccgtacggctgcgagaagacgacagaaggggaagtgaaaccatcaatcccctgtatatataaccactcttcctctcctccaaattaaaacacttatcatggatgttaagaaaggtgggtctgtagtacaagcacaagtgaagttgcagaagcataacgaaaaggagatgggcatgagaaaaggtccatgggcggttgaggaggacaccattctggtcaattacatcgccacacacggtgaaggccactggaattccgtggcacgatgtgcaggcatgcatgcatcttaattataatttaatttctgcatgtgccaagtaataatggtatatatgttaattatgagatttatcaattacaggtctaaggaggagtgggaagagttgcagattaaggtggctaaactacttgcgcccagacgtgcggcgtggaaatatcacactccaagaacaaatattaattctcgaccttcactctcgctggggcaacaggtatggtataaaaatattccactctctctctctctctatatatatatattaatttgttttataaggttggatgtacacatatataacatagtatgaatgaatgaatgttttttgataggtggtcaaagattgctcaacagctgccaggaagaacagacaacgaaataaagaactattggaggaccagagtgataaaacaagcgaagcagctaaagtgcgatgtgaatagcaaacagttcagagacacgttgcgttacgtttggatgccgcgcttgctggagcggcttcagcccacatcacaagcactggagccaaaccaaagtggacttgtgttacacgcttcatcatcactgcttccttcgaattccgaccatagtattgaaagggggtcggatctgtggccaggtttcaataaccaaatgttgttggaacaggggagtggcggtgacttgttggaaagtttgtgggatgacgacaatatgtgctttttgcaacagctttcttatgacctccaaatgaaataaaatacaattcccttccgtcacgcattctgcaatgcacagtgctgaaagttgagcatgcgttcaatgaatattgttttcctcactttcatgtacatattaaatcttagagactaaactagtcacgtgcctaaaagttgataccagttgaaataatatggtttattaatccttaattgaaaaaaatagtctatgcctttgtttatgtagttatcataagaattactccctccactacatattgatt

SEQ ID NO: 28316 - DNA, 394 bp, Glycine max
  Clone ID: TF_LIB3242-739-P1-K1-D2
tacggctgcgagaagacgacagaaggggcagcaagcggagatctgatggcactagagtggggtgtgtataagcactcttcctgtcctacaaattaaaacacttatcatggatgataagaaaggtgggtgtgcagtacaagcacaagtgaagttgcagaaccataacgaaaaggagatgggcatgagaaaaggtccatgggcggttgaggaggacaccattctggtcaattacatcgccacacacggtgaaggccactggaatttcgtggcacgatgtgcaggcatgcatgcatcttaattataatttaatttctgcatgtgccaagtaataatggtatatatgttaattatgagatttattcaattactaggttctaaggaggagtgggaagag

SEQ ID NO: 28317 - DNA, 821 bp, Glycine max
  unsure (1)..(821): unsure at all n locations
  Clone ID: TF_GmC1498_1
gaagctcggaatcgggcgaggcagtctctgcacccctccctccttgtttgtatcatatcaggcagctcagaaggcaaagatagatccatgtccaccaccgcaactacaacctctgaagaagttagcagcaatgagtggaaagtcatacacatgagcgagcaagaggaggatctcattcgcaggatgtacaagctagtcggggacaagtggaatttgatagctggtcgcattcccggtcgtaaagcagaagaaatagagagattctggattatgagacacggcgatgctttttctgttaaaagaaacggaagtaaaacccaagactcgtgattttctctggtcatgtatcttttctgggcataattctgctaaatatataaaattgggttaaatatatttttggtgtctataaaatttcttttttttttttggtctctgtgaattattttgtatatttttagtctcttgtttatttttttgttatcaatatcagtttcttaaattttttatacttttttctgccatttttaatctctttgatagactgatatttatgacgaaaaaattaataaatgatttgaaatagtaaaaaaatgaaatttcattagagttaaaaatatatttaaccctataaattctgttctaaatcttacagaattatcgtcaattgtatttcttgtcgttgagatgagaattaatgtacactttcgttaatcggtcatgagtatctcatatagaagctatggaaaagtttgcatgttggtttgtaaaaaagaaaaaggtgtgactagtcggtcaattgangnnnnnnnagnnnnata

SEQ ID NO: 28318 - DNA, 382 bp, Glycine max
  Clone ID: TF_uC-gmflLIB3275P088h01b1
tagaggaaatagtattttgcgaactgagacgagatgggtggagtggcatggacagaagaagaagatcacttgctcaagaaatgcatacaacaatatggagaaggaaagtggcatcgtgttcctatactggctggtacaactgaattcaattaacctctctctccttttatcattcttgagttttcaagatatattctgcaaaggagtgctctataagttaaaaggggatcatttattaatggtgcaatggcttgtttaagattagcaattggttatgactcatagatttatgtatcaaacgggagtaacacgctgttttggtaaaaagaagacagaactgattaaccagatggatggcgtagggacttttaaacaacacatt

SEQ ID NO: 28319 - DNA, 729 bp, Glycine max
  Clone ID: TF_GmC600_5
gaatatttggacatgctaagttatactatgaagcaccctttaaccacctcactttgttgtaggtttgaatagaacaggtaagagttgcagattacggtgggttaattacctccaccccgatctcaaacgagggaagctcacaccccaagaacaacacctcgtcatggaccttcattccaaatggggaaataggtttgagaaccatgcagaaattaaactataagctagctacctgctgatcatcactcatatttttaattactcttttcctaccctatatatagtactattaattagttcttcgtcttatttaattttttattatttgtgaaaatctaatacagcgctcaatcaatcaagttagactctgtagacaccttattttgttaattagttacttcgaattttgttgcttaattactttgatgatcccttgcagatggtcaagaattgctcgcaagctaccagggcgcactgacaatgagattaagaattattggaggactcacatgagaaagaaaaaggctctggagaaaaagcatgcatcagcatcagcatcatcacctgtttgttctagttgggaatcttcactacttgcaaacaaccatgttgtggattcacatgcttccaaagagagcttttatgacacaggtggatatgatgacatgatgatggggttaattgggggtgaaaaggggtactctatggatgatatatggaaagatattg

SEQ ID NO: 28320 - DNA, 410 bp, Glycine max
  Clone ID: TF_LIB5068-029-A1-XP1-E3
gccggccgggccgggattggttattgtactagcagtgctcgacccatcaacttgctcctccattaatattatattggtggacaaatatttctcggtctcaagtgggggttttggagggagaggaactgctacttcattattgagatgatgatgaatttgttgttgttgttgttgtgtactactactacccttttggtttttgttcttcatggcccagcggctggttctaccacgtttgcgccgaggaggtagggtgatgatgcctttagaagttgttttcccatggaaagtgtaaatttttctgctcaaatgagagttccagtagttttttatctcgttgtctgttcttccaggtaaatgacttgctatcaacgaccagctgaacaagttaccaaactcgtcaactatac

SEQ ID NO: 28321 - DNA, 500 bp, Glycine max
  Clone ID: TF_15663951
gttagtaagtagtttatgcgaggcatattcttaatttgtctcgttgagaatatgggaatagcaaggaaatgttcatattgtggtaacttaggtcacaatgcaaggacttgtaaaagtactcccggtcaaggacaactaaagctcttcggagtgcaactagatgtttcttcttctccatcatcctcgaattctttttcatcatcatcaccttcatattctggcatgaaaagaagttttagcacgaattacttgttgtcttcatgggcatcttcatctgtaccctcctccttttcctcgccttccctgcttggtgcaaatgaaaattcagatagttacttactcaatgccaatagcctcatatcaacaattcaagacacaaaaaaaggtgtcccgtggacagaggaggagcatcggatatttcttatagggcttgagaagctggggaagggaaactggagaggcatatctaaaagttttgtgacaacaagaacacctaccca

SEQ ID NO: 28322 - DNA, 503 bp, Glycine max
  Clone ID: TF_GmC134810_1
gaaaaggtttacaccagaggaagatgagaaaattaagttggctgtttttgattatatagagtctcatggtttgggagatgaaggtctagatatggttctccattgcaaatctcatcctgaaattagagattgttggaaggaaattggagcagccttacctcagaggccttatgttagtgtgtatactcgtgctcatattttgtttgaaaggggtgaggatcgtaagtggacacctgaagagtatgaatttttacggaaggtcaaggagcaacatggatctgattggaaatcagtagctgaagcattgggcaaacatcgatttcatgtaaaggatgcatggcgtagaataaaattaaccaacacaaaccaaggacgatggacccaagaggagtatcaaaatttatttgatttagtaaacctggatctacgtgtgagagcttcacaggattatagaaaatcaaaacatggtatgctgcgagataatattggttgggaggcaattg

SEQ ID NO: 28323 - DNA, 965 bp, Glycine max
  Clone ID: TF_GmC100_3
aattcggctcgaggaaacacgtagacatcagtttcaagttagtttgtgcaatatttattcattgacctgatatttttctatgtatgtttcacttttgaagatggtctcaaatagcggcgcgtttgcctgggcgaaccgacaatgaaataaaaaacttttggaattcaacgataaagaaaagactcaagaacatgtcgtccacgacgaccacaacctcaacctcaccaaatgcaagcgagacctcaatatccgagcctagtaataaggacctcaacaacatgggagggtttatttccacactacataataaacatgcaggttttgttcctatgttcggttcatctccatcaccatcaatgatgcaaaccagtacagttttcaataacatgattgaaaggtttcctatgctggagcaaggactgattaacatgccagcttctggagggtacttcgaaggcacaggtagtactccttgcttttcgcaatgtgaagttcacaacaataaaggttcttgttatttagaaaacgaagtgtttgagagtgtaaatatcggggtagaaggggatatgtttgttcctccccttgagaatgttacatgcaagagagaagaaacaactaacagcagttactttgacgatgacataaatagtatccttaataactgcaacaatattggcatagctgaaaataaggctcatcatggggtggagaatttgtttcagcaagagttagccactgccacaggagaatgggactttgaagagttgatgaaagatgtttcctcctttccatttcttgatttttcatactgatcaatgaaccttatttggcacactgcagggtgatatattcttcacatagagccttgtataatagtatactggtattttttacccttataccgaattcacaagttaacaatcaggtataggcctcaaataaaagtccaatatatatatatatac

SEQ ID NO: 28324 - DNA, 270 bp, Glycine max
  Clone ID: TF_LIB3030-010-Q1-B1-A6
gggaagaaagtttaagccttagctagaaaaaggagagtgagtagtgagttttttgagaagcagaagaaaggaagaaaggtggagtgagtgaattcaaaaagatcacccaccatggggaggcctccttgctgtgacaaagttggcatcaagaaaggtccatggacacctgaggaggatatcatccttgtctcttacatccaagaacatggtccaggaaattggagatcagtgcctactaatactgggttatcaaggtgcagcaaaagttgc

SEQ ID NO: 28325 - DNA, 1543 bp, Glycine max
  Clone ID: TF_GmC144_1
ccacgcgtccgggcaacgaaagaagcgatagaacgcgttccgctaagcattaaataaaagccgttaaattagaatcggagatttaagctggaggaggatattctgaaatcccatccaatcgaaggctgtgaagtgtgtgatgcactctatccttctttctcttgaacccataattccatgactcggcgttgctcccactgcagcaacaacggccacaattcccggacatgcccttcgcgtgggggcggaggtgtgaagcttttcggggtcaggctgacggatggatcaatcattaagaagagcgccagcatgggcaacctaaacctctcctccgccgccgcacatcaccaattccattcatctccttcttcttccaacctcgccgccgccccctcatcccccaatccaagctccccatgctccgaccctccccaaggttacttgtccgatgaccccgcccatgtctccaccttcgctaaccgccgcggtgatagaaaaaaaggtgttccatggactgaagaagaacatcggctgttcttaattggtctccagaagctaggcaaaggagactggcgtgggatagcacgcaattttgttgtatcaaggacccctactcaagtagcaagtcatgcccagaagtattttatccggcagagtcatgctaccaggagaaagagacgttccagtctttttgacatggttccagatatgtcttcagatcaaccttctgtgccagaagaacaagtgttgcttccaccttcccagaactcacaaccttgcaatggaaaatcacagccttcattaaatctctccctcaaatcagaatttgaacccatggagactacttctcaagaaaatgcgcaacagaccaatgaaactatgatgggatcaatcggactgacaccaatggctcctcatggattctttcctgcatatttacctgttccatttcccatgtggccatcaactgtggctcccccgtttgaagaagttaagggaggagagacatcccaccatcagatccacaagccaatcccagtcattcccaaggaacctgttaatgttgacgaacttgtgggaatgtctcatctaagcattggggaagcaaaggtacgtgatagagagccttcccctctttccttaaagttgttaggagagccctcaaggcagtcagcattccatgcaaatgctccagttggtacttcggatttaaacaatggcaaggacaacgcaattcaagctgtctgagcttgtaaggtccggtgaagacagcagcagaattaagccttcttttggtcatttttcatttgtactatcatatataattttgttttcctgatccctagcattttaatcttccaattagtagcaagttatatggtggtacgtagatcaggttagatcaattcttggaaaatacttattctaactgtaaacaaatgaagcttaaataaagaggttctgttcctctaggtttggttaattttagaatagcaccaagaggttctgttctgttcctcttggtttggctatttttagagtc

SEQ ID NO: 28326 - DNA, 1572 bp, Glycine max
  Clone ID: TF_GmC144_2
gatagaaaggaaaggagcgatagagcgcgttccgctaagcattaaattagaattccagatttaacctcgaagaggcagcagcaccctgtgttgtattacaaacacatactacatgcacttttctttcttttctcttcttcttctatccataatttcaattccatttgctctctggaccgagtcaggcggcggcgaatcggcatgactcggcgctgctcccactgcaccaacaacggccacaactcccggacatgcccgtcgcggggagggggcggcgtcaagctgttcggggtgaggctgacggatggatcaatcataaagaagagcgctagcatggggaaccttaacctctcctcctcctcctcctccgccgccgccgcacatctgcaattccgttcatctccttcttcttccaacctccccgcggcctcatcgcccaatccaagctccccgtgctccgacccgccccaaggctacttgtccgatgaccccgcccacgtctccaccttcgctaaccgccgcggtgatagaaaaaaaggtgtgccatggactgaagaagaacatcggctgttcttaattggtctccagaagctgggcaaaggagactggcgtgggatagcacgtaattttgttgtatcaagaacccctactcaagtagcaagtcatgcccaaaagtattttatccggcagagtcatgctaccaggagaaagagacgttccagcctttttgacatggttccagatatgtcttcagatcaaccttctgtgccagaagaacaagtgctgcttccacctcccgagaactcacaaccttgcaatggaaaatcacagccttcattaaatctctccctcaaatcagaatttgaacctatggagactacttctcaagaaaatgtgcaacagaccaatgaacctatgatgggatcaaacagattgacaccaatggctcctcatggatgctttcccgcatatttacctgttccttttcccgtgtggccatcaacttgggttcacccctttgaagaagttaagggaggagagacatgccaccatcagatccacaagccaatcccagtcattccaaaggaacctgttaatgttgacgaacttgtgggaatgtctcatctaagcattggggaagcacaggtacgtgatagagagccttcccctctttccataaagttgttaggagagccctcaaggcagtcagcattccatgcaaatgtcccggttggtagttcggatttaaacaatggcaaggacaacgcaattcaagctgtctgagcttgtaaggtctggtgaagacagcagcagtaattaagccttcttttgctcatcttttcatttgtaccattatatatcattttttttattcctgatccctagcatttaatcttccaattagtagcaagttatatggtggtatgtagatcaggttagatcaattcttggaaaatatttattctttctaactgtaaacaaatgaagcttaaataatcaaatagcaccaagaggttctgttctgttcctcttggtttggctatttttagagtcaaaaaaaaaaggacgaag

SEQ ID NO: 28327 - DNA, 904 bp, Glycine max
  unsure (1)..(904): unsure at all n locations
  Clone ID: TF_GmC84_5
accttcttccgttgttctcttccaattgccttgattttctcggaaaattcttattttccgagaaagttcgtgtttttactgttgaatcgagaattcccaaatcggggtgtctgaaattcaaagctgttgttgttgttggcggctggggttagtctctgtggaggtttgggtgttttttgaggcagagcttattctcattttgctccaatggagatgcaggtctcaatcgtcttacgtccactcttctggagactttttctcctcttttaataggaaaaaagagaatttcaatatgaattcatccagtgactttatttcttaaaaggaactgaaatatatgtaggaccaaatagaaagcacaagatcaaccatatttggctcagctagtaacatccattccaggctcgaaaagcaatccgaaaatgttgctcatataccttctgttggaaacaaccaaactcccaaggtgaggaaaccatataccattactaaacaaagggagaagtggactgaggaagagcatcaaaagttccttgaagctttgaaattgtatggtcgtggctggcgccaaattgaagagcatataggtaccaaaaatgctgttcagattcgaagccatgctcaaaagtttttctctaaggttgtgagggaatctgagggcagcgctgagagttctatacaaccaattaacatacctcctcctcggcctaagaggaaacccctgcatccatatccccgtaaatcagttaactctttcaaaggacactgcataccaaatgaaacagaaatatctncatctacaaacctgttagttgcagagaacgacaccccatctncaaacctcgtgctatctacggntggttcggaagcatttgggtctcaatttcagagcagactaacagat

SEQ ID NO: 28328 - DNA, 404 bp, Glycine max
  Clone ID: TF_LIB3030-004-Q1-B1-D11
gaatagccatgtctacttcaaagagcgtcagcagttctagtgaagatgacaatgaacttagaagagggccttggactctggaagaggataacttgctctcccaatatatttttaatcatggggaagggcgatggaatttgctggctaaacgttcaggattaaagagaactgggaaaagttgcagattaaggtggctaaattatctaaagccagatgtaaaacggggaaatttaaccccacaagagcaacttataattcttgaactccactcaaagtggggaaacaggtgcttatcttgtgcatttgattcttgagctccacaggttttatcgtgattcttggtattgtgagaaattgtagacaaatgcggccaatgcagccgcaaaacggtcacaaggactctc

SEQ ID NO: 28329 - DNA, 371 bp, Glycine max
  Clone ID: TF_LIB3242-524-P1-J1-D7
ctcgccgcttgctatcttcaacataatattatcgctacccctctcttcttcatcattcccatggaggattcttgagctggtgaagacaccaggacttgtccccgtggccactggagacccgctgaggatgaaaaacttagacaacttgttgaacaatatggtgcccaaaactggaattcaatcgctgaaaagctccaaggaagatcagggaaaagttgcagattaaggtggttcaatcagcttgatccaagaatcaaccgaaggccattcacggaagaggaagaagagaggttactcgcggctcatcgcattcacgggaacaagtgggcactcatagcgagacttttccccggtcgaaccgataatgctgg

SEQ ID NO: 28330 - DNA, 1501 bp, Glycine max
  Clone ID: TF_GmC1445_1
tctcaatgatgatgcaacttctcaatgctacagcaaaggcatttattgcacacttcatcagcttgaaactcgctgatcatacttacaagcaagcaagcccccatccaaaatgccacctcaaatcaaccttttagcatcccaagtccttcactatttatttatgttctctttgcattgagtgcctcaagtgtgcctttggggtgtttctgtagtgttggaaatataaaagaggagtgtggactttaaaagggtactctataagtttgttgcttgtgatatttgtactttgttcatgtgctgtggtgtgtgttgttgttgagagagtttgagaaagaataatgggaagaacaccatgttgtgacaagaagggtttgaagaaaggaccttggacagctgaagaggatgaaattctttctagttatatcaagaaaaatggtggtcatggaagctggcgttctcttccaaggatggcaggtcttcttcgttgtggcaagagttgcaggcttaggtggacaaactatctgagaccagacattaagcgtggtccctttactcttgaggaagaaaaactagtcatacagcttcatggcatcctaggaaataggtgggctgcaatagcctctcagttaccagggagaacagacaatgagataaagaacttatggaacacccacttgaagaagcgtctcaaaagcatggggcttgaccccaaaactcatgaaccattggcctcatcaacttacccttttcacaaggcacctgcatctgtctccacacgccacatggctcagtgggagagtgctaggctcgaagccgaggccagactctcgaacgagtcgtcaaggttcagccacaacaccaccaacaattccaactctgataacaacaaaaccactgattctgactactttctccgcatttggaactctgaagttggagaggcatttcgcaatgttcatcatcacaaagctgatgatgacaacaacaacaacaaaatcactactaatactcctactagttcctgccacagtcctctttctacagggtcatcttccaacaagtgtgagtcaattgctacaaatgcagacttggcttctaatgcaccagaaattatcacaccctctagcattgtgaaacaagagtttgagtgggggactcgtggttccgactcgtcaagctctaatgacatggaagactcatcagacactgctttgcagctcttgttggattttcctataaacaatgacatgagcttcttggaaggaaactcttttgtgtgtccactttagtgcatgtggaagcatgagtgatattttgtgtcatgcagctttttgtgttggtgttttgtaatattgctatctatataagcagttgaagaagtaggagaatgacatgacttggaaattggttgaatatggtcattattaatcagcataggtgtgacaattattgtggatttttttttatagttcaagtctgattatgaatatagtaaatgtta

SEQ ID NO: 28331 - DNA, 1097 bp, Glycine max
  Clone ID: TF_GmC1187_1
ctttattctctcacccctctctctcccctcttccccacccaaccttctctctatcacacacacaaaacaatggataaaaaacaacagtgtaagacgtctcaagatcctgaagtgagaaaagggccttggacaatggaagaagacttgatcttgatgaactatattgcaaatcatggggaaggtgtttggaactctttggccaaagctgctggtctcaaacgtaacggaaagagttgccggctaaggtggctaaactacctccgtcctgatgttagaagagggaatattacacccgaggaacaacttttgatcatggagctccacgcaaagtggggaaacaggtggtccaaaattgccaagcatctacctggtaggacagataatgagatcaagaactattggaggacaaggatccagaagcacatcaagcaagctgagaactttcagcaacaaaagtgtccaccatggcgcaacccatggaaacctattctccacccagttatcaaggaatgttagatccattttcaattcagttcccaacaaatcctcatcattctagttgttgtaccaatgacgacgacaacaacaactattggagcatggaggatatctggtcaatgcaattagccaattactgaacgggaattaaacctataaacataaatataaataatatatataaacctaagtgtctaagttccataaattaagctgtagtctctggcttaaaacatgttaggtttgtttatacaagtagttggatgtttggagtacttcggtcttttgcgtaccatcaatatttaagaactaagttagttatgttccgtaacttatgggctcttaattaaactatatctgcacaaaattatatatatatcaaatgtgatggtatgtggactataaaaagatatggttgagaaccacaaactttgaaacttcgaataatatattgccagtgacagtcttgttgatttgttatagcaaatgccgttacctagctcaatcgccaaacagcacatccccctttcgccagtttgcgtaatagcgaagaggcccgcaccgatcgcccttcccacagttgcgcacctgaatggcga

SEQ ID NO: 28332 - DNA, 1120 bp, Glycine max
  Clone ID: TF_GmC4565_1
ctcgagccgaatcggctcgaggctagccaatcctaattcctattcctatccttattactacataactctaaagtaagtaagaaaaatagagcaatttcacaacacaacacaactcttataattgtgtgagttattaattgagtatgggaaggtccccttgctgtgagaaagctcacacaaacaaaggtgcatggactaaagaagaagatgacagactcatatcttatattcgagctcacggcgaaggctgctggcgttcactccccaaagccgccggtcttctccggtgcggcaaaagctgccgtctccggtggatcaactacctccgccccgaccttaaaagaggtaactttaccgaagaagaagacgagctcatcatcaaactccacagtctcctcggtaacaagtggtctttgatagctggaagattgccggggagaacagacaatgaaataaagaactattggaatacgcacataagaaggaagcttttgaacagaggaatcgaccctgcaactcataggccactcaacgaagctgcaactgctgcaactgttacaactaatatatcttttggcaaacaagaacaacaagagacaagttcgagtaacggaagcgttgttaaaggttccatcttggaacgctgccctgacttgaaccttgagttaaccattagtcctcctcgccaacaacaacagactcagaagaatctttgtttcgtttgcagtttgggtttgcacaacagcaaagattgcagctgcaacgtttccaacgctgtcactgtcaacaacaccactccttcttctgctgctgctgctgcttatgatttcttgggcatgaaaaccagcggtgtttgggattgcacccgcttggaaatgaaatgaaaattcaaccaaattatatcaattagttagtgttgttggagagaagtgagagaatgaaattcgttaatttttgaattttctctcctattttttcttttttttcttctcttatttgtataaataattagtcgctgatatgcataatatatagtaccggtacagttgaacatttttgccccccttttgttgttactcttcactttcttttcttccggcaattgatggtagtcataaag

SEQ ID NO: 28333 - DNA, 813 bp, Glycine max
  Clone ID: TF_GmC6713_2
gagaggacgagcaaatcgaaagacaagagtcacagcgcacccccaaacagaaacagagttattgggagcacgaaacactaactgattcgattcgattgaggttacaaaacactaaactgattcgattcgattcgattgaggtttcggtttggtcttgatggtgtcggtgaacccaagccctgctcaaggcttctacttcttcgatccctccaacatggtccttcccggcgtcaacaatcttccaccgcccccgccgcctgctccgccttctcacgccgccgtggaggatccgagtaagaagatcaggaaaccctacacgattaccaagtccagggagagctggactgagcgggagcacgacaagtttctagaagctctccaattatttgatcgggactggaaaaagattgaagcatttgttggttcaaaaacagttatccagatacgaagtcatgcacagaagtattttcttaaagttcagaagaagggaacaagtgaacatgtacctcctccccggccaaagagaaaagctgctcgcccataccctcaaaaagctcctaaaactcctactgtatcccaagttatgggcccattgcaatcttcatcttctttcattgaacctgcatacatttatatcccggattcttcatctgcgcttggaactccagttactaacatgccttcgtcatcttggaactataataatacaccacaatctgtcaatgtgccacaagtgaccagagatgacatgggattcactgtagctggacaaacagctcctcttaattgttgctgcagcagtagtaatgagag

SEQ ID NO: 28334 - DNA, 249 bp, Glycine max
  unsure (1)..(249): unsure at all n locations
  Clone ID: TF_700907805H1
caaatattttttcacttgctctccatcttttttcagttcatcagnggccaggtaggccatgggangggctccatgttgtgacaaatccaatgtgaaaagagggccttggtctcctgatgaagatgccaccctcaaaaactacnttgagaaacatggcacaggtggtaactggatagctctccccaaaaaagcaggccttaagcgttgtgggaagagctgtcgtctaagatggctaaactatctcaggcc

SEQ ID NO: 28335 - DNA, 1700 bp, Glycine max
  Clone ID: TF_GmC5903_2
tgcacaagaagatgagacattaaggaatgctgttgcagtttttaagggaaagagttggaagaaaatagctgagttttttcctgatagatcagaagttcagtgtctgcacagatggcaaaaagttcttaatccagaacttgttaaaggaccttggacacaggaggttgaaacttggtccttttctttttaatttttcctacagctttattcaagcaataacttcttttgattggcttacaggaggatgataaaattgttgaactggtgtcaaaatatgggcctacaaaatggtctttgatagccaagtctttacctggtcgaataggcaaacaatgtcgagagcggtggcacaatcatcttaatcctgacataaagaaggatgcctggactttggaagaggaattggccctgatgaatgctcatcgtatacatgggaacaaatgggctgaaatagctaaggtccttcatggaaggactgataatgcaataaagaatcactggaatagttctttgaagaaaaagttggatttttatttagctacaggaagacttccaccaattcctaagaatagtccacaagttcctgtcaaagatacaattagacgttctgctagtaaatcaatgcttggttgttcaaataaagaattaaatgcagctgttgaaacatcatctgaaactacagccattagtaagctagatgacagtggcaggaatcagtttgagtcctcaggcacagttagagaagttggtgattcttcaagtgttcctgcaaatgactctgccgattctgactgtgtagaatgcaagcctggatcatccaacatcaaccccagctgtagcaactcagaacacgtgtcaagagctaattttggaacaacttttgggccaatatctgagaattctggactcaatggaaactcaacttttgagcattgtacaaacaatggtgacaggagcagtaccaggttaatcggaacatcttcacaagaaaatccaacctgtggttctttgtgttatgagccaccacagttagatggttcagttcccatagattctctttatttaaattatacttgccagcagaatgagtactgtccgagtccaacgatgtcacctactggtttcttcactccacctcgtgcgaagggtagtgaattatgcactgagacacctgaatcgatcttgagaaaggctgctaatacttttccaaatactccttccatattgaggaggagaagaactggggcccaaacactcaccagtcccactaaagttttgaaagtagataataatccacatacttctaataaaacagagagaaccaatgatgattctggttctgggcatttctccgggagtccagcaagccatggctatgggattggcattcccaacaataaggcattcaatgcatctcccccatacaggttaagatccaagcgaacagcaattgtcaagtcagtggagaaacaactggagtttgcatttgacaaagagaagaatgacgacaagaggagtaatgtgatgactgaagatcgtctgcatgaaaaaaaattggttgtgacatagtgcataaattggattatggctggacttgcttttgaaggtagctgattgtttctctaaattgtttgacaatgtttaccaattttatgaagaaaattcagtgcacgggtcacaatgacttggcacttctccac

SEQ ID NO: 28336 - DNA, 901 bp, Glycine max
  Clone ID: TF_GmC95395_1
acgagcaaaagtgacttaccatccacaaccctaaaccaacccctctcctccctccacttccttatatatcttgttcgagacttctctttagcgtgcttgatggctcgagtttctcgcttcagcataataatattatcgcctgcatccacagtaacagtacccctctcttcttcatcatttcatggaggattcttcagctggtgaagacaccaagacttgccctcgtggccactggagacccgctgaggatgaaaagcttagacaacttgttgaacaatatggtgcccaaaactggaattcaatcgctgaaaagctccaaggaagatcagggaaaagttgcagattaaggtggttcaatcagctggacccgagaatcaacagaaggccattcacggaagaggaagaagagaggctactcgcggcacatcgcattcacgggaacaagtgggcactcatagcgaggcttttccccggtcgaaccgataatgctgtgaagaatcactggcacgttataatggcgagaaagcaaagggaacagtccaagttatgtgggaagagaagcttccaagacgtttacaacgattccaacaacacgttcctcgaaaaaagaacaacaccacaatctcatcatcaagacatgttgtttagtacgagatttgggttagagaatggaatattcttcgactttcgaagcctcgataaaaataaggatgatagtaataataataatcataggatagtgtcagatactccctctagtacttctctggcgtcttggaattttggttctgtgccaaccaccaccaccaaaggcgcgagagacaatttcaataacacttctcgttcttctagtgtttatctctcggaatgttccagaagctcagatagatcttttctttac

SEQ ID NO: 28337 - DNA, 905 bp, Glycine max
  Clone ID: TF_GmC937_3
aattcggctctacctctctctgacacaagaattaagttgtgagatggagagaagtagtgaagaggagatgttaataacgaaaggtccatggacagagcaagaggattctcttctcttcaattacatcactgtccacggcgaaggtcactggaactctgtcgctcgctacacaggtctaaaacgaacgggcaaaagctgcagattaagatggttgaactacttgcgtccaaatgttcgacgtgggaacataaccctccaagaacagctcttgattcttgacctccattcccgttggggcaacaggtggtcgaaaatagctgaacatttaccgggaagaacagacaacgagataaagaattattggagaacgagagtggtaaagcaggctaagcaactaaaatgtgatgtgaacagcaagcaattcagggacacgttgcgttttgtgtggatgccacgtatgctagagcggattcgggctcaggcctcatcatcggcccaagcccaccaaagcagcttaatctccaacagtaacactcaagcacacagtggattgttgtcatcagcgcttcatgcccacgcgccttctctctctgactcgagcgcgtcgtacaatcttatgggtgctgatgctggaagttgctcatctcatagctactactcagacatagcaggcaatggttttggtggtgcggacttgtggacggatcaaaacatttgctttctgcaacaccagcttgctcatcatgacttgttctgatcatgcatacttcaacatcttgctccaaaattcactctaaactgcaacatataaagcaattgtaacactagtcgtgaaacatgcatgtttctttttatgttaatttggtgtgaaatttaataatctatacttcaattaatttcaagag

SEQ ID NO: 28338 - DNA, 1628 bp, Glycine max
  Clone ID: TF_GmC495_1
aattcggctcgaggtcgtgccaaagaggcttattgaacacttgcagcagctagagccacaatttcaatgcccctgattagtttgtctgtccatcacagtacatagtataataatcataaaccctttttctcagcgaggcacacagtatcattactacactttttttttcactattgttttggcaagtcctcaacccccctccccccagcataaagagctataattcccttctcagccacaatatggctttgtaaaatgggaaggactccttgctgcagtcacgaggaattgagaaaaggggcatggacggttcaagaagaccagaaactaattacttacattcagaaacatggcacaggaagctggcgtaccttgccacagaaagcaggtcttaaaagatgtggaaagagttgcaggctgagatggtttaactaccttagacctgacattaagagagggaaattaagccaagaagaagagcagacaattatcaaacttcgggcggttcttggaaacaggtggtcaagtattgcaaagcacttacccatgcgaactgataacgaaatcaagaactattggaactcatatctgaaaaagcagttcgaaaagaatgctgtggatccctcaagttcaaaaccaaatagcactgatagttcctcagaatcaaaatctaatgacacgtgcatggttccatcagagaaaactgattgccatgaaccaaacaccagccaatctcatcagcacaacttatcaaggtcaatctcatcatcaactcatcttcttaacaaagttgctagtaaaattctggcatcagggtacctagaactaatcaaatcatgccaacctgttgttgctgggaacagcaaaagtgaaagtgtggttaaaactggtattgggttagaaagtgacaatattagagacccccttgagcctaatttgacctcaccaagtcattctataacttctgctaagttactgaacaagatggctacttccctccctcataaagttcatggccttgaagctgcaaaagctgtgttctcaaaactgatggaaaacagtgaaaaaggtgccactgctagtgatgatagctttgttggaggttgtttaaatgctttaagcccttttgaggataaaccacacataacaaaaacaattgactccccttctggtcctacactaatgttcaaccatgttaccacaccctcatgcttttcagaagataatgaagataactggcaatgcgtttcatctaactatgtttccttcaaaatttgtgctgcgaatggtggtgactgcagtgtctctgagatcaacttgggtgagtcttccagttccacatccagcttcctgtttgagaatgctgaccttggaacgtgtgatgatgagataagcaagtacatccagtattgtagggaaaaaaatttgtggacatccaatgctaataatgtaggtattacaaggccctatgatgtaagaggaagatatctaaagagagataatatatcctaatagagtgtttgatatatcaccatgtttatatagaggtgtttgacggaggaatttatgtatcatcactctatttgtaataagaaattatattcttccttataatttttttttactca

SEQ ID NO: 28339 - DNA, 1630 bp, Glycine max
  Clone ID: TF_GmC5000_1
tacggctgcgagaagacgacagaaggggacatgcataagaacaagcacaaggtctgattcgtgtttccttacatcaacttgtggtctaaaaatgggaaggatgccatgctgtgagaaggtagggttgaacaaaggaccatggaaaaccgaagaagatgagaagctcgtggcttatgttgaaaggcatggccctggaaactggcgttcagtgcctgccaaagcgggtcttcaaagatgtggcaagagttgtagactgaggtggatcaactacctaaaccctaatatcaaacgaggaagcttcagcttggaggaacatcgcaccattgttcaactccactctcttctcggaaacaaatggtcaatcatagccgcgcacctgcccaagagaactgacaacgacatcaagaactactggaacaccaacatcaagaaaggactcatcggaaagggcttagatccccttacctacaaaccaataaaatccaacacttttcaagcctatggtggtaatttccttgacccttccattgacaccaccaatatgaaccatgtggctcaatcggagagtgctcaaatcgaagccgaagcaagagaatctatgttgcaatttggatctctcccttcacatctccctgggctaatcttaagcaaaatcccaactcaaccttttccttcatcagcttctctattaacccaacgcattaatacaacatatgacatgtatgccctcgtgcttgcgacgaatcatcttgaccttcatccaccaccattcactgaccctgaaagcttccctagtaggaagcttcttccttcagtctctaccagtgttggacaatccactgatcctgaaagctcactctcttatgatggtattggttataatatgatagacaatagtagtagtcaaatgcaaatgacgatggaatgttatgcgacaaactttgaagatgatgatgttatgatagctctagaagcatttggaatagcaaggtttgagggcattcaagaattgtttgacgggcacactaccatagaggttctaatcaatgaatcttttgaaagagatgtgtagaagagtatggaaatggaaagtgcaatttccatgctttcctttgttggttccaataaaagtaatgtgtggttttgtaacttttcttttgagggattttctatttcatgttgagttgggtgcctcattacatgtgtttcaggttcagggtgtcttgtgtcctggactacatgataggtgttgagggttgttctgttatcggaatacacaacacttgtactgtagttttctcatgttttggtgctatagtctcgagcatttcttgcgtttattttcctttatttttaatgagttatttgccttactaaaaaaattacagtgaagccaaagtcgtgaggttgcaagtgttgtcatggttctaaattgtgtttgggattgtggttgtgatctcattgcaattatgatcagttgtaatgagttaaaaaaaacttttatgttacagtcacagttatgaatatgaactgcaatgggtgtcacctgttctgctattgcacctcttgttcacggtctttattccaatataatccataattagcaacttccatggaaagccatgttatg

SEQ ID NO: 28340 - DNA, 1671 bp, Glycine max
  Clone ID: TF_GmC146_1
gctcgtggagcgtggcccagtgcagctacatgggatgtcacgcggctccgtgggagcggcatctctccgccgcacactttgggtccgtgcgccttccgtccttgctcttgctgccttcgtgtgcctcggcggcctggtttactagttggactccccctcgcatcacgcccctcaccttacagagcctgaccccttgcattcttgcctggtaacgtccctcaaccagaggtgaggctgggaccctcccattagaaccctatcaagtaaagagggttagagaaataaaaagagaaagccgacagcacatagatagagagaggaaaacgacttaatattctttttccttgagacctgaaggggctaaggaaaattagaaggacacacaagtataaaggcggtgaaataaaagagaaagacaagaagaagacatgggaagaccaccttgttgtgacaaagaaggggtcaagaaagggccttggactcctgaagaagacatcatattggtgtcttatattcaggaacatggtcctggaaattggagggcagttcctgccaaaacagggttgtcaagatgcagcaagagttgcagacttagatggactaattacctgaggccaggaatcaaacggggcaacttcacagaacaagaggagaagatgataatccatcttcaagatcttttaggaaacagatgggctgcaatagcttcataccttccacagagaacagacaatgacataaagaactattggaacacccatttgagaaagaagctgaagaagatgcaagtaggttgtgaaggtggtagctttggagaagggttttcagcctcaaggcaaatccctagaggccagtgggaaagaaggctccaaactgatatccaaatggcaaagagagccctcagtgaagctctttcaccagagaagccatcttgtaatttatctgcctcaaactcaaacccttcagatagtagcagctccttctcttccacaaaaccaacaacaacacaaactgtgtgctatgcctcaagtgctgacaacatagctagaatgctaaagggttggatgaaaaacccaccaaagtcctcaagaacaaactcatcatctgtgactcagaactccttcaacaactttgctgcagcaggtgctgatactgcttctagtattggagcaaagggaccaccaagcagtgctgaattgtctgaaaacaattttgaatcattgtttgattttgatcagtctttggagtcttcaaactctgatgaattctctcggtcattgtctcctgaggccactgttttgcaagatgaaagcaagcctgatgttattggtgcagaaattatgccattctctttgcttgagaaatggcttcttgatgaggctggttgccaagagaaattagttggttgtggtgatgatgccaagtttttctaagttgggttcattttgtgacatatatgagactgtggaattttttattttatttcataagttataggtagggcctcatcaattaatcttcgctttggccttagagagagaagtttttcaagcctttggtgctagacgtgtatatgttaataactattgaaattatgattattgttatcatactgtgttagatgccacactggaaaacctgcttcttttatgtaaagttgatcctgcgatg

SEQ ID NO: 28341 - DNA, 763 bp, Glycine max
  Clone ID: TF_GmC16783_1
tttagattcttctctgttaaactccctccctgccaccctatctacacgagcaaccttgttgtccttgcaatgacctacttctattaatactaccgaaataaccatgtccgggaaaccacttaattctccacgcctccttgcaatggctgactcggatctctcttcaagtcaaatttctacacattctactgattcaggaaatcgagggtcttccaaagttgaattttctgaagatgaggaaaccctcatcatcaggatgtataaactggtaggggagaggtggtctataattgctggaaggattcctggaagaacagcagaggaaatagagaagtattggacttcaagattctcgggctctagtgaatgaagctccggagtactacgattggtgttcagtctaggacgagcaagaagattttgggtgcaagattagtgtgattttgtgggacataaaaactgaattaaagttggcatagtttataggtatttgtattggctataaaaaaagaagtggggcagcaactatagaagctggtttgtgttatatttctccatcttgaaatgttccttggtgtgatattttccatcttgaaatgttccttggtgattggtcttttctgaattgtacttagtgctgttcatcttcgtgtatcttattcatttaccattttggctttttatcttgcgtctgaaatctgtattggaaatgagaattaattagagacaggttcagtattgtcattcttagtttaattacgta

SEQ ID NO: 28342 - DNA, 762 bp, Glycine max
  unsure (1)..(762): unsure at all n locations
  Clone ID: TF_GmC1167_2
gaaggatggtaaaactcattagtttccttccatcaaggtcatggagtatataaagcactcacatgcattggtactatttgcaatacaagctcatctcttgggaagaaattagtttaagcctcagctagaaaaaggagagtgagttagtgagttgagaggcagaagaaaagaagaagaaaggtggagtgagtgagtgaatagaaaaaaaaaacccaccatggggaggcctccttgctgtgacaaagttggcatcaagaaaggtccatggacacctgaggaggatattatccttgtctcttacatccaagaacatggcccaggaaattggagatcagtgcctacttgaaaagggttatcaaggtgcagcaaaagttgcaggcttagatggacaaattacctaaggccaggaatcaagagagggaacttcaccccccatgaggaagggatgataattcatttgcaagctctactgggtaacaagtaatactctcaaatatatcatactttttccgtcgattttctcaacaaaaagagaatcaatattcaataccatgacatataattaaagttcacatacttttcattgattaattttgaataaaaaaaattataattttagcatatgcctatctatatgatatgcctgaatttgtgaagttgtttgaattttggagcagatgggcagccatagcttcctatcttccacaaagaacagacaatgacatanagaattattggaacacacatcntaagaagaagctg

SEQ ID NO: 28343 - DNA, 711 bp, Glycine max
  Clone ID: TF_GmC744396_1
ggcacgagggcaaagttggtatttgcttcaacaaaaaaaacagaaagagaaatctaatcagagagagacaacaacacaagaacatgggtagagctccatgctgtgacaaggccaacgtgaagaaaggaccatggtctccggttggggatgctgcactctgggccgtctttgaatcgtcgggtactgctggcctttgggttgctctccctcagttcgctgggctcaagagatgtggaaagagttgcagacttaggtggttaaattacttgaggcctaatatcaaacatggtggatttactgaagaagaagacaacatcatctgcagcctgtacattagcattggaagcaggtggtccataattgctgctcagttacctggaaggacagataacgacatcaagaactattggaacactagattgaagaagaaactgctcgggaggcgcaaacaatctaacttaagcgcaaaagacacaaacaatggaatagaggagaattcttattcaaatgccctaagctcttcagctcttgaaagactccaactgcacatgcaacttcaaagccttcaaaaccctttctctttctacaacaacccggcgctgtggcccaagttgcatcctttccaagaaaagatgatccagagcctgcagtctttgaatgatggctctagccctgtgatgcaaaatgctttgcctaattcccacatgtcga

SEQ ID NO: 28344 - DNA, 1589 bp, Glycine max
  Clone ID: TF_GmC1872_2
gtttggattctcaaagacagattgagattttacacagagagagagagagagagagagagagagagagagagagagagagagagagatgggaagagctccatgttgtgacaaggcaagtgttaagagagggccatggtcaccagaagaagacacaaagctgaaggagtacatagagaagcatggaactggagggaactggattgctcttcctcagaaagctggacttaagagatgtggaaaaagttgtagattgagatggctcaactatctcaggcctaacattaagcatggagatttctcagatgaggaagacagaataatttgcagcctttatgtgaatattggaagcaggtggtcaattatagctgctcagttaccaggaaggacagacaatgatatcaagaactactggaacacaaagttgaagaaaaaactcatgggtttgcttcctctttctcatcacagaaaacaaccttcatttccatcctcttttacccttcaaaaccctccactctctccttcagctcaccaactgtacggagagtactgcacctacaccccaacaacaaccacatctttcacaagtaatattgaaccacccttttcccttccttcaagtaactatgcaagcacaagtgacataactacctcagtttctcaccccttttaccaaaaccaagactccatgcaatgctattacccaattatgagagacaacagcagcaacaacaacaacaacatgctcatgtttggaagcgaaggaagttgcagtacttcctctgacggaagctgcactcaaggcagagaaattatcaagcaagaagaaagaattggctaccacagctacaataatgattataactttatgcttaatcacagcaacaatattaatgatggagaaaagtcatgttttggtgagtggtttagccaaacactactaacaccgttggattatgatcttgaggatattaagcaattgattagtagcagcagtagcactactatcttcaataatgttgatgaaaacaagacagaagagaaggccatgtactactactactactagtgactgcaaactgattatgatgatgatgatgactgaatctgactactggtaaaaaaatatgatgatggagaaagggtatgttgatgttggtgtggcaaagattcagaagaaaaaaaaattgatgagatttttctggggttctgcgttctttgatgaaacatttcttgttttgacagtacatggtaaaagcttctttatattttgtatatatcttctcggaaagggtgatgatgattatgatgacgacgaagaacatgatgttagattatttttttgttaattaagtattctctccaatcagatattaatgttgtgaaaaacagccaatgtcaattcaaattattttatattagggattatatatatatatatatatatatatatatatatatgtatatatatatgtatatatataacatagtttagtgtgttaagtactactactacgcattgttataaattaatctatatcttcttgatatgtattatgtaattatatatgagaatttgtgaatttgttatc

SEQ ID NO: 28345 - DNA, 1196 bp, Glycine max
  Clone ID: TF_GmC1514_1
gtgttcagttaagagtttccgcgtgagagtggccatgggaagagctccttgttgtgacaaagcaaacgttaagagagggccatggtctccagaagaagatgctacactcaaaaattatgtagagactcatggcactggtggaaattggattgcattgcccaaaaaagctggccttagacggtgtggcaagagttgccggctacggtggctcaattatctgaggccagacatcaaacatggaggctttactgaagaagaggacaacatcatttgtaccctctatgctgagatgggaagcagatggtctgccatagcctctaaacttcctggcagaaccgacaatgatgtgaaaaactactggaacacgaaactgaagaagaagatcatggcagggaaagttaccctcaaaacattgactgacaatgacacgcttccttcaatttcaaccccatcactaaccaacaaccaaaatgtcaagactagtcaaaattcacctttcccttcttcacaaaatcaaaattctccacccttagatgctaataatacattcagcattagtgaaaaaagcattattagttttgaccaaactcatcatgggttgtatagtccacaagtcatggatgttgtgtcacaaattggtgcaaattcaaggattcccaactacaacaacaataataatcctgtggtgtcattgtctcaagaaggttcaagcagcatttcggattcctcttcaattgcaatgaacaacaagaatgtgtcacagccagaacaacatgctaatgatgattatgaatctatggaaatgttgatggattttggctttggatttccctatgattttgccaatggtcctaactgccattatgagagagttggtgaattggctccaagttcgtatccagagtgggttgattttagctatgctgacattaagccacattgaccgaatcaaaatgttatatagttagctagttatacaatattgtataaccatgggattttctgtaagaaaaaacaatgccaaaacgtatgtgaagggaagacttagctgagatttaatttttctagtttgttgatctaatatagtattaattagtagtacttgtgtgttgtgttcatagataggaactgcatagtttaattaggtcaaattttgaattaagcaaataaaaacgattaaagattattgataaaaa

SEQ ID NO: 28346 - DNA, 448 bp, Glycine max
  Clone ID: TF_GmC140404_1
agcgagtgtttgttctctctttagttcatatctatgctagggaatccactcttaccattaaactgaaattgtgacagaaaaaaggcaaaatggagagccagccactagaaaaagcaaaaccaaaatacagaaaaggcttatggtcacctgaagaagataataaactcagaaaccatatcattaagcatggtcatggctgctggagctctgtccctattaaggcaggcttgcaaagaaatgggaagagctgtagactaaggtggattaactacttgaggccaggattgaagagaggggtgttcagcaaacatgaggaagatacaatcatggtcctacaccatatgttaggaaacaagtggtctcaaatagcacagcatttgccaggaaggactgacaatgagataaaaaattattggcattcatatttgaaaaagaaagagatcaaagc

SEQ ID NO: 28347 - DNA, 1353 bp, Glycine max
  Clone ID: TF_GmC1181_1
cgaactcatcatttctaattgttctgatccatatatatcatactttctttgtaataacttaaagaaccccacaaaaacaccaaccatgtccacaattgcaaagagagatttgagttctaatgaagaagagagtgagctgagaagaggtccttggactcttgaagaagacagcttactcatacactatattgctcgtcatggtgaaggccgttggaatatgttagccaaaagtgcaggattgaagaggactggaaaaagttgcagacttagatggctgaattatttgaaaccagacattaagagagggaacctcactccacaggagcaactcttgatccttgaactccattccaagtggggtaacaggtggtcaaaaattgctcagcatctgccaggaagaacagacaatgagatcaagaactattggagaacaaggatacagaaacaggcacgccaacttaacattgaatctggtagcaagagattcattgatgctgtcaagtgtttttggatgccaagattgctccaaaagatggaacagagcaattctccaagccctcatcactcttccatgacaaacatgatgaatttagggaattccggagaagcttctatgagttcaatgtcaagcagcttcaatattaatccttctatgtcttcttcctcatctcctccacaaagggaatttattatggatgatgcaaatcattttaatactatgtccaaccccatcaatccatccccagattccttccaattttcacagctacttgaaatttctgaacaccccaaaagtccttcaaatgtgtttgagaacaatgtttgcagttatccaatccaggacaattgctatgttgataccaataactatggcatggaaggcataaacatggatcccctttcagcaatggatacttacgacttcccacagtttgattttcagacagcaggaaatggatggatgctagacagcatgggggattctactttatggaacatggaggctatgtgacagtgttggcaagagaaggcatgcatctcaagctcttttcatcgtgggatgttatattatcgaaagaaaaaaaagtttgaagattcttatgctatactgattcttagtgtgagtatacattctcataggtagaaattagtactaagtgtaaggttatttgatatgaacctcttgaaatatagtattttaaatagaaaatgcaggagatggtattagagttcccctgtttcagatttattagaagttggaaaagttgtaatttgaccaagacagtgtatcttggctgttataagtggcattttgaacataattcgtttttattttaaaaaaaaataattata

SEQ ID NO: 28348 - DNA, 855 bp, Glycine max
  Clone ID: TF_GmC1212_1
cggctcgagcatatacattttttagccttttgttagccccaaacacccacacgggcacacccctgcaggtacaaaagggggagttcacaacaaaaagaaaacaatgagaaaaccttgttgtgacaaggaaaacatcaataaaggtgcttggtccaagcaagaagaccaaaagctcattgactacatccaagtccatggtgaaggctgttggcgttccattcctaaagctgctgggctgcatcgttgtggcaaaagctgtaggatgagatggttaaactacttacgaccaggcatcaaacgtggaatctttgctgaagatgaggaagacctcatcatcaaactccatgccctccttggtaacaggtggtcactcattgctggaaggttgcctgggaggacagacaatgaggtgaagaactattggaattctcacatccgaagaaaactaataaagatgggaattgatccaaatagccataagccacaccaaagctttcctcgtcctcatgtttcttctgctgatcatcagggtgcatcaacatctgagtccatcaacaacaacaaagtccctttcttcaattcccgtggttcagctgccactgatcatcataagatttcgttcactaaagaagaaacatcaattatttcatcaccccctttgaatcttgatcttacaatttctttaccttcgcctgtggaagaaaacaaaaattctgatcatgagtccgccaagacatgtgacgtggatatagatctcaactgttagtacttttagttgttggcaagagtattaattaccagcagtagtacttcatgtttgttacaaattaattttggagaaataatcagtttttc

SEQ ID NO: 28349 - DNA, 1453 bp, Glycine max
  Clone ID: TF_GmC1729_1
gcgcgtgcgtacggctgcgagaagacgacagaagggggaagttgaaggggaaagagagaaaagaactagctagctggagtctgagaactctagcatgtactagtactactcctacattcctccatcttcctttgtactatttttttttaaccataaaagcaagagcacaaagatggtgagagctccttgttgtgaaaagatgggtttgaagaagggtccttgggctcccgaggaagatcaaatcctcacatcttacattgacaaacatggtcatggcaattggcgtgccctcccaaagcaagcaggcttgttaaggtgtgggaaaagctgtagactccgctggattaactatttgaggcctgatattaaaagagggaatttcacaattgaagaagaagaaactatcattaagctgcatgacatgctggggaacaggtggtcagcaattgcagccaaattgccaggaagaactgacaatgagattaaaaatgtttggcacaccaatttgaagaagaggctgctgaaatcagaccagtccaagtccaaaccaagttccaaaagagccattaagccaaaaatcgaacgttctgattcaaattccagcatcataactcaatcagaacctgacaattttaatttcagagaaatggacacaataacatcatcagcatgcactacttctagtagtgatttttcatcggtcacggttggtgacagcaaaaatatcaagagtgaagacacagagtctacggaaacaatgcctgtgattgatgagagcttttggtcagaagctgcaattgatgatgaaacccccaccatgtcatcatctcagtctttgacaatctcaaatgagatgcgacttcaatacccttttgctaactatgaggaaactttccagcagggtcatcatgcttatgattcaaactttgatgatggcatggatttctggtatgacatatttaccaggaccaatgattcaatagaattgctagagttctgaagttttcatgtgacacgttgaacgagggcattattgaatttggcagatagagtagtttaaatggcatggtataacttgaatttgaccgttacaacaaaagggtacgataatttctggtgtggggacagcattatcaccagctgcaagatctagaggcataatccattgacaaagaaactagccagggtaatgcgaaaggctaatgaatgatatgtaatgtacacatgtaatcaagtagtgaaacactgactttctttctttttagtggaaaacagcaatgctctaacatttttgtattttacaaattagagtttaattaggctagagttacttgattgtaatatcaataaatgatgtattatgtgaattattcaaaaaaatttatgcccttgttgagcaaaattttctaaaaaagaaaaaaaaaaaaaaaaaagcggccagcggccactcgag

SEQ ID NO: 28350 - DNA, 1079 bp, Glycine max
  Clone ID: TF_GmC1318_1
gagaaattgagaagatgggaagaaaggccaactgtgacaatcaatatgctatgaacagaggtccttggtctgctgaagaagacaaaattcttatgaactacgttcaagtccatggagaaggaaaatggagagagctttccaaaagagcaggcttgaaaagatgtgggaagagttgtagactccgatggctgaattatctcaagccagatatcaagagaggaaacatttcttcggatgaagaagatctcattattagactgcataagctcttagggaatagatggtctctaattgcgggacgcttaccagggcgaacagacaatgaaattaagaactattggaatacttatttgagaaagaaggcagagcacaagcatgacaaaattcctagccataacgataacattcctatcaaattaagaattgaatctccgggttgctcaaaaaattcctttggtaatgttcttgatcctacaaaatcccctcacccaatgaggtgtaccaaggttatgatgccagtcaatgattcagtcaacacaacgaatttgattacaacgagctgggacaatcataacccttcttctgcatccatgcaactagatgactataatcattgcttaacaggtgtcctccaagaatttgacatcagtgacttgttaatgtcgtatgaggatgattttcgttttaatggatatgcttgtgtcgaaataccccaacatatttttgaagatgagacttgcaggcttgatgattcgttgggtgaagaagcatggtatgagaattggaagaatgacccctattttccacaagatcaagatatgggtttttcttccttttaaagtgtttaaaatttaggcacattaccttaaagtgtttttagtattgttctttaatcaaaattagaatttcattttagtatcatgtgcaattaaggttgacatgaaatgttggtactaagatgaaattttaattttgaatcaagaacaggtctaaaatcccttaaagtattgtggctaaatagtctccttttaaaaaactgaacttgaatgaaatggttgaggatgttaaattaacaaaaa

SEQ ID NO: 28351 - DNA, 455 bp, Glycine max
  Clone ID: TF_uC-gmroLIB3258087a02a1
gttgttgtagtcgaagctggcgaaattgctgcttcctcatgagtctatttctagccttctctgctgcatcagagggactttttgcctttttcttgaaatgagtcctccaataattttttatctcattgtcagttctccctggcaagctccttgcaattgttgaccacctgaagtttatggtttagcaatcaaggccttggaatatgtatgttgccatttatggaaacatgcaagttcaagagaatgagaaaataaattttacctgtttccccaccttgcatgcaactctagaattatgctctcttcttgtggtgttatctgtcccctcttgagatcaggtctcagataattcacccatctcaatctgcagctcttcccatttcttttcaatcctgttaatggacaacaacaataatacataattaatcactttgatacataatcactttaccata

SEQ ID NO: 28352 - DNA, 1379 bp, Glycine max
  Clone ID: TF_GmC203_1
aattcggctcgagccaaccttaaagcttgaaactttcactaagcagagaagcatggtgtcaaaaaatccgaacccctctgaggctttttacttggacccctccggcatgtcgctccccggaatccttcccttcgccgccgcagccaccgccaccgcagattcctttgaggaccctgctaagaagactcgcaagccttacactattaccaagtctagggagagttggaccgaacctgagcacgacaagttcctcgaagctcttcagttatttgaccgtgactggaaaaagattgaagcatttgttggatcaaagacagtcatccagatacgtagccatgctcagaaatactttctaaaagttcagaagagtgggacaaatgaacatcttcctccacccagaccaaaaagaaaagctgctcatccatatcctcagaaagcttcaaaaactgctccagtactctcacaagtatcaggatcctttcaatcttcatcagctttgcttgaacctggatacatattaaagcatgactcttcagcaatgcctaaaactcccattattaacactgcagtgtcttcctggtcaaacaactctctgcagaaaaccaccagcgtattgcatgggcaaaaacaaaaagtgaataattgttgcagtagcagtagaagtcctagagcgcagttggttggtgaatctaatggtcaaaggaataacagccatccattgagagttcttccggattttgccgaagtatacagcttcattggcagtgtatttgatccaaatgtaactggacatgtacagaaactaaaaaggatggaccctatagatgttgagacggtgctattgttgatgagaaacctgtctatcaatttagcaagcccagattttgaggaccatagaaggctgcttgcatcatatgaggtggaacctgaggtcgataaatataaatgcagattgaaccatgcttgatgtgcagttgaagtgtgctacttagataggcggaggccgaaaatggctttgtttttcggctactgaatgcagtctggaaaaattttgcatgatgataaaatgccttggcatggcaactggctgaagtaaaaatgctgctgctcatcatcttggctaagcaacacttttaattctcttaattcaatttggttatgtatatagtaaaagaaattaatgtggaaatgtatagggtacatagttttgcataggtatgcacagtactagatatctgtgctctagatttagccaaacgtctaatatctggaaagcgaggcagctccctattaaacactttctaacattgtacagcataaaaattttgagcgctttgtttactaagagactcaactgagatttgttcagctcaaaaacc

SEQ ID NO: 28353 - DNA, 2086 bp, Glycine max
  Clone ID: TF_GmC6843_1
ccggaattcccggctcgaccccgcgtccgcctggtgttacaacaaggaaatggttaacaggaagtttaatctactagcctttacactttttctccaaaaggaagctacaattcttggatctcaggatgaatcagagtggcccacacttcctgtgctaccatcatatggcagaggaagggatgctcctgatggacaagggtgctaatatgaaataccaggccttacatgatcgagattatgttctttgatcacatccagatatctaatctcactttgatcaattctctatctttgtttgtccatccaatttacacaagttttgacaagaattttcatttgccttgatgattaatcttaatgcacagcgttttcttttattcttattatcccctatctctgcagcgacattataattcaagggctgaccattcttgctccaattgattctccaaacactgatggaatagatctagcaagagggactctctataccatctgttatgtaactgtgttaacgtggttcttgctgtaaatcattgaatttttgcggattgagtttcttcaaaatcagaagactcggtgtcggtgttgatttacttggccggagcgatggcaactttgtcccatgctgattctagaagaatgtattcatgatggtgggacagtcacattagccccaagaactcgaaatggctccaagtcgctagaatctgacaggagtaccatggacagaagaagagcaccgaacgttccttgttggacttgagaagctgggaaaaggtgattggaggggtatctctagaaactatgtgacttcaagaaccccaacccaagtcgctagccatgctcagaagtactttattcgccttgcaaccatgaataagaaaaagagacgttcaagtctttttgacatggtatatatatacatagatccatcatgatcaacttcctaattatctcatcttatatcaatcacatatccatatatatgcacttaaattagttttttttataatacattttatacttttactatattctaattacttaattgataattaatttaattgataacaataaatttatcttaaatttataattttttaaaattatccttattattaatacttttctcttaattatttactaatatattattttttttctttgaaaaatatttgtagtttaaaaataattaatttaaaaaatattatagttccagtattagaaaagaaaaaaacaaacatcataggaagggaggcaataaataatttaattttctcgataccatgtgattggatatcaattatggcaggttggtaacggcatcacaaatccaattagcagctctaactgcaagtcttccaaatgtgaaattgaggatgatgtgaccttgtcacttgttcaattacaagatactaaattagatgagcagaaagatagtgataaatattgtgaagctggaccagcaggtgctgaacatgaagctgtgcctttgtggcttcatcttcagatgaaatcttcaaataataatgttgcagcagtagttcctgatctggagctcactcttgcagtctccaagggcaaggctaagaccctgctaggcctggaacaaacacaaacaaaatcatccccagattccttccttcttggaccaattagcgtgacttgagctatgaattctctagggttaatgcagttgcacccctcggcccctctttatttgttgtcaagtacaagatcttctgttcaaaaaagaaattaaacacatttttcttgttggtagtcattaaccaaccactaatctatgcaattacatcccttcatgatatataccgtacgttacatagagtagttgattactttatatacatcaatcaaaatctctctttgcatcactgcaaattaattagttcaatctgttcaacggaattattaaccaactatgaaattttagatacttttttgttcgcaattggcaagtcatccataccttcctaccgaatattatgtttcatatataccttttttcttttctttctaagttatgtttaatatatacctagtgtaccaaaagcttgttttc

SEQ ID NO: 28354 - DNA, 1646 bp, Glycine max
  Clone ID: TF_GmC6713_1
acgggggacgagacgaaacccaagacaagaatcacagcgcacagtgacacatacataaaaaaaacgaaacacaaacagaaacagagttattggaaaacacgaaacactaattgatttgaattcgattcgattgaggattgctgtttgggtgtcttgatggtgtcggtgaacccaaaccccgctcaaggcttctacttcttcgatccctccaacatgacccttcccggcgtcaacaatcttccaccgccgccgccgccggctccggctgctcctgccgccgtcgaggatccgaataagaagatccggaaaccctacacgattaccaagtccagggagagctggaccgagcaggagcacgacaagtttctagaagctctccaattatttgatcgggactggaaaaagatagaagcatttgttggttcaaaaacagttatccagatacgaagtcatgcacaaaagtattttcttaaagttcagaagaatggaacaagtgaacatgtacctcctcctcggccaaagagaaaagatgctcctccataccctcaaaaagctcctaaaactcctactgcttgtcacgttatgggcccattgctatcttcatctattttcattgattgtgcatacatttatatatatcctgctttctttgtgcttggatggcccgccagtaacatgcctttattacgtcgtctttataatactacaccacaaccaggcattttactacaagtgaccagagatgacatgggattgactggagcttgacaggctgctcctcttaattgttgtgttgctgcagcagaagagagcacccctccgacttggcctcgtagcaaaaggattaatcaaggtgaccagggcaagccaattaaagtaatgccagattttgcacaagtctacagcttcattggcagtgtattcgatccaaattcaactaatcacctacagaaactacaacagatggacccaataaatgtggaaacggtattgttgttgatgacaaatctctccgtcaatttaatgagtcctgaatttgaggatcataagaggctgctttcatcatatgataccgactctgacaagtcgaagtttgttaatatttgcagcaaatccttcaccaataaatccgagagtgctgttttgtctgcttaggatgtagccagtggtttgccctgaagagtgttttcaatatattttctgaatgcacataaagtggtggagcaagaaagggaaaagacaaaggttttgctgaaaggaagtgtagtatctagatgcttgcatgtgtatataactcgtatatataagtatatgtataccttttggattgagtttttatttgttttaggcactgttagatcgtagttatgctgctgttttgtgtatatcttttgaagatgattgtccttggcatgcaggacaatgagagtcctgttaggtcacttttggaggctatactctgtacagtctgttgagtgcttttgtgtgttatgctgtgaagcttagaattagtataaaagagcggtgttaggacttagggggtgccgtctgccttgtatatataaagcaataaaacagtgtagataaagtttcttcttttcatgcgtgtatattatattaataatacttgctacctggtctcaact

SEQ ID NO: 28355 - DNA, 1535 bp, Glycine max
  Clone ID: TF_GmC1519_1
gagagagacctaacttaactattgcattgccacgcgtccgaaatccccgtatttaatccaggcaataaaaggccaatgagggaacaagagcacaagacaggaatagaagaagaagacccttgcacatagcttcaaagaaattaattaagatgggtcaccattcttgctgcaaccaacagaaggttaagagaggcctttggtcccccgaggaagatgagaagctcatcagatacattaccactcacggctatggttgctggagtgaagttccagagaaagctgggcttcaaaggtgtggtaagagttgtcgcctgagatggattaattatttgaggcctgatattagaagaggcaggtttacacctgaagaggagaagttaattataagtcttcacggggtcgttggcaacagatgggctcacattgcaagccacttaccaggtagaactgacaacgaaataaagaactactggaattcttggatcaaaaagaaaattagaaagccttctacggtgacttcatcaatgaccactacacaaagtgttgatccaccagccccaattcaattttaattccaatcaactagatcactatggcaaccaagaaaatttaacagcaaagccaccgatgcaagaaaccttattttcctcgacgtgccccctatttatgtttgacactagttcattagatcaagggacaacaacagtagacaccaccaataatgtacgagcagaactgttccaagattcattgggtttgagcagtagtgaaacgtggaacatgagccaccatcaagtccatgctcttcctcctcaactagcagcaacttttacagcaacaaacgttattgatactacgaattatctgccaccattgatagagaacgttgaaaacatggtgccaaatatggaagtacagtcttgtagtatagacgaggaaggagaaatggcactagagtgtttgcggagacaagatttgaatgagtgggtggagaatcaacaacaatgtcccagctttcttttctgggacaatattaatgttgaaggacaacttcgaggggaagaactagcaccaaacacgtcaaatatgggaaacaatacactttcaccttttccttcctctttatgactgcaacaaggactgtccccactccccactatactctttttctcatgctccctctaaccaggaagagttttcaggaatggtccggcccaggctgaaacttatattgcagagattgctttttcttcttttgttttttttccaacctctttcgattgctgattggaaagattcagaaaaatgagtgaagataaaatatgttatatatatataaccaagcgtgatgggtttattactttttattgagtgttttgacatggaagagggaaaaaaaaaagagaaggaataataataaaggcgattgtaacccgaaggaaagtttgattttgaagatatatatggaaagcatcttcaatttgcttgttttttgactgtaaaaatcgtcggttttgaatgagaataaataatgg

SEQ ID NO: 28356 - DNA, 599 bp, Glycine max
  Clone ID: TF_GmC1519_2
ctatgacgtcgtatgcacgctcggaattcggctcgagcagcatttgatcaaggcaatacaaggccacttagggaacaagaatataaaagaaggaaaaagaagaagacgacatagcaaagcctagaaacatgggtcaccattcttgctgcaaccaacagaaggttaaaagaggactttggtctcctgaggaagatgaaaagctcatcagatacattactactcatggatatggctgttggagtgaagttccagaaaaagctgggcttcaaaggtgtggcaagagttgtcgcttgagatggattaattatttaagacccgatattagaagagggaggtttacacctgaggaggagaagttaattataagccttcacggggtcgtaggaaacagatgggctcacattgcaagccacttgccaggtcgaactgacaatgaaataaagaactattggaactcatggataaaaaagaaaataagaaagacttcttcggtgtcttcaacaaccattgcacaaagtatcgatcacaattcttctgaccagttcaattacaattctaatctaatactataccactttcccaaccatgataacaatcta

SEQ ID NO: 28357 - DNA, 1386 bp, Glycine max
  Clone ID: TF_GmC213_1
ccacaggctcgcgggagtcgcctcgtgtttccgtttccgtttcaatttcctctcacaggctttaaccttaccagctcgagataagacatggaccggatcaaaggcccatggagtccggaggaggacgaggctctgcagaagctggtggagaaacacgggcccaggaactggtctctgatcagcaagtccatcccgggccggtccggcaagtcctgcaggctccggtggtgcaaccagctgtccccccaggtggagcaccgggccttcacggccgaagaggacgacaccataatccgggcccatgcccgcttcggcaacaagtgggccaccatagcccgcctcctccacggcagaaccgacaacgctatcaaaaaccactggaactccaccttgaagcgcaagtgctcttcaaccatgatcgacgacaacacccaaccgctgaaaagatccgtgagtgccggcgcggctattccagtctctactggactctacatgaacccgcccactccgggtagtccctccggatccgatgtgagcgagtccagcttaccggttgcatcctcttcgcatgtgttccgtcccgtgcctagaactgtcaaggttctaccacccgtagaaaccacgtcgtcctccaatgaccctccaacttcactttctctatcactccccggtgttggtgttgttgactcatccgaagtctccaatcggacaactgagccgattcatgttacaccgccactgccacatcggtcgaatactatgcctttgctcccaatgatgacgtcggtttcagcgacggtgatggcgccgtttaattttagcgcagagtttcgggcggtgatgcaggaaatgataaggaaggaggtgaggagttatatggagttgcacaatcagaatgggatgtgttttcaggctgcggtgaatgatgggtttaggaacgcttcggtgaagcgtattggaattagcagggttgattcgtaaatattatcatcgaagaatagaatgttcatttgctcctcctaatgaggaaaaaaactaagaatctgtttttttccctgtttttttttaatcaatgttcttaggcaataattttggttgatgtacagcgagacagaactctcgatccctaaagaggctgaatggaaattggaacgaaagagggagatagatgttacccattagataaaatctgaaatctctgttgtaactttttgtatctgaaactctgttgtaactttttttatcctctctattggtcctgttctcttttgaaaacaaaaagaaaaaataatcttggaataaacaaattcctccaaatctccttgtaataataaatctattttcttctttctaaacataaatttcaatctcgaattggttcggatt

SEQ ID NO: 28358 - DNA, 1368 bp, Glycine max
  Clone ID: TF_GmC1582_1
gctcctttatatattgtttccgtgtttttctctctttgtgattttgtgaggcccaaactaactttataagcatttacgtgtttgaaattaatattttgtgagctagctagcttcttcatcatggcaaagtcttctactgaaaagaatggactgaagaagggtccatggactccagaggaagatcagaaactcatcgattacattcagaaacatggacatgggaagtggagaacccttcccaaaaatgcaggactaaaaagatgtggaaagagttgtcggcttcgctgggctaactacttgaggcccgatataaagagagggagattctcattcgaagaagaagaagccatcattcagttacacagtgttttgggaaacaagtggtctacaattgctgctaacttgccaggaagaacagataatgagatcaagaattattggaacactcacatcaagaaaaagctattgaagatggggattgatccagtgactcacacacctcgccttgatgttattcaacttgcctccattctcaacacatctttatacaattcagcaccccaattcaactacccttctctttctggaattggaagatcagtgataaacccaagccatatgctaggtttgctcactaccctgctatcatgtcaaaacagaaattacaaccctgatgtattgaataataaccaacttagtggtggtagcactctactgcaaaatcaacaccaatgttcccgaatgcaacttgattctacacaagccttccaaccaaaccaaccacaagtctcactacaagaaaaccacattgctaagtctaattctaatccattgaatatggaaccccaagttatgaaaactacattagagaatcaaatcactccaattgctaccccttttagccaacaaaacacactaccaaatttgtggcactataatactgaaggtcacatatctgatctaccaacaatggctcaatcatcatcagctatgcaatgtttctcttctcccaagttcaattctatatacaacaatctcttggaaaatcagaatttgtgtaacaacaacgaggggatgccaaatttcaatctaagttcactgttatcgtccacaccctcatcttctagcccaattagtactttgaattcgtcatcttccacaacatttgtcaacggaaccactgaagatgaaagggacacttacggcagcagcatgttgatgtataacatttcaaatggcttgaatgactctggacttttgtgattgtacaagttgtgctgctacgtgatttagtttttcttttttctttttttgagatcagtgacatttaatgtcattaaaacagaaataatattatataattattat

SEQ ID NO: 28359 - DNA, 753 bp, Glycine max
  Clone ID: TF_GmC2603_2
tgacttatgtcgatggatctttaatgcaaacctttattatgcagatcaccatggtaaaactcccaattttgatgagaaaacaacacttgactacatctaattagtttgcgtttcatattattgtttaccctttcgtttcaaatctaataatggttactttgagacatgcaggtggtcaagaattgctcgaaagttaccagggcgcactgacaatgagatcaagaactactggaggactctgatgaggaaaaaggctcaggacaaaaagcgaggagaagctgcatcatcatcatcatctagtgttgattcctcaatatcctcaaacaaccatgcggtggatccacatgcttccaagaaagcaggagaagagagcttttatgacactggaggtcatggtgtgacagcctcaacccaagatcagggtcaaaaaggtgaacaagggttgttctctatggatgatatatggaaggatattgacaatatgtcagaagagaacaacactcttcagccagtgtcagtgtatgaagggcacagtgaagagggttgcaacttctcttgcccaccacaagtgccttctccatcatcatgggaatattcttcgtgaccctctatgggtgatggatgaggaaagtttgttttgccctttgagtgaaaccatatttttcctgctatgcacagggcaccgttttttttaaccgctaatattattattttttttcaaatcaatatttgttcatagcatatcatgtgtgc

SEQ ID NO: 28360 - DNA, 1270 bp, Glycine max
  Clone ID: TF_GmC5898_1
cccacggttacggttctgcaagactgcaactattggggaatctttcgcagcctcccactaaatcttttgaaaaaatattgaatcctcaaagtgccgatcctcctaaatccaatgtttgctctttttagcccttctctccctatatattttttcacaagcacctctttcaattctctccgtttcactagctcttattccaaagcaaaagaagaagaaagggcaaattagtataatatggagaccatgaatgttcaggtgatgagaagcttatcagatatggtaattaaaaaaggaccatggactgaggaagaagattctgttctgatcaactatgtcaacgtccacggcgaaggccactggaactccctcgctcgctcttcaggtttaaagcgaacgggcaaaagctgcagactaagatggttcaactacttgcgcccaaatgttcgacgtgggaacatcacccttcaagaacagctcttgattctcgaactccattcccactggggcaatcggtgggccaaaatagcagaacaactgccagggagaacagacaatgagataaagaactattggaggactcgagtggtgaagcaggctaagcaactcaaatgtcatgtaaacagcaaacagttcagggacgccttgcgtttcgtttggatgccgcgccttatggagcagattcaggcttcttcttcttcctatggccttgatcaaaccacgttgtgcaacactcaaacccacagagacaactcaatggtttcatcgtactcatcagaggttgatcttcagcctccttctctttctgatacaagtataacttcatcatcttacaatttaattggtgatggaggcctgtcaacggaaagtgcagaaaaggggtccatatactctctttggcagcattgggactactctgacatacaagcatttgagccatgcaatggttttggtgatgcagacttgtggaccgatgaaaacatgtggttcttgcagcagcatcttgctgatgaattatgatccagttttgcaatttacactaggctttgcaattaacaagttcaacgatatatcgctaattaaactactgaatgtcattatttgagtgatgattgattgtttgtaattgtcctacatgatacattaattttcttatgaaataagatacttgtagttgaatagtacatttctctaagaacatgtaggaactcaatttaagttgaccctctgtttagtgtccgttattgttatatacaatataagaacattcatt

SEQ ID NO: 28361 - DNA, 773 bp, Glycine max
  Clone ID: TF_GmC148_2
cccacgcgtccgctttctataaaggtagagagaagagaggacccttctcttgcatagttcaagtgagtgagagtgccaaaaaatgggaagggctccttgttgttccaaagtggggttgcacaaaggtccatggactcctaaagaagatgcattgcttaccaagtatatccaagctcatggagaaggccaatggaaatcactacccaaaaaagcaggtaattaaggttttagatgctcaactttcccaattcatttctcaatttgatgtctcatgttctggtttcgatcacaaattattatgtgtaacttttataataattatattaatattgatatatgattgaatgacagtatataattatatgtgtataatcattaaattcataatataaaattacatgtatcttttatccgaaaaattatgctggagtcggatagaataaattctgattcataactctgaatatacagggcttcttagatgtggaaaaagttgtagattgagatggatgaactatctgagaccagacataaagagagggaacatagcaccagaagaagatgatcttataatcagaatgcattcacttttgggaaacagatggtccctcatagcaggaaggttaccagggagaacagacaatgaaataaagaactactggaacacccatctaagcaaaaagctgaaaattcaaggaacagaagacacagacacacacaaaatgttagagaatcctcaagaagaggctgcaagtgatggtggcaacaacaac

SEQ ID NO: 28362 - DNA, 1046 bp, Glycine max
  Clone ID: TF_GmC1382_1
ctctgcttcctttcagagttcgctagagaagcttctgaagatgggaagagctccttgttgctctaaagtagggttgcatagaggtccatggactcctcgagaagcttttaaataccatgtttcttctttctttaaaataatatttactaattgatcactaccaaaaacagctggtcttcttagatgcggaaaaagttgccgactgagatggatgaactatctgagacctgatataaagagaggaaacataaccccagaagaagatgatcttataattagaatgcactcacttttaggaaatagatggtccctcatcgcgggaagattaccaggacgaacagataatgagattaagaactactggaatacccatctcagtaagaagctgagaaatcaaggaacggatccaaatacacacgacaagttaactgaggcaccagagaagaagaagggcagaaagaagaataagcaaaagagtactgagaataacaaagggtcagagaagaccttagtttatctaccaaaaccaatcagggttaaggctttatcgtcatgtatacccagaacggatagcaccttaacccttgattcgaattcagctacgactgcatcaacaagccaagagaaagttcaaagcccagaagcagaaacaaaagaggtgaacatggtttggggggtaagtgacaatattggagacaatggtgggattggaatattctttggtgaagaccatgacctagtcaacagtgcctcttacatggaatgctattctgatgatcatgatacgctagaaaagctctatgaagagtacttgcagctcttgaatgttgaggagaaaccagatgaattagattcttttgctcaatctttattggtgtaaacgtacaaataatggtgaaaatatatggttggaacaaataaaacaaattaagtttgctcctgctagcacgtgaacatattgtattatttattcctcagattagtatcatttatttagaatattttttaaattttaaatattattaatttaactacaaaaaaaaaaa

SEQ ID NO: 28363 - DNA, 1369 bp, Glycine max
  Clone ID: TF_GmC1121_2
agggtccatggtcgccggaagaggacgtcattctgagccgtctggtgagcaagttcggcgcgagaaattggagcctcatcgcgcgcgggatcagcggaagatccggcaagtcgtgccggctccggtggtgcaaccagctcgatcccgcagtcaagcgcaaacccttcaccgatgaggaggaccagatgatagttgctgctcatgcaatccatgggaacaaatgggcagccattgccaggcttctaccaggaagaacagataatgcgattaagaaccactggaattccactctgaggcgtcggggagttggacatgatacgattaaattagaatctggcagcttcatggaagatgttagcttggagaaagcaaaagcatcatcagaagacactctatcatgtggggatgtttctttgaaatcctcagaagggagagatgtcagttctatggagatcatggatgataaatctgatggcaaagcacaaactgagggtcaattacaccatgaagtcaaggacccacctaccctttttcggccagtagcacgcgtgagtgcttttaatgtataccactcatttgatggtacgcagccttcaacatcaattccaagatctgtttcaatgcaaggacccgttttacaatcatcaaaaccagatatggaattttatagagcgcttgaaggaatttttggtgaccagtcagtgcctcaccagtgtggccatggctgctgtgctgctccaaatggtagaaagtccgaaagctctttgttgggaccagaattcattgaattttcggaacctccatctttcccaaattttgagttggctgcaatagctacagacattagtaaccttgcttggcttaaaagtgggttggagagtagtagtgtcaaaataatgggcaacacctctggcagggtagtatctaatggatctcaagtacatattggccattaaagtgccaaatagatcatcattcctattctgagtgaggactggataatgggtatgataaaggctttagtaatgacaatctattttccttccaaatgtaattaggcaatcaaagttatgtgaatcactgctataatgtaaatggattcactaggtaaaaggaggttcataagttcaaggaacaattattttgttttttggggtgttgactgattaggacttgatttgggaccctgtaattgctaaaatgttcgtcgtaaaataggccaatagggtaaaattacttgcatatcagtcagttcgagttgctgctgtgatgctgttcactttctaagagtaaaactcatttatgttaaaaggcaattgcagcttagagaaatcaaatcagttattgttttttgttgtgatctgttgtg

SEQ ID NO: 28364 - DNA, 1405 bp, Glycine max
  Clone ID: TF_GmC1225_2
gtcactttacattggttgctagcaagtggtatggggaggcaaccctgctgtgacaaacttggggtgaagaaaggtccatggactgctgaggaagacaaaaaactcataaacttcattctctccaatggccagtgctgttggcgagctgttcccaagcttgctgggcttcggcgttgtggtaagagttgtcgtcttcgttggactaattatctaaggcctgacttgaagagagggctcctcacacaggctgaagagcagcttgttatcgatctccatgcccgtcttggcaacaggtggtccaagattgctgccaggttaccaggtaggacagacaacgaaattaaaaatcactggaacacccacatcaagaaaaagctccttaagatgggtattgatcctgttactcacgaacctcttaacaaacaagtctcatccaaagatagttcatcccctgcagagcatttctcacaagtgaataacattaacattcatcaggttgagcaaaatgatggggttctcaactcagaagagaattcaacctcatcaccggctgaaaattcttctggggaagaatcccttttggtggatagcatttgcagtgatgtttctctaattaacagcatgtggctggatgaaactcctctgatggacacattatgggacaatacacctaaagttgagaatgcaaataataacatgggcttaccaataggggaggataattgtgcttggttgttggactgccaggactttggtattcatgattttggcttcaattgtttcagcgaggttgaaacaaatgtactgcaagctataggcatggacagaaaagggctttaggatgcagtacatatggtaattaaagttagttgtccttaagaaacagagcatgcaatcaaaaaatatgtgtatatgtgaatgtgacaaaatgggaataaatcctctcgtgtccatgtcacgttcaaattttgtgtttataactttcttgatgaatattagataaagttctccttatttattatttgtcaagaaagtgatacacacgagatttgaacgtgattttgttaagttaaaatttttccctaaaggattaataaaatgccatggactcgaaattaggtttttggtgttgttgaattttatctagttattatgctacataatattcctggatggtagacgacgaacctttcctcttatcaggctcttccccaaccttttctccaaaaggattccgaacaaaatcccccaaatgacccccctttcgtcctcttgttaatgctgttagcttttgtgtatggttggccccagaaaataggaggagccaaacaaatagtgggttttgtgattgtgtaacttattgtaaaaaaatgtttaatttaaaaaaactgttaaatattcattt

SEQ ID NO: 28365 - DNA, 993 bp, Glycine max
  Clone ID: TF_GmC189_1
ggttggagagaataggatgggaaggtccccttgctgtgagaaagcacacacaaacaaaggtgcatggaccaaagaagaagatcatcgcctcatttcttacattagagctcacggtgaaggctgctggcgctctctccccaaagccgccggccttctccgttgcggcaagagctgtcgtctccgctggatcaactatctccgccctgacctcaagcgcggcaatttctccctcgaagaagaccaactcatcatcaaactccacagcctccttggcaacaagtggtctctaattgctggtagattgcccggtagaactgacaatgagatcaagaattactggaatactcacatacgcaggaagcttctgagcagaggtattgaccctgccactcacaggcctctcaacgattcttctcatcaagaacctgctgctgtctctgcccctcctaaacatcaagagtcctttcaccatgaacgctgccctgacttgaaccttgagctaaccattagtcctccccatcatcctcaacctgatcatccgcacttgaagacccttgtgacaaactcaaacctttgctttccctgcagtctgggtttgcataatagcaaagattgtagctgtgccctccacactagtactgccaacgctactgctactggctatgatttcttggccttgaaaaccaccgtcgttttggattacagaaccttgcacatgaaatgaaatcatattactgaaatctctctctttctttctttctttcttttcttctctaatataatttcttacttacttacttacttacttacttacttgttaatggttgcaaatgataaaaaagttccagccagtacagttgaacatataacaaaagttcaattcatcacttcgatcgatggtagagagaattaccacaatcattcctcgtggaagcctttctaatattcccatgttcaagtaactgtgcgtaagaataaaaaattttcttgttt

SEQ ID NO: 28366 - DNA, 1572 bp, Glycine max
  Clone ID: TF_GmC1295_1
gcccagaacacctggtaccgagtcccacaggtagggagggtcctgtttttataactatggatagaaccttcttaaggctaatcaatgatataattttggaaactgacaagacaattgaagttagaggctgttccctttgacttgtgccatttcttctctcaataaacttctattgatgccccgctccacgttccattcttcagtatcctttgtagtttgaaccttcctcacactcccacttcagaaaccaatcaaagagagagagagagagagatgggtagagctccttgttgtgacaaggcaaatgtaaagaaaggaccatggtcaccagaagaagatgaaacgctaaaggattacatagagcaacatggcactggagggaattggattgcgcttcctcaaaaagttggtttaaaaagaggtggtaagagctgtagactaaggtggcttaattatcttagacccaacattaagcatggtcaattctctgatgcagaagataaaataatctgcagcctcttcgctagcattggaagccaggtggtccataatagcatctcagttgccagggaggactgacaatgatataaaaaactactggaacaccaagctcaagaagaaatgatggccatgaatccttcagtactccaaaggaagcctcaacaaattacccttttatccatccttcaaagttcagcatcatcattcagagacagcaacaacatctcatactaccaccctcacggttccttttcctactcatcatcaagtcttgtgagtggtaacaactcttctgctaatgctgattccttgtttcaagcacaagagagtttcatggaccccaagtgccaattcaaagatagcagcatctttgtgtctggaggtgaagccacagccatggccacggccactagttgcagctcttctgatgggagctgcaacaaccagataagccatgtcatggagcctgcagagtttggtgatgcaagttttgttggtggggccaataatcacatctacagtggggaggaagatgataataatactcagaagttgatgatgttctccaatgctggtggtagtgttagtgggtggacaggcaaacaaaatggattattgtgggaacaaaatccattggattatggtcttgaggaaattaaacagctcattagcactaataacagttgcaacaactttttgtttgatgacaagaagacacaagaaagagtcacgtactactgatcgatgatgatttcttcagacttatgacttgttggactcaatttgtttgtgcttttgtgggatgggtttttagttttagtttttactttttagtattgaatagaattgaaccactttctttgtttgaaagtacatttaaagttttctttttgcagttactttgccgaggtaaccctacccattcacattcaaaccatacacatcccctaaggaagataaagaaaaggaggaacgaggaacctttgatatacttaacaagagttccctatttgtaattcttttatcttccaaacatcatcataaagaagcttgcagcagcagtccactaat

SEQ ID NO: 28367 - DNA, 660 bp, Glycine max
  unsure (1)..(660): unsure at all n locations
  Clone ID: TF_GmC2603_3
gcttgagagaaaaaatattccatttccagaattagtagcactagtgctctcttttgtttcgaaaaaaatggttcaacaggaagtgcgtaaaggtccttggacagaacaggaagacttcaaattggtgtcctttgttggattgtttggagaccgtagatgggactttatagctaaggtatcaggtttgaaggtggcgggagaaagtaaaataggcattagacaaaaaaaatcaaatgcttatttgggcatcatgctacaaaaaaatatagattatggaagaagaagcctttaaccacctcattttgttgtaggtttgaatagaacaggtaagagttgcagattaaggtgggttaattacctacatcctggcctcaagcgtggaaagatgaccccccaggaagaacgccttgtcttggaacttcactcaaaatggggaaataggtggtcaagaattgctcgcaagttaccagggcgcactgacaatgagatcaagaattactggaggactctgatgaggaaaaaggctcaggagaaaaagcgaggagaagctgcatcgtcatcaccaacaccctctagcgttgattcctcaatatcctcaaacaaccatgcagtggatccacatgcttncaagtaggcaggagaagagagcttttatgacac

SEQ ID NO: 28368 - DNA, 939 bp, Glycine max
  Clone ID: TF_GmC861_1
caaaccccaaaaaaagaaaagatgaaagcaatgaaacgctgctcttcatcatcttcctcttcttattcttctgcttctgagtccaccccacaaagcaatcaaaataaaaatagtaataacttttgctacaaaataaaaggcccatggagtgccaaggaggatcggattctgaccggcctcgtggaggcccatggcccgagaaactgggcctcgataagccgtcacattaagggtcggtccgggaagtcctgccggcttcggtggtgtaaccaactgagtccaacggtggagcaccgacctttctccacgcgcgaggacgaggttatattacacgcgcacgcgcggttcgggaacaagtgggccaccatcgcgagaatgctaccgggccgaaccgacaatgccgtcaagaaccactggaacgccacgctcaagcggcgtcgttttggtgctgacgtggtggtggaggatgatccgttgaccgcgttgactctggcgccgcccgggagtggttgttgtggccgtggagaggagcggcggggagtttcgccggcggggttttgggatgcgatgcgggacgtggtggcgagggaagtgagagggtacgtgtcttcctcgttttctgacaacttggcctctaatgagggattatccaaatattaatgtttttttttcatgatttattaagggaatttatgtggtttagttattattggacttcaggacccataaggggaacagttcagtgtaaaatttgtattattgattaattaaaaatcaatttaaatatcatactactatttcatatgtaattattataaattttaattatgtaataattgattattaagtgatattataaatattagtatatgtaaatttttttagcgaatggtatatgtaaatatttaaatcaacttataataataatttcgtttgatt

SEQ ID NO: 28369 - DNA, 2366 bp, Glycine max
  Clone ID: TF_GmC875_1
ggcaacagtctctgatgagctgaaggtagtttgcagccaaaaaagatattgaagcaagcactgcataaggggagataaaggtaggaaattcacaagagtccagctttttgaattctgaagcaaaatcactattgaagttttacacacctcagtgtgttttgagctttaattggtattgaactctgttctgcttcctggtattttctgtctctgttggctctacttcaggactggaccatagtccaacatatctgctccaatagtttagtatatcatcaaagttaatattaaggtactcatcatataagtaatctagatccataatttccatgaaacaaaccagagtttgacctacattgttgaactgtcttataggccactctaattgttgtgctgcggattgttccccacctcaaaccagaccactgctgcctgcttggactgaagccgcaggtcggtcattaactgcagctctaattaaagattgaagcattgcacgacacagataatttacggacggcacggtgacgtggaatcttcctccaatagcaagccatgccatattttattttattccttcctcctaggtgttctgagatagcaggggtaccgaactttgttcttgttccagttcttttgtgcacatcatctgctcatttatagagctccgcatccggtccctatgtacatagagtagagagcgcttgaaagaaggctaatcaaagtatgcaccatgggacataaggaaacctttcctctagatgctgtaacaaacctacatagttgattcttataagaagagatgactgtggatgaaattggtagtcgctaccagtggagaaaagaacaggataaagcatttgaaaatgccttggcaattcaccctgaggatgcttcagaccggtgggagaagattgcagctgatgtaccagggaaaaccttggaagagattaaacaccactatgagctcttggttgaagatgttagccagatcgaatccggttatgtgcctttaccatcttataattcttctccagagggctcaacaagccatgctagtgaagaaggagctggcaagaagggaggccactcttggaatagtaataacgaatctaatcatggaactaaggcttcaagatcagatcaggaacgacgaaagggtattgcatggacagaggatgaacacaggttattcctccttggcttggaaaagtatgggaaaggtgactggcgaagtatatcaaggaactttgtggtgacaagaacgcctacacaagtagcaagccatgcccaaaaatacttcattcgtctgaactcgatgaataaagacagaaggcgatccagcatacacgatatcaccagtgtcaacaatggagatgtttcagcacctcaaggaccaattactggtcaaacaaacggttctgcggataattctgctggaaaatcaaccaaaccagccccaccagccccaactgctgccttgggtgtaggaatatatgctggtcctaccattggacaacctataggaggacccctcgtatctgcagttggcaccccagtgatgaaccttcctcccccagcacacatggcatatggtctcggagcaccggttcctggggcagttgttcctggagcaccaatgaacttaggtcctgtgccataccctatgccacatacatctgctcgtagatgaagttatgttcagaggcctaatgtacaaaaagaaaacagcagattagaaggcttatgaatttaatgtaattctttacctattcctatagctgcttatgtgcaacagttttatgctccatcaattatttcaaataagggatactaagaagcattagaatgtatctacattggctgccatggatggaatatctgacagccttgacataccacagcgtgaaagtaatgttgtcgttagtcatataaagtggcccattctgtagatgaaggttctgtggcaggcttatgaatttaatgtaattctttacctattcctatagttgcttatgtgcaagagttttatgctccatcaatttcaaataagggatactaagaagcattagaatgtaattgcatcggcttccatggatggaatatttgacacccttgacataccccagcgtgaaagaaatgttgtagttagtcatataaagtggcccattctgtaaaggaaagttctggggctttggtaggttattgttgtattttgatcccttggtttctgattttccgtagggttttttaaatttcccatctagcttcccttattatcagattagttgctatgattgccatgatatattatagcagatatttgtccattttggcaacattcccatcaaaatgtttcccttaag

SEQ ID NO: 28370 - DNA, 2556 bp, Glycine max
  Clone ID: TF_GmC1021_1
ctaagatggggcataacataaagattaggcaggaagtcaagactcccccctttgatgatcaaatcatcagcttatcacagtcatatgatactgttggaaataaaaatttgtttgtgcagtcaattgctccaaagaacccacgggcgccaaacaagcctatgcaacctcttagagccccggcgatcattcgcagctcgccagtgaatgcttggtatgggaaagatttccactttcatgggatcgtacaaaatggtctggtgcagaaagggcaaccctcttcataccagttaagcgtcgactcccaaagtcagtgcttcttctatcacattctgttttacttcggggtgctgctgagccgatggacatcgcatgggtgatgtaattgcatctgtttaagatcttgcaattacacctgagacgattagacaatcttgaccgaaagtgaattggaatctgatggcgtcgctgtttgtccgtggccggtcggctgctgtacgtgtttcgtcccggtcctatggtggagatcctttgatcaaccaaggtgcatggacgaatgaagaggacaaatctcttttacttattgtccaagatattggcatcaggaactggtttgatattgccacatcattgggcacaagcaggactccatttcaatgcttagcacgattccaaaggagcttaaatccttccatgctaaatagtgaatggactgaggaagaagattctcaactctgttctgctgtggcaagttttggtgctagggattggcaatctgtggcttctgttttagaacggcggacaggaacccagtgctcaaatagatggaaaaaatccctttgtcctgagaagaaagggagctttacacgagaggaagatatacgcataacagtagcggttatgctttttggacgaaaatggaatcaaatagctaactatgttcctggccggatccaatctcagtgtagggacagatacctcaattgtcttgatccttctttgaaatggggtggatggactgaggaagaggatttaagattagaagctgcagttgtcaagcatggatactgctggtctaagattgctgaagaagtgccacctcgtactgattctcaatgccggaagagatggaaggtgttatgtcctgaatatgttcctttgcttcaagaagcaagaaagaagcaaaggtctattattggttgtaactttgttgatcgagaatctgaacgcccagccattacactgaatgactttctacctttacccgtgccagctccaaaatctgatgttggtgcttcaaatctccgcaagaaggccaagtcaagcaatgttcccaaggaaatgagtaagaaatgcaaaaagagctcgacttcataccaaggaagtacaagatacagaggtatatagtgatgatgggatcaagacttatggtgaagtctctgcatgcagcaatgttcccaagaagatgaggtccaagagacatacaaaaaaaactcgaaattgtcccaaggaagtagtggatatatattgtagtgagaaggtcaagacttgtattgagagttcagaaagtcaatctacctgtattgcgagttctggaaatcaagattcagacaacataactattgcatgctttttacgcgataaatcaaaggagatgctatctagatttaccaaagatttgagtcaggcttccttctcctctaggagtatagatgtttctaataagcagaatgttgcttctgatagacgagtgggaaaaccagaggatgcaaacactttgacaggtggtgatcatgaggaaatgacccttgcatgctttctgggaaacaaatcaaagaaaggaagtcaagctgctaacggacgtggtgcatgctcttcgaccatcatcatacctgatgatagtggactgtcaatgtcaaagcatgttgaaaaggagactgttttgcatggtggtgttgctgaaccaatggacatcgttgtggaagaaaaggatgatgagcttcttacttccttcttgcaaaacaggccaacgaggcagcgaaaacgacccagtaggtttttataaaggtgatgctaattatccaaattttggcctggtatacttttttttttttccattcctaggtatgaatagaagacaattaattaaaacctgtgccgtgaaattgggtagtggctaatccatatacaaaattgttgaagtaattgaaagccaactttgccatgatcttgaatttgaagttggtttaggtacagtgagtttcgagttccttatgctgagcttgggcctgtgtacagattttcggcctggcgcaatttgtataccaaccgattgccataattcttctgttcccagtttatattgtttctattcttaaagatctcaggcgtcaatgtgaagcgtttggattttggaaaactgatgtcgagtttctttaaaaactgattgagtacagaatcataacaaaagttattccaaaaccatcgatagagtacgggtttgaactaatatttttgcaattttaaaatttatcttgttatttttttttatcaaacaaa

SEQ ID NO: 28371 - DNA, 2366 bp, Glycine max
  Clone ID: TF_GmC5903_1
cccacgcgtccgcccacgcgtccggatttttcgaaaccttagcttcagagagagagagagagacaaagagagagaagcaatcgtggtctctcttctatgagcttcacttcgattcccgccacttctctgcaagcataggattttgggttcttgtgtgaaggatatggctgaggtggtgaaatcagaggagtgttgtcaggagaataagcaatctactgctgcttcttgctcctctgtatccgaaggcagtggcagtgcaattcacaagtctccggggagatgtagccctgcatccacatcgccctcacatcggaggaccaccggccctataaggcgtgctaagggcggttggactgcacaagaagatgagacattaaggaatgctgttgcagtttttaagggaaagagttggaagaaaatagctgagttttttcctgatagatcagaagttcagtgtctgcacagatggcaaaaagttcttaatccagaacttgttaaaggaccttggacacaggaggaggatgataaaattgttgaactggtgtcaaaatatgggcctacaaaatggtctttgatagccaagtctttacctggtcgaataggcaaacaatgtcgagagcggtggcacaatcatcttaatcctgacataaagaaggatgcctggactttggaagaggaattggccctgatgaatgctcatcgtatacatgggaacaaatgggctgaaatagctaaggtccttcatggaaggactgataatgcaataaagaatcactggaatagttctttgaagaaaaagttggatttttatttagctacaggaagacttccaccaattcctaagaatagtccacaagttcctgtcaaagatacaattagacgttctgctagtaaatcaatgcttggttgttcaaataaagaattaaatgcagctgttgaaacatcatctgaaactacagccattagtaagctagatgacagtggcaggaatcagtttgagtcctcaggcacagttagagaagttggtgattcttcaagtgttcctgcaaatgactctgccgattctgactgcgtagaatgcaagcctggatcatccaatatcaaccccagctgtagcaactcagaacacgtgtcaagagctaattttggaacaacttttgggccaatatctgagaattctggactcaatggaaactcaacttttgagcattgtacaaacaatggtgacaggagcagtaccaggttaatcggaacatcttcacaagaaaatccaacctgtggttctttgtgttatgagccaccacagttagatggttcagttcccatagattctctttatttaaattatacttgccagcagaatgagtactgtccgagtccaacgatgtcacctactggtttcttcactccacctcgtgcgaagggtagtgaattatgcactgagacacctgaatcgatcttgagaaaggctgctaatacttttccaaatactccttccatattgaggaggagaagaactggggcccaaacactcaccagtcccactaaagttttgaaagtagataataatccacatacttctaataaaacagagagaaccaatgatgattctggttctgggcatttctccgggagtccagcaagccatggctatgggattggcattcccaacaataaggcattcaatgcatctcccccatacaggttaagatccaagcgaacagcaattgtcaagtcagtggagaaacaactggagtatgcatttgacaaagagaagaatgacgacaagaggagtaatgtgatgactgaagatcgtctgcatgaaacaaaattggttgtgacatagtgcataaattgggacttgcttttgaaggtagctgattgtttctctaaattgtttgacaatgtttaccaattttatgaagaaaattcagtgcacgggtcacaatgacttggcacttctccacacttgatagttggctgtcatttccatcacacttcaacaaaattcagcaacagtagataaattccatttacttgtggatacatatagctagttgtatctatcagatttgtacagttgtcttaggaaaaataaattttctaatgttttatcaatgtttttagattccttcaatcctttctctaaataatttatggcctgacctacttaataagtgtgtaaccttacattgttgcacccgctagtttgatgtacactatacattgaaattactgtttgacaatcacagaaaggtgttcatcatgaaattatcatcaaaatcaaagataaattaatgcaaaaaaaaaaaaaaaaaaaaaaaaaaaaaaaaaaaaaaaaaaaaaaaaaaaaaaaaaaaaaaaaa

SEQ ID NO: 28372 - DNA, 1495 bp, Glycine max
  Clone ID: TF_GmC596_2
atatgcgaaagccgagggagaccaaaaaacaaaccaaaaaccatcatcataacccaaacccaacacaccatagcacagcaccacctcgtatcacataataacaaccttaaacccccaaactttcatgtctcggatcccgtgattcggatccccaacaacaacaacgccaaaaacaaaaaacaacctagtattatttggatccggttcccatgacgcggcgttgctcgcattgcagccacaatgggcacaactcaagaacttgccctaaccgcggggtgaagctcttcggggtccgattaaccgatgggtcgatccggaagagtgctagcatgggcaatctaacccactatgccggttccgggtcgggtccactccataccgggttgaataaccccggttcgcccggggaaacccccgatcatgccgccgcagtcgccgacggttacttgtccgaggacttcgttcccgggtcttcttctagctcccgtgaaagaaagaagggtgttccatggactgaggaggaacatagaatgtttttactcggattgcagaagctgggcaaaggtgattggcgtggaattgcaaggacctatgttatatcaaggacacctactcaagtggctagccatgctcagaaatatttcatcaggcagagcaatgtgtccaggcggaaaagacggtccagcttgtttgatattgttgcagatgaagcagctgacactgcaatggtacagcaagacttcttgtctgctaatcagttacccactgaaacagaaggcaataaccccttgccagctcctcctcccctcgacgaagagtgcgaatccatggattccacaaactcaaatgatggagagcctgccccatcaaagccagaaaacacacagtcatcttatccaatgttatatcctgcatattattctccggtgttcccgtttcctctgccctattggtcaggatacagtccagagtccaccaagaaggaggagacacatgaagtactgaagccaactgcagttcattctaaaagccctatcaatgttgatgaactggttggcatttcaaaattgagtttaggggagtctattggtgactctggtccctcctctctgtctcgaaaacttatcgaagaaggaccctctagacagtcagcttttcatgcaacaccgacatgtggcagttcaaatggcagtgccatccatgcagtttaagcgtgtgcctcatgttccgaggaagggattgttatgtgagcattgttgattgatgggcgcgcatgaatgtggtcttgtgttcatcaatacatctgtttgtggggtaacctaaataattttttttttttggcccattcacagtgattaacctagtttgtttatttgctggtaggcagtagcgtctaggagttactttgggtctaaagtaaaacttttatgtttgttcagtgattttatttgtcagggttatgtaaagttaatgttaattgtgcagtttgacaatc

SEQ ID NO: 28373 - DNA, 898 bp, Glycine max
  Clone ID: TF_GmC1812_2
gccatgtgtacttcaaagagcgtgagcagttctagtgaagatgacaatgaacttagaagagggccttggactcttgaagaggataattcgctctcccaatatatttctagtcatggagaagggcgatggaatttgctagctaaacgttcaggattaaagcgaactgggaaaagttgcagattaaggtggctaaattatctaaagccagatgtaaaacggggaaatttaaccccacaagagcaacttataatcctcgaactccactcaaagtggggaaacaggtgcttatcttgtgcatttgattcttgagctccacaggttttaaattgtggtccaggttgtgcttacagtcggcgttttatcgcgatttctttgtattgtgagaaattgtagacaaatgcgaccaatgcagccttgaaacggtcacaaagactctcaaagccttgaggtcgcggccaaaatcgtgatcacatactgttttttaaaacctgcctcttcaaaatgctggtagaagcaaagatgcaaatcttgccactatcaacaagcatgctttccattccaaaatattgtcttttctctggattttcatttctttctttaatgactgtaggtggtcaaaaattgcacaaaatttgccaggcagaacagacaatgaaatcaagaactattggagaactaggattcagaaacaggcaagacatttgaaaattgacactgacagcagagagtttcaggaacttgttaggcgtttctggatgcctagattgcttcaaaaagccaaagaatcatcttcttcagccatgtcaattcaaaaccaggcaactcctatgccttttgatggtgtttctcagcattcaactgttgggaccataccatcacattcacacaccccttggca

SEQ ID NO: 28374 - DNA, 1138 bp, Glycine max
  Clone ID: TF_GmC105_1
gggtgttttgagttttgatcaatgagactagccatgtctactccttccaagagcataatctgttcaagtgaagatgattatgaacttagaagagggccatggagtgttgaagaggattatcttctcacccattacattgccaatcatggtgaagggagatggaatttgctagctatacgttcaggactaaggagaacaggtaagagttgcagattgagatggctcaattatctaaagccaaatgttaagagaggaaatttaacctcggaagagcagcttttgatttttgaactacactcaaagtggggcaacaggtggtcaaaaattgcgcaacagctgccaggcagaacagacaatgaaatcaagaactattggagaacaaggattcagaaacaagcaatatatgcgaaatttgaggatcacagaagagcaggatttgtagaatttgtcaagggtctacagatgacaagatgtcttcataaatcacaagaatcatctccttcggccatgtcaacccaagaccaagcaattcctttaccttttgatggtgttactgttcctcattattcatcatttgggattgggacaacaccaacaatacaaatcacttgccatggagatctcaatcatttgaatcagcatgagcagaactcagactctgaacaccacaatagttcatgcatttcctcttcagaatcagcaaatatcccaaatatgagtcagccttttggatacactactagtcaatttcaggccttagataactgtgactttggcatgtgtttatatgatggctatagcatagataacaattcctatgacagggatgccttgaacctgacaaccacaatggttgctgggaatctggaactcccagtgtttgattgccaaacattagaaaccaataggctaaacaaggaatttgcaagtagcacatggagcatggatgaattatgacaatttaggaacatacaaagattatcatttagattctagagtatctttttagaaccactcactatctcttttataatatgtagtgcttgtcattagataatcgattattcaatagcttagctataaatataaatgtaaagactaaagagtagttgttttataatttataggacatttgggc

SEQ ID NO: 28375 - DNA, 2555 bp, Glycine max
  Clone ID: TF_GmC1241_1
actttagacacatcacggcgtactccaatatcagacaaagctcgagccgaatcggctcaaccccaaacaacacccctcctaatcctctttttctctaacagaaagaaaaactcaacacaacaccccctctccaccctctttttcttttaatttctcatcttatctattaatcttatatacatatatataaagacatagataatagtcatatagatataattatttcgttatattttccttgcatgggctgttaagatgtctcgcacgtgctcacagtgcggcaacaacggccacaactcacggacatgcaccgacggtggcgccgccgggtctccgagggagaacggcatcatgctgttcggcgtaagagtcatgacggaagctaactcctccttcaggaagagcgccagcatgaacaacctctcacagtacgacgcggagttcaacgccgccgacgccggctacgcctccgacgacgtcgttcacgcctccggccgcacgcgcgagcgcaagcgaggtgttccttggacggaggaagagcatagattgttcctgttagggttacacaaagtcggaaaaggagattggagagggatttctagaaacttcgtgaaaactcgcacgcctactcaggtcgctagtcacgctcagaagtactttctccgccgccacaaccagaatcgccgccggcggagatctagcctcttcgacatcaccaccgatacggtgatggaatcttctactataatggaagaagaacaagtgcggccagagacggtggcgacgccgctccccgtcgcatatccggggtcgcattacagggcttttagccggcgcgtgttttccgatagctccggtggtgttgccggtgagtggcgagagactaatcaatccgatcaggccgacaccgattttgccggtgcctccgtttacgatgatggctaatttgaacttgttagagaaagcttctccgacaaatctcattgagcctttgccgttgtcgttgaatctgccatcgccgacgccgcggtctcaggatcagtcgtcggcgagtagtgggcactcgtcaccgtcgtcgtcgtcatcggcggcagcttttcaggctatgtctgcagcgaagttcggcagcggcggggatagtatcatcagcgttgcttgaaaagaaggaaacaagaaaaaaattagtgtcattaagttattaattaagtatggtcttagtagttaatttgcgtgtgtaaattaatgttacttaatcgggcatgtatccaagagggggaaaaattgaagatatgtgttggggatttattgattattacgaaagataatcataatataggtaggagggaggggatatttgaattaatgagtataatggtaattaattatgatttggaaaaataaatatatactatgggtttaggttatgtaggtaattaggcaatttaattgctggtttcagtgtacaggtttagtagaatttagaattagaaagatgggttgtcatattctgtagctgttgagggattcttgtttctgtatgtatgggggagtgtgagcgtgaaatgatagggcaccgggtactcttgagatgcgactggtctgtgtaatgccactggggtcattaaaatattccttagattagattagacaaaggaatatattatgcttaccatttttttttagatttagtttctgtgttcttggacttgggttgaaccaagaagtattcgaatgcaacacaatctaggaccactattacgttggaatgaaaagaatacaacaaaaaaactcttggttgaattaaataaaagctaacacccaaccaatgccaaaccactaaaaactggtggtcataaaacgaagcggtgtagaaactaaagtactagcagcagctaagtaagatgctgcttgcccactgcgaccaacactgacacttgtggatacaagaagacctgttttgcagtaaatagcaaagtcttcacagttattcttgaaaatgttgtagacaccaaacccattttcaagaagaaatgaagaacgatgaaggacatcttcagttggatcagaaggagcaagagtgcaggtgcctcctcgagctttggctagaaaaaatgcaggtgaaaccccatattcaaagatgtatagattaccaccataaaggaaacaatccaaacaggaagagatgacaccatcagtcctagtttgatcaccgcatcttgggcacggagtgtcggaagaatgagagggagatgaactgaaaaggagattgtccaacacagttcctgttccaatttcttgacctgctcctctggtaaagtggatcaccattccatcaccgacatatattccgtggtgtgcatagatgtacgcttgcctccaagagtaaatgtgatcaccgggcttcagttgttcccgatcgatcatattggacagcactcccatttcctcttcctctctttctctctctatgaaaactgaagcccaacgaaaatggtatgaataaagaatttcagattacatcctcatccctgatttctgttatggtgcactctcat

SEQ ID NO: 28376 - DNA, 1454 bp, Glycine max
  unsure (1)..(1454): unsure at all n locations
  Clone ID: TF_GmC1241_2
ggtaagtagttcttaagaaattaacaatcactttccattaagtgctgtttggtttgagggatgattaattgcgatggagtttttggattggtgatcgaaggtgttccttggacggaggaagagcataggttgttcctgttagggttacacaaagtcggaaaaggagattggagaggaatttctcgaaacttcgtgaaaactcgcacgcctactcaggtcgctagtcacgctcagaagtacttcctccgccgccacaaccagaaccgccgtcgccggagatctagcctcttcgacatcaccacggatacggtgatggaatcttctactataatggaagaggaacaagttccgcaagaaacgatggcggcgcctatccccgccgcatatccgccttttcccggcgcgggttttccgatgagtctatctccggtggtgttgccggtgagtggtgagagactgaccaagccgatcaggccgacgccgattgtaccggtgcctccgtcttcgaagatggctaatttgaacttgaaagggaaagcttctcggacaaatctcattgagcctttgccgttgtcgttgaatctgccatcgccaacgccgcggtctcaggatcagtcgccggcgaatagtggccactcgtcgccgtcatcgtcttcggcggcggcttttcaggctatgtctgcagcgaagttcggcggcgggggggatagtatcatcagcgttgcttgaaaagaaggaaacaaagaacaaatgagtgtcattaacttattaagtatggtcttagtagttaatttgggtatgtaaattaatgttacaaaatcgggcatgtatccaacagggaaaaaatctaagagatatgtgttggagatttgtttattacgaaagatgtatgatataggtaggagggagaggatattagaattaaatgagtatgatggtaattatgattagaaaaaaataaaataaagagatatgtatggtaattaggttatgtaggtaattaggcaatttaattgctggtttcagtgtacaggtttagttgaattaaaaaagatgggttgtcatattctctagctgttgagggattcttgtttctatatgtatgggggagtgtgaccgtgaaatgatagggcaccgggtactcttgataagcgattggtctgtgtaatgccactggggtcattaaaatattgcttagattagacaaaaggaatatttcatgctcaccaaaaaaaaaaaaaaaaaaaaaaaaaaaaaaaaaaaaaaaaaaaaaaaaaaaaaaaaanaaaaaaaaaaaaaaaaaaaaaaaannaaaaaaaaaaaataaaaaaaaaaaaaaaaaaaaaaaaaaaaaagcggngttnnaaaaccccngtttttttccctttttgggggggttatttgggccgtgtggggtatggggggtttgagggggtttggggggaaattttgtt

SEQ ID NO: 28377 - DNA, 661 bp, Glycine max
  Clone ID: TF_GmC1241_3
ttattcggctcaaagaaaaactcagcacaacacccctcccaaccctctttttctcttaatttctcatcatatcatatctattaatcttacacatatattaagacatagatataatttttttcgttttatttttccttgcatgggctgttaagataagatgtctcgcacgtgctcacagtgcggcaacaacggccacaactcgcggacatgcaccgacggtggcgccgccgcttcctgcggcgggtctcccagggagaacggcatcatgctgttcggcgtaagagttatgaccgaagctaactcctccttccggaagagcgccagcatgaacaacctctcacagtacgacgcggaatccaacgccgccgacgccggctacgcctccgacgacgttgttcatgcctccggccgcacgcgcgagcgcaagcgaggtgttccttggacggaggaagagcataggttgttcctgttagggttacacaaagtcggaaaaggagattggagaggaatttctcgaaacttcgtgaaaactcgcacgcctactcaggtcgctagtcacgctcagaagtacttcctccgccgccacaaccagaaccgccgtcgccggagatctagcctcttcgacatcaccacggatacggtgatgggaatcttctactat

SEQ ID NO: 28378 - DNA, 462 bp, Glycine max
  Clone ID: TF_GmC421653_1
tcctaaatccaatgttagctagctagctcttttaagccgtgttctcgccctatataaaccaccttctctatcacacgcttgcgtgggcggacgcgtgggattttttcacaaccacctctttcaattctctcctctcttattccaaattcaaattagaggaaaaagggtcaaataataattaagtgtaatatggatacgatcagtgttcaggcgatgagaagcttatcagatagtgactcattatcatctgcaacatatgcaagtgaagaagatatgaaaattaagaaaggtccatggactgaggaagaagattctgttctgatcaactacgtcaacttccaaggcgaaggtcaatggaactccctcgctcgctctgcatgtctaaagcgaacgggcaaaagctgcagactgacatggctgaactatttgctaccaaatgttctacgtgggaacattaccctt

SEQ ID NO: 28379 - DNA, 471 bp, Glycine max
  Clone ID: TF_GmC142751_2
tctttctttacctattctctcccgtctcaaacattttctcctccatctctcgtcagattcaagatataactcattgagcaaagtagcttataaaatttgctcaacatttattagctcatcaaacagaactacttaattagctagctagcagtatgggaagagcaccttgttgtgacaagaatggtctcaagaaagggccatggacaaccgaggaggaccagaaactcattgattacattcagaaaaatggatatggcaattggaggacactcccaaagaatgctgggttgcaaagatgtggaaagagttgccgtctccgttggacaaactatctccggccagatataaagcgaggtcggttttcatttgaggaggaagagacaataatgcaactacgtttcattcttggaaacaagtggactgggattgcactcgctttccaggaaggatccacgatgaaataaagaacta

SEQ ID NO: 28380 - DNA, 1192 bp, Glycine max
  Clone ID: TF_GmC850_1
gcagcaacaccaaaaccaaaaaggcaatatgggcagggctccttgctgcgacaaagcaaacgtgaagaaaggtccatggtcaccagaagaagatgctaagctcaaatcctacatagaaaagcatggcactggtggtaactggattgctttgcctcaaaaaataggccttaagcgttgtggcaagagttgccgccttaggtggctaaactatcttcgccctaatctcaaacatggtggtttctccgtagaagaagacgacattatttgcagcctttacgtcagtattggaagcaggtggtcggtgattgcagctcaattgccaggaagaaccgataatgacataaagaactactggaacacgaggctgaaaaagaagcttctggggaagcaccgaagagagccacgtaatagagggaattacaacagtgttaagcaagaaaatgatgttaatagagggagtggtactactgatggtgattcttcttccttatctttgcttcaggaaaatggtagcactactcatcatcaagaacaacatcaacagcaaccatgttggccacagaatattaataacatgcctgtgctaccactacaagtacctttgccatacaaaaaccaaggtccatgttttaacgaccaagattccctcaaaaaactccttatcaaactcggaggaagattttcaggtgattcttaccatcctacccttgatggcttgaaccttgaattctcatcacatgggcaacaaatttatcaagaacaagtccatgttggctcttctgctgcttgcattagtgccactattaacaacaacaatgaggtacaatttgcacaaactggtcaataccctggagttgataacttggtgcaagggcaaggtggtaatttcactccgtcgtttgaggaaatggtgtcttcttctaattatccagatggtttagagttcttgtataatgagggcatgatcgaccataagataatagacactactactaccacaacctggggtgaaactagcactccaatttatcatcatcatgattcacttgcttccacttaccaaggtcaaggtgtgatacaagaatgtgttttgcaagattttagctaccccagggcacaataacatgatcttgtacatattttgttatttttatcattattaacagctgctactagccatttatcacaaaaa

SEQ ID NO: 28381 - DNA, 1415 bp, Glycine max
  Clone ID: TF_GmC1872_1
acatgctcgcgtccgttaagaagtttcattcggatcgtgagagaggttaagaagttttctagagttgttgtttgatagagaaagagagaaaatgggaagagctccttgttgtgacaaggcaaatgtgaagagaggaccatggtcaccagaagaagactcaaagctgaaggattacatagagaagcatggcactggagggaattggattgctcttcctcagaaagctggtctaaagagatgtggaaaaagttgcagattgagatggctgaactatctaaggcctaacattaagcacggggaattctccgatgaggaagacagaatcatttgcagcctttatgctaatattggaagcaggtggtcaattatagctgctcagttgccaggcaggactgacaatgatatcaagaactattggaacaccaaacttaagaggaaactcatggggttgcttccttcatctcatcaaagaatagcaccctatcaacaattctcctctcaaaacccttcatcatttccttctcactcatcgctatcctcttcacaatatagggactactactacaactcctctcatcattattacatcccagcaccaacctcatctttcacatgccttgaaccaatttctgctccttcaagtaattacacaaacacaacaacaacctccaactctctctctttttaccaacaccaagagcccttggtcagtgttagtcccaggcagtattaccccatcacagacagttccatgcttgtgtttggtagtgaaacaagttgcagctcctctgatggaagctgcagtcaggttagccttggcagagagatcaaacaagaagacatggggtttcagaatttcatgtttggagatcatcagaacatgaacaaattcatgaacattaatcatgatggaggtgaagaatatgtgaaccaatggacacagaggccaaacgggtacatttttcagactcaacaaacagcattggattatgatcttgaggtcattaagaacctaatttgtagcaacagcagtagtaatagtaataatgggtacttgagtgttgatgaaaacaagacggaggagaagggtgtgtactacaactactgcaactgaactgagtgcaactgatgaatgaactgactactgcaagtgatatcagagagatatgatcagtgagaagcatgggattgggaagattcagaaaagactttgaggttgtgtggagttctgtgttgtgttctttaatgaaatgagataattcttattttgacagtacatggtaaaagcttctttatatttttgtgtatatcccctaggaagtgatgatttgatgacgatgatgttagattttttttttgttaattaagtattctctccaatcagatattaatgttgtgaaaaacagccaatgtcc

SEQ ID NO: 28382 - DNA, 1122 bp, Glycine max
  Clone ID: TF_GmC482_1
ctcgagccgcttctggcttctgctgttaataacaaaaaaaaaaaggaagacataataacaaattatgcttatgatgattgatttaatgaaaaccctagttattatcagaaaaattagactcaatctctccacacacatatataaacccaaacaagtgaacaacactccctcctttgtcccattactagtacatacattcccctaaccaagttttaagtttttctcaacagaatggaagcaaccaacagaagctcttcctccacttcctcttcctctgattgctgctcttccgagtccaaccccaacaagcccgacagaatcaaaggcccatggagcgccgaagaggatcggatcctgaccggactcgtcgaacgatacggcccacgaaattggtccctcatcagccgctacattaagggaaggtccggcaagtcatgccggctccgatggtgcaatcagcttagccccgccgtggagcaccgccccttctcggcccaagaggacgacaccatcatcgcggcccatgcccagtatggtaacaggtgggccactatagcccgattgctaccgggccgaaccgataacgccgttaagaaccactggaactccactctcaagcgcagagccaaaggtattaacattaatgttaatcacgccaacaacgaagtggctgcttcttcttccgctccttctcgccacttcgacttcgaggatgatccgttgaccgcgttgactctcgctcctcctggtattgctaatggcactgtggcggaggacgccgtgccggaccatcgtgcctcgccggaggggttttgggatatgatgagggatgtgatcgcgagggaagtgagggaatatgtgtcttccaatttttctgataactcgggttttcattaaatcaatcataatcataattgttattatgcttcttcttttttctttttttttttttaactttaggcaaattattctgcaatttgattttgccttactggactttggaatcggatcagagaattaaattaaattagacccttctgacttttgctattcataacaattttctcttccggcgaatcatacttcgttttctagctaaaaaaaaaaaaaaaaaaaaaaata

SEQ ID NO: 28383 - DNA, 1692 bp, Glycine max
  Clone ID: TF_GmC651_1
acggctgcgagaagacgacagaaggggacacttcaacaaaaaaattacaaagcacgagggtctcgtttagcaacttgtaaaggacacaacagcatcacttacataacatgcacttccccttctccaccgcattctgtgttctctagtcaatagaaagtgagcactgaatttgctttgtgccgttcctgttttcttataatttgtgcatttttttgcacataaacaaaacccatgggaagggctccttgttgtgagaaagtgggattgaagaaggggaggtggacagcagaggaggatgagatcttggcaaaatacattcaggccaatggggaaggttcttggaggtcattgcctagtttggaaggattattaaggtgtgggaagagttgcaggctgagatggattaactatttgagagctgaccttaaaagaggaaacatttctgctgaagaggaaaataccattgttaagttgcacgcttcttttggtaacaggtggtctttgatagcaaatcacttaccaggaagaacagacaacgagataaaaaactactggaattctcacctcagcaggaaaatttacagtttcccaggtgcaggtgcaggtgcaagtgcagggatcatggatacacctaaggtagtatatattcctcccaagcgcaaatgtggtagaacaagtcgttgggccatgaagaaaaacaaaacatacacccaaaaagtcaatgataggattaaccagagacacacacaaattggtttccctcaacagaacagtgacaccgcagttccgacgccaccaactccgtctctagagagtgagggtttgtcaaacgccgttaatgacttcaaggtcctggacggtgacgtggcagagtttgatgagccgagaacggaggagctggaggcggaggtaaataaacgtgacaatagcgttggaggcgtggaagaaagtagtaataccgatgaagacatcttgggactgtgtgaactagagggcattaatgaggacagtgggatgttgttgggttttagtgacattttggaaagttgccttgcggaaacaacatgtggggtttgggacataagtgaagagagagaaagcaatgacgtggtggcggctgatgcttgtcgcgacaaaatagcatcgagtgaggaagggtcatgctcttccatgaatcaagactgggactgggagagcgtgttagagtttagtaacgctgttgataattgggaggaccaagacaaattgctcacttggctgtgggaggacgatgactgcaagagattgggagagacagatactcagatactacaaaacgacatggttattgattggtttctctcttgattcatccaagaataaaataggcttagtgtgtgtgcccccttggtcatgtttctttaatctgttcttcttggattgattagggaatgtgtaaacttaataaatactttttttagttacttatataatcatccttaagacacactagttaggaatactcttttccttttactttaatttgcatgtcacatgattcgaaaatatcatgcagaagaattggaccagacattagtcactgtagcattcctaggttgtttgaaaatatggatcttattatatacgagttagagtttgatttttttataattaatttatagtacataaataaatatagaattttctgtgata

SEQ ID NO: 28384 - DNA, 1250 bp, Glycine max
  Clone ID: TF_GmC1386_1
cgccaccttaaatataacaaatacttgtctggtaaatgtaagttttatcctcctatcctcttcacaacacttgacaaagtgatgatgagaacaccaataagcagtgatgaaagtggtttgaagaaggggccatggagcccagaagaggacaaaatattagtggatttcattgagaaacatggtcatggaagttggagagcccttccaaggcttgcaggcttaaacaggtgtggaaagagttgcagactgaggtggactaattacctcaggcctgacatcaaacgcggaaaattctctgatgaagaagagcaactaatcatcaatttacattcagttctcgggaataagtgggcggctatagcatctcatctgccagggaggactgataatgaaataaagaatttgtggaacacgcatttaaagaagaagctaatgcaaatggggttagacccagtgactcaccgtccaagaactcatcacctaaaccttcttagcaacctacaacagatattggctctaattaggttacagtcagatgctaataaactccaattattgcaaaacatatttgaagcctcaaactcagacccactgccagattcttcttattctttgctaaatgatgttttgggggggttgaataatcttcactccaatgatctccataacctttatgatggtaattcactttctgtccaaaactttgatcagaacttgaatggtggcagaaacgctgagccttcaccgtcatcaaactcgcttccaaatctggtttcagcctcacctgatcgttccccagttgttaaggaagcacaaaacatattggtaaactcgaaggacttttccacctccgcttttgagttaacgtggggagatttcatggatgaagaagaaacaaaccagacttattggaaaggttttatggaccaacattctaaccagacatggtcgactttcccatgatcacggaatttgagagctatcacagcaataacgggatttattcgctgttctatctataataaaaaaaaaatatactgttcatttagttatatataatggttggtttaatttgtatgtattatttgacgatggattgatttcagatccaaatatagaaagctcttgtattgtatattaaatgtacaacgtggaaattaaatcaatcatagaatagaggcctatgatgttctttttctttgtataaactatactataaaataaaatgctgtttgtaggctttccttctt

SEQ ID NO: 28385 - DNA, 1471 bp, Glycine max
  Clone ID: TF_GmC1766_1
gcacgcgggacgcgttccgtctcaaatatctggtatacgtttcgccacaaattccgcgattaacgctcccccaatccctttctctctaaaatctttgaaaatggtatccaaaaacccgaacccgcccgagggattctacttggatcccagtggtggcatgcctcttcctgggatgcctcccttcgcctccgtctccgccgcaaccgctgcgaactcgccggaggacgccgccaagaagatccgcaagccctacaccatcaccaagtcgcgggagaactggaccgaacccgaacacgacaagttcctcgaagcaattcaactgtttgatcgtgattggaaaaagattgaagcatttgttggatcaaagagtgttatacagatacgtagagaggcacagatatactttttaaaagttcagaagagagggacaagtgaacatcttccaccaccccggcctaaaagaaaagctgcccatccatatcctcaaaaagcttccaaaaatgctcctgtactctcacaggtatccggacgttttcagtcttcatctgctttgcttgaacctggatatatcttgaagaatgatgccccaccaatgcttaaaactcctattatgaacactgttgcgtcgtcctggtcgaacaacaccttgcaaactgccaatttatctcctgtgacaaaagtgaataatccttgcagtagcggtgaaagcactcctaaagtgtggccagttggtgaatctaatggtcaagggaataaaatccatccattgagagttcttccagattttactcaggtatatggcttcattggcagtgtatttgacccaaatgcaactgagcatctgcagaaactaaaaaagatggaccgcatagatgttgagacggtgctactgttaatgagaaacctgtccatcaatttaactagcccagattttgaggatcatagaaagctgctttcatcatatgaagttgaaccagagagagatgataactatcaacgcggatagacccatgcacgatgagcagttgaagagtgctaatgggatggaggcagaaaatggcttcattttccaccgattggatgcagtcagggtgctattattttccatgatgtgataaagatactgatggtcatggcaaggcaacaaactgaagacgtttgagtcacagctaatttttattctgctctagatttttattgctgttgctcgtcatcttagctatgcaaatcataattgtcatcattcattattatgtcatgtatatatgaatcagcctattaaaaagaaaataataatctgagattgtatagttattttcctagttctttgtaggtctgcacagaacctcataattgtgtactaaattcagcaaacacaaatatttgaacggaatatattctagatttgtgtaggtctgtacagcacctagatttgtgtgttaaattcaaccaagcatcaaatagttgaagc

SEQ ID NO: 28386 - DNA, 1479 bp, Glycine max
  Clone ID: TF_GmC205_1
gtcgagtgaaggcaagcaaaaataaaaatcaaagagcatagggagaaatatctcgttgcagattggcgtcgcgccccggtgacgatgaccccaagtacagatcaaagagaaaaagggcttcagagggggagaaatgggtcggtccagagttgcgttgcgctccgctgacgatgacccaaaccacagatcaaagagaaaaaaggctgctctgaatgtagaaaattcagaaaccttacctacaggccaaggagtaactactagcaaggtatctctctatcactgcaattattgtaacaaagatatttcggggaagattcgcatcaagtgtgctgtctgtcaagattttgacctctgcttagagtgcttctctgttggtgctgaggtgacacctcacaaaagcaatcatccatatcggattatgattggaatgcagatgaagagttgttacttctagagggcattgaaacgtatggatttgggaattggaatgaagttgcagaatatgttggaacaaaaaccaaatctcaatgtattgaccactataatgctgtatatatgaattcgccatgttttcctctccctgatttgtctcatgttatggggaagaacaaagtggaactctgtgccatggcgaagggacatgaagccaagaaagaattttctctgactgcagagcttactctgaaagaagaagctttgttcactgatcgaataaactatgaagaatcaaagaatgcagaaatcaataatcaaactatgtctaggttaacctcagcatgtggcaaagcttacccaagtacaattaagaaggcatccaacgtgatccaaaataatggtggagttaaggtggaagagtctcgagcagattggagcattggagagaagaaacctaaattatcaggcgaagataggccttctatgacagatttgagtggatacagttttaagcgagaagaatttgatgttgaatatgacaatgatgcagaacaagtgttggctgatatggaatttaaggacactgatactaaagctgaatatgcaatgaaactgcacgtgctccatatctactcaaaaaggtaaccacagataagtggatgaatattattgatatgggttatgtgattgcatcaaggtatttctaagcaatggttgtctcatgttgtcaacaactttgttatggtcaacacattgtgattatcaagcaaaacagtggcctactccttatattagttgaatgtaccagtatactaattacatgaggttgatcacacaacatgttgatttaagagaagattgaacattttgttattgtttgaataacttacatagttatgacaacatggataatgcatgtaacactttctaatcatatttgtataatgaacacaatgttttcgatcgaacataatagtcaaatacaaaataaacgcaaatgttaaccacagtcaaatacatagtcaatcaaataattaaagtatt

SEQ ID NO: 28387 - DNA, 730 bp, Glycine max
  unsure (1)..(730): unsure at all n locations
  Clone ID: TF_LIB4198-004-Q1-K1-G1
ggtccggaattcccgcggtcgacccaacgcgtccggnaaaaaaatcatgaaaagagagaaaagaagagagggagatagatatattatagctagctagatagagattagaagctatattattatatacataaagttatattatttatattgaactaaaagaaagggtacaagggaaagatgggaaggccaccatgttgtgataaaggtgtgaagaaaggaccttggactcctgaagaagacatcattttggtgtcttatattcaggaacatggtcctggcaattggaaagctgttcctgccaatactggtaattagtgaattaatcttcttccactcatcatgtgagattttaatttggtgatttttgtgatgattgcatattcaacttttttgtgtcttttcttagcaagttagggaaaaaaattctgaattattgtttcatacangctgtgatctgaaattaatggtactctctttttggtttggttttcagggttgtcaaggtgcagtaagagttgtagacttagatggactaattacctgaggccaggaatcaaaaggggtaacttcacagaccaagaggagaagatgattatccatcttcaagcacttttagggaacaggtaaattcattttatagcttcttaaagttctttntttgccataaacccctagttatggaatntggcataccatattatatgataataacacatctttttaatataaa

SEQ ID NO: 28388 - DNA, 859 bp, Glycine max
  Clone ID: TF_GmC1378_1
aaagagctgcagattgagatggattaattatctgaggccagacctcaagagaggtggatttactgaaatggaagaggatcaaattatacagctacattcatgtctaggtaacaggtggtctaagattgcttcacattttcctgggaggacagacaatgaaatcaagaaccattggaacacaaaaatcaagaagaggttgaagctcctaggtttggaccctttaaccctgaagccatctgagcaaaaggaaaagtctgttgatgacaaaaaaaatatagaattacaaccaaacacttcaaaagggtctgaacaaggtgtagagaacaagtccttagatatgcatagcacaagagaagtgccaaaaacagaagggaaaatagaagaaaacaaggtgacttgggatgataccactggatttttcaacaattatgaaatgttgtgctcacagttggacttgggatcatggatgagccaagaaaccaaaaccagcactagttcttattgtagttcttctttctcacttgatgattctagcaacctttctgtgggtgaatcctcttaccttcaggaaaattccttacaacaatgggttgatggtttggattccattttgtcatgggatagcttcaatcctcttgagaaagattttctcttcttggataataggcaatgagcacaaccacctcatgaaactgcacaatttttacaatctctcaatcaataaaatgttacaacatttcttgtgtagaatactgccactgcttttcttaatgtgattccatattgttgaatgtgaattggatattttgttattgcttgttcatccatattatatgaattaaccaagttgaatgaaaaa

SEQ ID NO: 28389 - DNA, 1232 bp, Glycine max
  Clone ID: TF_GmC314_1
tgtcagtacgtccgcccacgcgtccgaatcggctccaaacccacgagtccgcaaaacaccaccaccaccacctcgctctcttcttccctgcttcacaatttttattttaatgatactattttgttattgttaagacggcatcatcagggaaatggatcgggtgaagggtccatggagcccagaagaggacgaggctttgcggaggctggttcaggcccacgggcctcgaaactggtcggtgataagcaagtccgttccgggacgatccgggaaatcgtgccgcttacggtggtgcaaccagctctcgccgcaggtggcccaccgccccttctcgccggacgaggacgaggccatcgtcagggctcacgccaggttcggcaacaagtgggccaccatagctcgccttctcaacaacggccgcaccgataacgccgtcaaaaaccactggaactccactctcaagagaaaaaaatgttccgccgttagtgacgacgtcaccgatcgtccgcctcttaaaagatctgcaagcgtcggcccggcccatttgaaccctggcagcccatcgggctccgatttgagcgatccgagcctgcccgctctctcaaacccctccccctcggcccattacaggcccaatctcatggaaaccgcttcttctgcttgcgatccagccacgtcactgagtttgtctctccccgggttcgggtccgggtctaacccagtttgcgcacctcgaccggtatcggtgtctccgccgtcaccgcctccggcggagccggtggagcagcgggggaagcaaatgttcaacgcggagttcttgagagtgatgcaagagatgataaaaaaggaagtgaggagttacatgtcagggatggaacagaagaatgggttcagaatgcaaaccgaagcgattgggaacgcggtggtgaagcgcatgggaattagcaacatcgagtgaagaaaaagaaaacggtgtcgtttcgagattcgaatcaagccaactggcacatgaatgatgatgaatcacaagagtaggagaaaagtgagaaccgagaatgggaaacggtgttttttttttttcaattttttattttattttgtagttaactttaaattttaagtttaatttccctttacttaagggtaaaaaataggtaataattttggcactgtacagaacctcagaacagaagtaaaggatgataatcaatcaaatagtgctttttcctgtt

SEQ ID NO: 28390 - DNA, 1567 bp, Glycine max
  Clone ID: TF_GmC145_1
caggtaccgtttccgggttccacggtcgacccacgcgtccggttagttagaaaaagagagagaaaaaggaaagaaaataaaataaactgacagtaacagatagcgaaacaaccaaacctacaaccgccatgaccgaagaagaccgctccgcccaggaaaccgtccacaatggcgtcgcctcgacggagctaggcggcgaggagatggacatcgctgaggtgacggccgccggaagagtgaagggaccgtggtctccagaggaggacgcgctgctgagccgattggtggcgcagttcggtgcaaggaactggagcatgatcgcgcggggagtgccgggacgctccggcaagtcgtgccggctccggtggtgtaatcagctggacccttgcgtgaaacgcaagcccttcactgaggaagaggatagcatcatagtttcagcccatgcaatccatggaaacaaatgggcagcaattgctaggcttcttccaggaagaacagataatgcaatcaagaatcactggaattctacactgaagcgcaggtgtatggaaatgggaagatatgtcccagcacatgctgatgtgatggaagatggtactggcagctttgataaaacaaaagcatcctctgaagaaaccatgtcaattggggatatcaattcaaagaatcctgctgaagtcagaaatgtcatgatggataatgaaaataaacctccaacaaaagatgatgctaaagtggaggaacatcctactcttcatcgaccagtagcacgtgttagtgcatttagtgtttataacactccaggaaggtcaacaatgggatcatgttcaaagatgttcccaaggcagagccctttgatccaatcccccaaaccagacgtaggatcctgcaagttatttgatgatattgattgtgagcccatggttccatcacaatgtggtcatggctgctgcacaggagactcgagggaaagccattcgcatggttcacttctaggtcctgagtttgttgactatttggagtcaccttcctctagtcatgcatttatttctatagctacagacttgaacaatatagcttggatcaagagtggccttgagaattgtagtactggagtaactgagaatactgcaaacttgacagcatctcgaggagttgccagtgctttgcaaacaaacttcttaggacaagatctaaagaatggctacgggcaatttgaggagggacatggcatgtttttgggtgcgatgcaagaagtgttgtcaacaaagatggctaggcaacattatgcaatgcctgcggaagtttaactctaacttaaggttcctcaattggattttttattttttattttgatgtgcaagtggatttcaatcttagtttgtggcattttgtggtgggtggatagatagatcatagatggtataagtttgtttcactacaatcaagcgcaccgtgtagagtgagtagctcttttcggttttcattgacttgcagagttcttgaattgcatcttggtaactataatctgaaaatatatataccaaattaccaatttgatcttgtt

SEQ ID NO: 28391 - DNA, 1224 bp, Glycine max
  Clone ID: TF_GmC5794_1
ccgcgggccgggttcctaccagggcactctcactctcctttatacacacacataacacagtttggttttgatttgaggggggaggggtgagaaaacaatctttgttgttgagtgaatagttaataatggggaggaagtgctcacattttggaaccatagaccataattcaaggacatgtacatctttgagagggactcctttcgtaggttcgttggacttcggctcttaagcggacacttagtcagtactaatcgtgttaacattcaagaaaagctttagcatggacatccttaccctcatcatcatcttcctcattctcttcaatcaagactaaccattgatgaaaatttttggggtatcccttagatggtctctcacagatggcccaagagaggaagaaaggagtgccatggacagaagagcaacacagaatattccttgttggacttgagaagctgggaaagggtgactggagggggatcactagagacgaagttcttaaaactatcccaccacaagaggccagccacacgtggaagtccatgctcaaaattacttccttagattggaaaaaatagataagaaaaatcgacgtctaagtctctttgacttggatggaagcaacaaagtatattctaattctattacggatcatcatgataatttctcactgaatgaatgataaatgtttctctttaaactgaaaagtaatttacgtttcttttttacttttcctttgtcgttgaattattgtggcaggttggtagcaacaaagcaggttctaattcattttcggctcatcaaaaggatgagtctaaatgtgaagttaagaataatgatgctgccactttgtctttgctagggcgtataacttactttcaacaagaaaacaaatcatcagagtataagcaagaaacatttgataattgctcatatcaaagtcaaccaggtgaagagcatcaagtcgcagttcttaatctggatctcactcttgcagcccccaaggcaaagaccctgcaggaacaaaataagtcatctccttctgctccatttctgcttgggccaattagcgtgacttaaactgtgtcaagtgttatatatattaattgtattaggaatgtacccttttatctgttgtcaagtgtcaactcgtgtagaagatcttcaggtcaaagaaacacattgttcattgcagtaatagtagtgactagtcgttattaatt

SEQ ID NO: 28392 - DNA, 1513 bp, Glycine max
  Clone ID: TF_GmC900_1
agttaaaatcactgcctctcgttcccactcaaacttagctagcgcaacacaagcaacaaaacacaaacaagcgaacaatagttcacaactaaaggaagaggttgttgaagagatagagatacatagtgtttgtgttagtgttatttatggtgtccctcaacctcaacccaaacccacctcaaacttttcacttcttcgaccccttcaacatggaggatcagaataagaaggtccgaaaaccttacaccattaccaagtccagagagaactggaccgaccaggagcatgacaagtttctcgaagctcttcacttattcgaccgtgactggaagaagattgaagcatttgtaggttcaaaaacagttatccagataaggagtcatgcacagaagtatttcatgaaagttcagaagaatggcacaagtgaacatgtacctccccctcgtccaaagagaaaagctgctcatccctacccacaaaaggcatctaaaaatgctcttactatatcccaagttgcgcggccattgcaatcttcatctgctttatctgaatcatcacacatctataggccagattcatcatctgtggttagaactccagttaggcagtgtggccattgccatcttggggttataatgttacaccactagtcagtcttccccgagtgactaaagatgatatggtgttgatgagtcaacaaatcaatcctttcagcagtagtaatgagaacactcctaggggttggccaattagcaaacagacagatcagggtgaccaaggcaagccaactatagtaatgccagattttgcacaagtctatagcttcattggcactgtatttgatccaaatgcaattaatcatctacagaggctgaaacagatggacccaataaatgtaaaaactatattgctattgatgagaaacctctccaccaatttaaggagtcctgaatttgagaatgaaagaagggatgctgtcattgtactatgctaacatggagaaggaaaaatccagtagtcatcgaagccaacccctcacttgacagatcagagagtgttgtcttatctgcttaaggtgttaccaatggtttatcaggaacatagtttttaaatatcttccaaaaacacaataagctttcctctcagctaccactaactccaaatggtgaaatatggggcacaagaggggaaaggattacaggttttactaacagcttgtaggttgcagatacttgcatgtgtgcatgcgtgcacgtgtatgtagtttactgtcctttaggcttatgtgtgtatcttatgaagatggttgtcataggaatgcaggataatgagtccagagtcctgttaaggtaacctggaggctgtactgtacagaatattgagagcgtctgtgtgtaatgttgtgatggttttttctacaatttagtatacaagagcggtgctatgatttaggaggtgctacctgtgttgtatataaaccaaaagcaataaagagcatatataaattgtgatt

SEQ ID NO: 28393 - DNA, 499 bp, Glycine max
  Clone ID: TF_GmC953290_1
acgagcctttcttagtctgcggggttttctctttctagagaatccaagcctaccattgaagtggaattctgtgaggctaagtaaaatggggtaccagccattggaaaagggaaaaccaaaacataagaaggggttatggtcacctgaagaagacaacaaactcagaaaccacatccttaaacatggtcatggctgttggagttctgtccccattaaggcaggcttgcaaaggaatggaaagagctgtagattaaggtggattaactatctaaggccaggattaaagagagggaaattcagcaaacaggaagaggagacaatcctcacccttcaccacatgctaggcaacaagtgggcccggatgtctcagcctttgcccgcttggtcagtcttcgagagtttcaccttttggcgctcgttgttgcggaagagggtggccttggctttggcagtcgaatctcttgaccaagtcttgtctgctagctcaagctcagatact

SEQ ID NO: 28394 - DNA, 1298 bp, Glycine max
  Clone ID: TF_GmC100_1
gaaaacgtagacatcagtttcaagttagtttgtgcaatatttattcattgacctgatatttttctgaggaagttgcccttaagaggaagtacaatgaggaagccagaagcgtgtaataataatactaaaaacaatagcaacaagaagcttagaaaggggttgtggtcacctgaagaagatgacaagctcatgaactactatgctaaaccatggacaagggtgttggagcgatgtggcaagaaatgctggcctccaaaggtgtggcaaaagttgtcgccttcgatggatcaattacttgaggcctgatcttaagagaggtgcattctcaccccaagaagaggaactcatcatccacttccattcccttcttggaaacagatggtctcaaatagcggcgcgtttgcctgggcgaaccgacaatgaaataaaaaacttttggaattcaacgataaagaaaagactcaagaacatgtcgtccacgacgaccacaacctcaacctcaccaaatgcaagcgagacctcaatatccgagcctagtaataaggacctcaacaacatgggagggtttatttccacactacataataaacatgcaggttttgttcctatgttcggttcatctccatcaccatcaatgatgcaaaccagtacagttttcaataacatgattgaaaggtttcctatgctggagcaaggactgattaacatgccagcttctggagggtacttcgaaggcacaggtagtactccttgcttttcgcaatgtgaagttcacaacaataaaggttcttgttatttagaaaacgaagtgtttgagagtgtaaatatcggggtagaaggggatatgtttgttcctccccttgagaatgttacatgcaagagagaagaaacaactaacagcagttactttgacgatgacataaatagtatccttaataactgcaacaatattggcatagctgaaaataaggctcatcatggggtggagaatttgtttcagcaagagttagccactgccacaggagaatgggactttgaagagttgatgaaagatgtttcctcctttccatttcttgatttttcatactgatcaatgaaccttatttggcacactgcagggtgatatattcttcacatagagccttgtataatagtatactggtattttttacccttataccgaattcacaagttaacaatcaggtataggcctcaaataaaagtccaatatatatatatatacatataaattcttgggtatccattggtgatcgagtatttagtcttgcagattagtt

SEQ ID NO: 28395 - DNA, 585 bp, Glycine max
  Clone ID: TF_uC-gmflLIB3275P058b05b1
cccacgcgttcgggcagtggcggtagcggtggcagaagcggtggtgatcagggtggtggcaatgtggaggatgtggctctgaagaagggtccttggacaactgcagaggatgctattctaacggattatgtgacaaaacatggtgaagggaattggaatgcagtgcagaggaacacggggttgaatagatgtggcaagagttgtaggctcagatgggctaaccatttgaggcccaatttgaaaaagggtgcattctcacctgaggaagaaaagatcattgttgatcttcattcacagtttggcaacaaatgggccagaatggctgctttgttacctgggagaacagacaatgaaataaagaactattggaacacaaggattaaacgccgccaaaggcagggtctccctctctattcagatgagcatgatcataaccatcgttccacaacaccaacctctaccaccacaccttccccatgcctgacaccaacaggatcaaaccccaacattgccacaagttttgagttcttcaatcaaaaccaacaacaacaacaacaataccaacaccaataccaataccaaaca

SEQ ID NO: 28396 - DNA, 1604 bp, Glycine max
  Clone ID: TF_GmC6801_1
cttccgacggctgcgagaagacgacagaagggggaactctcgcaagcttgttttcttgccttctttttctcttattctctactacaacattttttttgtgtgaaatttctctacaactaaatttccatataggctgcaagaccctcatcaacctacaattagtttgttacatatatagctaggttgaacaatatgggaaggtcaccatgctgtgagaagacagggctaaagaaagggccatggacaccggaggaagaccaaaagctcattgctttcatcgaaaagcatggccatggaagctggcgtgcattgcctgcaaaagctaggcttagaagatgtggaaagagttgcagacttagatggtcgaattatctccgacctgatataaaacgaggaaagttcagcttgcaggaagagcaaaccattattcaacttcatgcccttctaggaaacaggtggtcagccatagcatctcacttgcccaagagaacagacaatgagatcaagaactactggaacacccacctcaagaagaggctggacaaaatgggcatagacctaacaacccacaagccaaaaaatgagtccctagcctactccaaagacggctcgaaccttggccacatggctcagtgggagagtgctcggctcgaagccgaagccagactcgtaagagaatccaaactacaagaacaacaaaacaacctcggacctatgtcctctccttcctcaacacaaattacgaggctcgttctcaacaaaatcacacccctacaacaaaaacaacactcactaccaccgtgcctcgacgtgctcaaagcgtggcaaagttcatggtcaaacaacaacaacaacattaacaaatactcatcactaaacgacaagaagaaaaccatgcatgtgcgtagcatgtatgccatgatgctttcaaatgatgacctagagtctccaacatccactttgtgcttccccgagagcgtgcaaatgaataataataacaataactctaacgctatggtctcaaccgaccaccttgggttaatcaatgagaactatttactccctccaaccaccctggatgagttcattattaccaaaagtttaggaacaacaagtagtgagggtgcaattgaaaccgtgaatggtggtggtagtgactcgtggaggtacttcaccaaacacaacaatgaagaagaacaagttgaaactgatgagaagacaataatgtacgacacgatttcatgtttgcaagacgatgacggtgatattatggtggctgttgaggcattaagaggtgctggttattatgatgatgataataatagcaacaataataatgtcacatttacgcatctctctagcaatgtcaataatatggtgggtttcgaaaacgattttgattccaatgaagatttagcggcggtgaacttgcatgtgaacttcgaggagaataaggattattggaatggcatgcttaattagttagttataagtgaacaattttcctagctagctaccatgttatcatatgtagtacgtttgtttgtttcagagaaataatacattccttttgtcattcttcgcgaaaaaaaaaaaaaatatag

SEQ ID NO: 28397 - DNA, 1745 bp, Glycine max
  Clone ID: TF_GmC596_1
ggctcgcgatcggcgaaagccaagggtcaccaaaaccatcatcataacccaaacccaacccaacccaacacaacacaacaccacctcctatcacataataacaaccttaaccttaaccttaaaccccccaattttcatgtctcggatcccgtgattcggatccccaacaaaaaaagaaacctcgtatttgttattttcgtcggatccggttgggaacgctcatgacgcggcgttgctcgcattgcagccacaatgggcacaactccagaacctgccctaaccgcggggttaagctcttcggggtccgattaaccgacgggtcgatccggaagagcgccagcatgggcaacctaacccactacgctggttccgggtcggccccgctccatgtcgggttgaataacccgggttcacccggggagacgcccgatcacgccgccgccgccgccgacggctacgcctccgaggacttcgttcccgggtcttcttctagctcccgtgaaagaaagaagggtgttccatggactgaggaggaacatagaatgtttttgctcggattgcagaagctgggcaaaggtgattggcgtggaattgcaaggaactatgttatatcaaggacgcctactcaagtggccagccatgctcagaaatatttcatcaggcaaagcaatgtgtccaggcgaaaaagacggtccagcttgtttgatattgttgcagatgaagcagctgacactgcaatggtacagcaagacttcttgtctgctaatgagttaccaactgaaacagaaggcaataaccccttgcctgctcctcctcccctcgatgaagagtgtgaatcaatggattccacaaactcaaatgatggagagcctgccccatcaaagccagaaaacacacatccatcttatcctatgttatatcctgcgtattattctccagtgttcccgtttcctctgccctattggtcaggatacagtccagagcccaccaagaaggaggaaacacatgaagtgctgaaaccaactgcagtacattctaaaagccctatcaatgttgatgaactggttggcatatcaaaactgagtttaggggagtctattggtgactcgggtccctccaccctgtctcgaaaacttattgaagaaggaccctctagacaatcagcttttcatgcaacaccaacatgtggtgatatgaatggcagtgccatccatgcagtttaagcgtgtgcctcgtgttccgaggaagggattgttatgtgagcattatggatcaacttggggcctgcatgaatgtggtcttgtgttcatcatacatctgtttgtggggtaacctaaataatttttttctttgcccattcacagtgattaacctagtttgtttatttgctggtagcagtagcgtctaggagttactttgggtctctaaactaaaactttatgtttgtccagtgattttatttgtcagggttatgtaaagttaatgttgattgtgcagtttgacaatctacctagtaccaagttgtgcttcatgtttgaagtgctgtggattaaaatgtttgaagtgctttagcccctcaaacccgggtctctcctgaattaacccagtgagacaggaaatcaagagcactgagctgcttgctagggtttgaaatgggttgagtttttttttttctccttcaggtttggttagtttttataaaaaacttaatttgggcttggaaattaattttaaagatgtcaatt

SEQ ID NO: 28398 - DNA, 483 bp, Glycine max
  unsure (1)..(483): unsure at all n locations
  Clone ID: TF_9565839
accagcagatatgagaactccatcttcctctcacaaaagtggacttaacaaaggcacttggactccagaggaagatgccaagttaatagcttatatcactcgttatggctcttggaattggcgccaactcccaagatttgcaggactggcaaggtgtggaaagagctgcaggcttaggtggctaaattatctcaggcccaacataaaaagagggaactatactaaagaagaagaagagattataatcagactgcacgaaaagctgggtaacaagtatgctctcacattccaagctaaactaaatttcccacaacattgtacagcatcaaaagctagacaggggaactataagattttcccttacttcaacacctacagaccaatgcatcttgcaaagtccactcataattaatatgacaataataattgggacaaaacttataagtaattcatacatgtntatttttttaagtggtgctttta

SEQ ID NO: 28399 - DNA, 418 bp, Glycine max
  Clone ID: TF_jC-gmXLIB3563P067bd03a2
ctttacttggttgctagcaagtggtatggggaggcaaccctgctgtgacaaacttggggtgaagaaaggtccatggactgctgaggaagacaaaaaactcataaacttcattctctccaatggccagtgctgttggcgagctgttcccaagcttgctgggcttcggcgttgtggtaagagttgtcgtcttcgttggactaattatctaaggcctgacttgaagagagggctcctcacacaggctgaagagcagcttgttatcgatctccatgcccgtcttggcaacaggttttccattttttacttgctcggcttccaagcattgccttgtgtttgttcaccagaaattattacacagtttatgacaatgtgatttcggttaactctacgcggttcttaatcatatttttcaatttac

SEQ ID NO: 28400 - DNA, 1318 bp, Glycine max
  Clone ID: TF_GmC1277_1
cccatctgctaccaatttcaccattctcatcctccaaagttgaaccataatttcaaatccaaccaagagacaccatgtcatcaagtggaaccatttggagctatgaggaagaaaaagcatttgagaatgccatagctatgcattggattgaggaatcctcaaaagagcaatgggagaaaattgcttcagcagttcccagcaaaagcatggaagatgtgaagcaacattaccaggttctagtagaggatgtaagtgcaatagaggcaggtcacatatcattcccaaactatgctgcttctgaggaaatcacatcttcaaataaggactttcatggctcttccaaggccacaagctcagataaaagatcaaattgtaattatggacgtggtttttctgggttaggacatgactccaccactcatagtagtggtaaaggaggcttgtcaaggtcatcagaacaagaaagaagaaaaggaatcccatggactgaagaggaacacaggttatttttacttggtctagaaaagtttggaaaaggagattggagaagcatttcaaggaactttgtgatatctaggactcccactcaagtggcaagccatgcacaaaagtacttcataaggttgaattcaatgaatagagacaggaggaggtctagtatccatgatatcactagtgtgaacaatggagatgtggctaataaccaagcacctattacagggcagcatagtagcacaattccttcaaacacaatgggtgtaggacaatcccttaagcatagagttcagggtcacataccacctggtttaggcatgtatggaacaccagttggacatcctgtggctgctcctccagggcacatggcatctgcagttggcactcctgtcatgcttcctcctggaccccacccccatgctcatcctcatccaccttatgttcttcctcttgcttacccaatggcacctccaacaatgcatcaataacaactctttttttctctttcttatttgtagttaggtttttttcttctttcttattagtatggaattaaaatcctttctgtggaaattcataaatatgttgttttaaattaaattctactcttagtttaagcaaggaaattgttgaatggatccaatggtacttagtttatgtcagtatagagttagtttaaatgccaaccccttttttccaatgtagatgtaatcctaagaattgccttgtggtgtatatggagatagatatggatttaaataccaaggaaatgaatttctctttatcaacaagtttgtctattgtcatgtctctattacctttc

SEQ ID NO: 28401 - DNA, 2109 bp, Glycine max
  Clone ID: TF_GmC7451_1
cccacgcgtccgtacagctgcgagaagacgacagaagggggagcgtgagcacgaggccagaccaaatcaaagttattttagtacaaagaaaaggagacacattattattgtgttgcactgagtgcagtgaccatgacgagaactccttgttgtgagagaatgggatcgaagaagggaccttggactgctgaagaagatcagatattggtttctcatattcaacaatatggccatggaaactggcgtgcccttcctaaacaagctggtttgttaaggtgtggcaagagttgtaggcttcgttggataaattacttgaggcctgatattaaacgagggaaattcagcaaggaagaagaacataccatcctaaagctacatggaattcgcggaaatagatggtctgctatagcggcaagtttgcccggaagaacagacaacgaaataaagaatttttggcatacccatttgaagaagaggatccagaaaagtggagtgcacaatggcaatccttcctcacgtatcttgcaagaggcacaagcaaatactagttcgaatgcatcaagtgtaatgattgccaattacggtttaccctcaaggaatattaatccacctattgcaggattttacggtgcagtctcctcagatacttttggagaaattaaggacaatcatggttcttgtcagctcagtgaagaaatggaattttggtacaatatatattcatcaaatcagggcaaacatcatgagacaatggaaatctaggatattatatagctagattgcatgagatactacatataatttgtctcactcctacaaattaactttttatttttatttttagatatcaacctttaattggtttcagcttggtgtttgtgtacaaaacttaaaatccattttggcaaagcaaattgccagatgaaaactaaagatgatcgatggataatttttaaataaaggctcgagagaagtttgtaaatgcatatatactgaaacaaagtacttttgactgccattttttttggtagtgacttttgactgttatttgaggcaaaggcaaacttttccttcaactttaaacttcaattcaattatgtagttcttagttcttaggaatcattgcaattacaattattatttttgaaaacttttttctgtttttaaaaataaaaatagaaaaaagaaacagtgataataattttttaaagtattttccagtataacatcttctttttaaaaaataattaatattctactttcaatattttatcatttatatttttccaattcagtatcttatcttttttgctttttatttctattctaaaaaaaattgtctttttaattacaaaaataatacatacacttattgtgtactttaccaataaaaaaaaccttactgtgtaattttttctaatgttgacaatacttgcctattattaaattctttttaaaactgaagaatcgaagtaaaatctaacacggcttgccgaataatattaaactcttaaaaaataacaagtcttaaaatagattgactgtactgcacagtggtgatattaaacactttgttttttttatgataatataataatggcccgttgatgtcgctttatgattactatgttagtttcaaatgttttccacagtaggaaaattattttggttgtaggatataccgtaagacttcctcctacactggattattctttttctttttaaaaaaaaaacaatgttttcctttcctattatgcaaatcaagttcactgtctcccttggttccatcaagcttcttcctttgcttcccacagtgtcatgacctcgtctacaagaagctgtcgttggtgtcaaaaagctctccatggatgcctactagggctttttttgggttcaccacggaaatcaaaatatcctgagtaaactccaccacaccaagatcgcataagtgttttttttttcagtttagtttttatatattttaatttattttattatgttcttaaaaaaaattatattgatgcttgtaatttaatttgggatctggtgaatatatggtgatgtttgtaatttaattttagatgttggtgaataaattgtggcttattt

SEQ ID NO: 28402 - DNA, 955 bp, Glycine max
  Clone ID: TF_GmC9784_1
ggaattcttcacccttcggcaaaggacatggatcggataaaagggccatggagtcctgaagaggacgaagcgttacggaggttggttcagacttacggccctaggaactggtccgttataagcaaatccattccgggtcggtctgggaaatcgtgccgcttgcggtggtgcaaccagctgtctccggaggtggagcgccggcctttcacggcggaggaagacgaggcgatcctgaaggctcacgccaggttcgggaacaagtgggccaccatcgcgcgcttcctcaatggccgcaccgacaacgccatcaagaaccattggaattccaccctcaagaggaagtgctccgagcctctctccgagcctcggcctctgaagagatccgccaccgtttcgggtagtcaatccggatccgatttgagcgattcgggtttacccattattcttgcaagaagcgtgagcgtgacggtagctccctctaaccaccttgcggaaaccgcgtcttcttcagtaactgatcctgccacgttattgagtttgtctctaccgggattcgattcgtgcgatggggctaataatgggcctgggccgaatcaggggcccagttgcggcccgttccaggagataccgatgcttggttcccaaaagcagttgttcagccaagagtttatgaaggtgatgcaagagatgatacgagtggaagtgagaaattacatgtctgtactggaacgtaatggtgtgtgtatgcaaaccgatgccattaggaactcggtgttggagaggatgggaattggtagggttgaataatgaattcaagagcggaaaattatattcatattaggtcatggaaaaatgattaggtgaaatcgcagagaaatagtgattctatctttttattttttgtcaggttaattatcctttttttaaatgataattattttttatctgtgccgag

SEQ ID NO: 28403 - DNA, 1226 bp, Glycine max
  Clone ID: TF_GmC1460_1
acgggctgcgagaagacgacagaagggggtggtaatgagtggtgaagatgggcaaagcaccttgttgtgagaaacatggggtcagaaggggagcttggacacccgaagaagaccaagctttggttgactacatccagaaacatggccatggaagttggcgttcactccccaaacatgcaggtctcctaagatgtggaaaaagttgtcggcttcggtggataaactatcttcgcccaggcatcaagcgtggcccatttactagtgaagaagaaagtacaatcgttcaacttcatggcatgcttggcaacaggtgggcttctatagcatctcaactacctggaagaacagacaatgagattaagaacttctggaacacccatctaaagaagcgtctccttcgatcatgtcattcccaaagagcaaaacagctatgtgtgattcctgatcaatccattgtcaagtccgaatctccttcgacgcggcacatggtacagtgggagagtgtgagagttgagacagaggcaaggttgtcattggaatccacaatgctcaattcatggccaacgagtaaaacatgccctgatcactttcttacaactttggcattcagaggttggaaaatctttcgcatgattcaagggaaaggaagaaggagtagtgagtcaaagccttatctcacaaccttcatcttcatcaaaattggagtcttgttcagatgtgtcattgcaggtgaaaaccaacactggaactagtagctgcattccaaagcttgaggatgtgagcatggttcatgaacaaacaagtagctacaaaccaaagcttgatgatgacacagctggttctgactccggcaattatgaatttcttgatacttctgattctgcactgaagcaccttctacatatgcctgatagtgatatgggattcttgggacacaatgatcatttccaaaatctccttgatggtacatgtgactaagatagtctccttcatatttcttcatagaaagacaatactttgaactgatagggaaaattttatttgccctttcttcttttttgtaaatgcgctcaccatgtagctggttttcaatagttggtgtagagggggaaaaaggtagatagaagaatagtggaaagagatcaagtttaccctccacttgatggctgtagctaaaagttaaacattaatgaattcagagttaatgatattgttcttgtcctacc

SEQ ID NO: 28404 - DNA, 1886 bp, Glycine max
  Clone ID: TF_GmC563_1
ggctcgagaaaatatctctctctcgaaaagctagtttccccaattattgtgtcaactacataagctgggttcgtgccgtttcccccatctggggttggcttccttctgggtttttccgtttccggggatactcctctttctcttcaaatggaatgggtttctaggtttggattaggagaccacatccttttctgttggcttactggctgagggggtgtgtcttttcctccagttgtggagagaaagctgcattttgttccatggattattgttttgctccggctacttctgatggggctgaagtaatatgggaaacgagtcccgtgcaaatgcttcttgattatatgcttctcagcggctccaccagtccacgaatgtcctgctcagcagttctccatctgacaactcttcaaagagagtgtgtaactagtaataactgtgtatttgtgtgtatgtttttatgatcatataataatagatatgtttttggcatgccagttatgagtgctactattactactactactaccttaaactagaacaatgaacaggggaattgaagttctttctccagcctcatacctccgaagttccaattggctgttccaagaaagcttggggaccaggtggactccacaggagaacaagctctttgagaatgctttggctgtgtttgacaaggacactccggaccggtggctgaaggtggcggccttgattcccggcaagacggtcggcgatgtgatcaaacagtatagggaacttgaagaagatgtgagtgtcattgaatcagggtttattccacttccagggtacactgctgctgattcctttacattggagtgggtcaacaatcaaggatttgatgggctcaggcagttttatggtgttactggcaaaaggggtgcttccactagaccatctgagcaggagaggaagaaaggtgtgccatggactaaagaggagcacaggcaatttctgatgggtctgaagaagtatggtaaaggagactggagaaacatctctcgcaattttgtgaccacaagaacaccaactcaggttgcaagtcatgctcagaagtatttcatcaggcaactaagtggaggaaaggacaagaagagatccagtatccatgacatcacaatggtgaatctcccagaagcaaaatctccttcatcagagagtaacaacagaccctattcaccagatcactcagtgaaggatgtgaatccaccatcccagaatcaaagattgtctactactatggtaattaaacaggaacatgattggaaattgccatgtgaaactgtgcctatgcttttcaattccacaaatggaaacatgttcatgacaccactttgtgggatttcttcatatggatctaaaccacttcaggagcagtatttcctcagtggatgccagtttggaccttatgatacaattatgcaaatgccgtccatgcaaaatcaatgaactatatagaatgcagggattaaagttaaggtactaaaatgctaaaccttattcattgatgttggattgatttttagatgcttaagggtggttttatgtaaatatttcaaggattcacgagtttccttatcactcaatctttgaagagccttcatattgtattctgatattaaatgtgctggcaccaaagatgcaatatcagagtttggcagtgatatgcatcttccacctaggcagaaaggattatctgtaaaacgtataggacgagaggagttaccttgagtttgtgattattcacttttttttaaatgcttgatgcttcaaataaatataggcctttgcagctttgctaacgaatgcaagtttttattagaattcaattttgaagatgcattgtgtactaataatatact

SEQ ID NO: 28405 - DNA, 689 bp, Glycine max
  Clone ID: TF_uC-gmflLIB3275P072d07b1
ctaactgctatcgagagctacacacaagagtaagaccaaagcaaaaatacattatacaatatattatcgatccacatcaatttttgaagaagatggttagagctccttgttgtgaaaagatgggattgaagaagggtccttggaccccagaggaagatcaaatcctcatgtcatacatccaaaaacatggccatggaaattggcgtgccctcccaaagcttgcagggttattaaggtgtggcaagagctgcaggctaaggtggattaactatttaaggccagatatcaagagaggaaatttttcaagcgaagaagaggaaattatcattaagatgcatgagttgctggggaacaggtggtcagcaattgcagcaaaattaccaggaagaactgacaatgaaataaaaaatgtgtggcacacccacttgaagaagaggctactgaattcagatatccaaaaaagggtttccaagccaagaatcaaacgatctgattccaattccagcacactaactcaattagaacctacatcatcagcatgcactacttctttaagtgacttttcatcatttagtgaagggactaaaaacatggacaacatgatcaagagtgaagacatagagtctgtggagacaataatgcctccaattgatgaaagctttggtcaaaggcaacagtggattatgaaa

SEQ ID NO: 28406 - DNA, 671 bp, Glycine max
  unsure (1)..(671): unsure at all n locations
  Clone ID: TF_LIB4164-016-Q1-K1-E9
cggtcacggaattcccgggtcgacccacgcgtccgcgaagctctgtgctcgctgttatcagttttttttcctctgtttaacccagaaatatgtaacacaaatcaaaacatcgttgttgttttatttgagcatgcaagttggctaactcttggaaaggaaaggagcttcaagaagagagagataaaataaatggtgcaagatatgaagcagcaagacaatggagaatctaagaagaaggagcgtcacattgtgacttggactcaagaggaggatgatatactaagagaacagattggtattcatggaactgaaaagtacccactactctttgataattttttcttttgtcatacacactactttcttgatgtgtgacattaaagggatttttattgcaattaaaactatgcagttgggcaattattgcatcaaagttcaaagataaaacgacaagacagtgcagaagaagatggtacacttacttgaattctgatttaagaaaggtggatggtcagctgaggaagacatgctcttatgtgaggctcaaaagggtatttggtantagatggacagaaatagcanagggtggtctcaggcagaacggantatgctgtgaanaatcgtttttcacactctgcaggaagaacagaaatatgcagctttagcaaaag

SEQ ID NO: 28407 - DNA, 1272 bp, Glycine max
  unsure (1)..(1272): unsure at all n locations
  Clone ID: TF_GmC134308_1
tgttcagagacagacactgccaactatatcatcgacagatggtatagaaaccaagggaatagttggtggtaacatggcttccaaaagaaaaagaaaggcatggtcagaagaagaggacatgcagctacgagctgctgttcaaagatggggtgaagggaattgggcaaccatggcaaaaggagacgactttcctattaagagaagtgctacacagttggctcagaggtggagcattttacgaaagaaagatggttgtacaaatacaggaaccataaccagcacacagtatactactgctgaacagctggcaactcgacactctttatctttagcccttgatatgccattcaaaaagttaactgctcctggaatgactgatgaacaaacatgttacccctttggctgataaaggtgctcaagtaaaaaatgccgtggatactactgagcctgctgttagctctttgacaaagccatctatttctaccaatttgccttctgacccaaagaacaaacacgctacccctttggctgataaagttccattgaagcaagatgttaatcccacaaaagagttacaagtttctaatccgagcaccacaccaaaagagaagttacaagaaaatgagcctcctaaagttaccactggaagccaggttgatagcaacccagagaagggaagattagaaaaaggtcaagagacgagcatacctcttgttaaaattagttgtggtgaggaagtttcaaaagataaagcaaatcaagtagtagtgtgtgaagagcaaggaagtgttaagaaggctactgagaataacaacattgacaaggggagtcaaaatttagatcatgacaagaagatagattctattaatcaaagttcaaatgatcaaaacgcgaatgataaacatgtaaatttgccagtacaagatgaactcagcctaagtgccaaggtagtaaaaagtgatggggaatgttgagtgattagtttgtgaagatgagtagattattttattgaattctaacttaaagtttggatgaaattttacgttattttaggaatttgtagcacattaatgtgttgtaatattttcttaaattcttctttagtggtaaatatattttgatgacttgcaaatttctataaatatatggatcaattgcgttatctctttgttcctnttnttgggtgattttggaattntttctattttatgtttgagttatctttattagtcaatttccaggatttgccacacttgtccattgattttgtcc

SEQ ID NO: 28408 - DNA, 461 bp, Glycine max
  Clone ID: TF_LIB3242-217-Q1-J1-G4
ttcagagacagacactgccaactatatcatcgacagatggtatagaaaccaagggaatagttggtggtaacatggcttccaaaagaaaaagaaaggcatggtcagaagaagaggacatgcagctacgagctgctgttcaaagatggggtgaagggaattgggcaaccatggcaaaaggagacgactttcctattaagagaagtgctacacagttggctcagaggtggagcattttacgaaagaaagatggttgtacaaatacaggaaccataaccagcacacagtatactactgctgaacagctggcaactcgacactctttatctttagcccttgatatgccattcaaaaagttaactgctcctggaatgactgatggtaattttctttggaactttatctattttattttgatttatctttattagtcaaattccaggatttgccacacttgtccattg

SEQ ID NO: 28409 - DNA, 713 bp, Glycine max
  unsure (1)..(713): unsure at all n locations
  Clone ID: TF_LIB4167-068-Q1-K1-D10
ccacgcgtccgcggcaaggcttcagtttcagagggggagaaatgggtcggtccagagttgcgttgcgctccgctgacgatgacccaaaccacagatcaaagagaaaaaaggctgctctgaatgtagaaaattcagaaaccttacctacaggccaaggagtaactactagcaaggtatctctctatcactgcaattattgtaacaaagatatttcggggaagattcgcatcaagtgtgctgtctgtcaagattttgacctctgcttagagtgcttctctgttggtgctgaggtgacacctcacaaaagcaatcatccatatcggattatggataatctatcttttccacttatatgtacagattggaatgcagatgaagagttgttacttctagagggcattgaaacgtatggatttgggaattggaatgaagttgcagaatatgttggaacaaaaaccaaatctcaatgtattgaccactataatgctgtatatatgaattcgccatgttttcctctccctgatttgtctcatgttatggggaagaacaaagtggaactctgtgccatggcgaagggacatgaagccaagaaagaattttctctgactgcagagcttactctgaaagaagaagctntgntcacctgatcgaataaactatngaagaatcaaagaatgcagaaatcaataatcaaactatgtnctaggttaacc

SEQ ID NO: 28410 - DNA, 1252 bp, Glycine max
  Clone ID: TF_GmC78832_2
ggctcgagctcgctgttggattttaatatttatctctgctatcaatattattaaggtctcacttctgggattctgaattctatgccccttggaccaaagtttcgtaagttctttgttgttgtgcatttcttttctttttttttttatccgtgggaatggaagaatgacaggaggtttacaataactcgtgcatccttcttaaccaacttaactagactcccttgacatttctttctagtttctcatttccatttctttagtgtaaggggattttttgttgtaaagtatggaattcgagacttcatatccaacttgttttatgtcaaattcaagttggttttctcaagaaagccactacacagaatggacaagagaagagaataagaaatttgaaagtgcccttgccatatatgataaggataccccagacagatggctgagggttgcagccatgctacctggaaaaactgtctatgatgtcatcaaacaatacagagaattggaagaagatgtttgtgaaatagaagcagggaggattccagttcctggataccctacctcttctttcacattgaagatggttgacaaccaatgttatgatgcatgcagaaagaagcctgcaactctcaggagttctgatcaggagaggaagaaaggggttccttggacagaagaggaacacagacgttttctgatgggacttttaaagtatggtaaaggggattggagaaacatttctcgtaattttgtggtcacaaaaactcccacccaagtggcaagccatgctcaaaagtattacataaggcaaaagctttctggagggaaagacaataaaaggaggcctagtatccatgatatcaccattgttaatcttacatcagatcaagagaagcctcttttactcaatgatgagtctcacatgacttttgagcaacagaagctaactagcatgccaaaagtacaactagaatggattaatcaccacgacaatgggtcacgtatggttgtcaacccaaattatgatatgttcatgtcaccttcatctggcatctcttccaagaccctcaagttgcaagggcaagatttctatgaatgtgcctttcatgagacttatgctaagcttaaaaattcgggtttcaggacaacttctagagacttcaacaaggaagactcaatctgcatcacaggatgcgccattcaggtagccaattcacttgctgatgtggctgactcacatgagcacttgaattga

SEQ ID NO: 28411 - DNA, 638 bp, Glycine max
  unsure (1)..(638): unsure at all n locations
  Clone ID: TF_GmC6850_3
cacgcgtccgctttagcatgcaacttgggtgggagggagcgtcgaagaaagagagccacaacaatagaataaacactcacacggagacaagacaagaacaagatcgtgcaacagatatgaagaagcagcagcagcaggagaaacataagaagcaaatggtcaatgaagaatctaagaagaaggagcgtcacattgtgacgtggactcaagaggaagatgacatactgagggagcagattggtgtacatggaactgaaaattgggcaattattgcttctaaattcaaggacaaaacaacaagacagtgcagaagaagatggtacacttatttgaattccgatttcaagaaaggaggatggtcaccagaggaagacatgcttttatgtgaggctcaaaaaatatttggtaacaggtggacagaaataaatagggtggtttcaggcagaacggataacgctgtgtaaaactgtttctccacattgtgcaaaaagagagcaaaatatgaagcncttagtaaaagagaacagcacttcatacatcaattcaaataacaaaggatttttctccacacggggtgtgatacagatgtagcatcagaaactgcaattaagagatgagggaggtcacatatccctgat

SEQ ID NO: 28412 - DNA, 1030 bp, Glycine max
  Clone ID: TF_GmC946_1
gtgataagcacgtgaagaaggacagcgctagcgagaaacaaaccaaccctgaaatccaaatccgaatccaaccctctccaacgtcactctcaccctctctctgttttctgtctcttctttcttttatcacacaacaacatacacacgccctcttcttcttccttgcatggactaactcagagactaaaccataccaaaaaaaacaacatgtgttccgcagagaaggacgggatcatgctcttcggcgtgcgcctctccgtcgtggataaccaccccacctccttcagaaagagcgctagcatgaccaacctttctcagtacgagtctccaccaccgcacgatcccaacgcagggtatgcctcagacgacgtcgttcacccctcccgtcacacccgcgaacgcaagcgaggggttccgtggacggaggaagagcacaggttgttcctgctgggattacagaacatcggtaaaggagattggagagggatttctagaaacttcgtgaagactcgtacgcctacacaggttgctagtcatgctcagaagtacttcctccgccgtcacacccagaaccgccgccgccggagatctagtctctttgatatcaccaccgactcggtgatggaaccgtggccggagaaggaagaggaacaagtggtgttgccgtcagctaggtcgaaaccggttctgccggtgcctccgtcgtcgaagatggctgagttggacttgagtgggaagtcgctgtcgctgaagcttccggtatccaagccacctatttctaatgagaattttggcgggataccattatcggtgttgcttgaaggttaattaaatgcggtcttgattgaatttttgcatgtaaaattggaaatatactagtattattgaagagttggaatttagaagagggttagagaattattaattattgaaatgtatgtatatatttttctttgatgagttttctcttctttttttttaatgagtaaatgtatgtttatatgaatatgattatgattgctgccaaaaa

SEQ ID NO: 28413 - DNA, 1704 bp, Glycine max
  Clone ID: TF_GmC1327_1
cttgaaactcagaccaactgacacacagagaaagagagagagagagagagagagagaagcatagcagacatgggaagagctccttgctgtgacaaagccaacgtgaagaaaggtccatggtcacctgaagaagatgccaaactcaagtcttatattgagcagcatggcactggtggaaactggattgccttgccccagaaaataggccttaagaggtgtgggaaaagctgtcgtcttagatggctgaattatcttcgcccaaacatcaaacatgggggtttctcagaagaagaagacaacatcatctgcagcctctatgttagtattggaagcaggtggtcaattatagcagcacagttacccgggcgcacagacaatgatataaagaactattggaacactaggctgaagaagaagctccttggcaaacaaaggaaggagcaacaggctcaagctcgccgagtcagcaacaaccagcagaagcaagatgtcaaaagagaaaccgagaatttgatagtggcttctgaagtcatgatcaatcaagttccctattggtcttcttcagagttttcttctgtgcctatgccagtgaccaatgcttcttcatttcaacactatggtctgaacaatcaaacatctctcaggagcatgatggttaacaaactagagggaattacattttccaacgatcatcatcagcagcagcagcaaccatacaccaatgcatgtgaaattccctccctacaagaccaggtttttccaaccatggtaaatcaagtaaccgtggtgagcaatgaaaacaatagtggcacttatcagccatcaaatatatttcaagggtttgaaaacttcccaagtgatttttgtgaactggtctgtgtcaacccccaacaaatggaggcttttaattatggaatggaatccatggacatgactatgagcaatggtggcagcacgaacacgacttcaacagaaagcactagttggggtgacatgagctccttggtttactctcctttggtatctgactatgaacgttgcagacaaggaataattcctcaagatcatgttgttgctttcgaagagtgtaagtactttggaatgcagatgcaataacggctctgaatacgaggtgtgtacatgtcaatttgtgccgctaaaaaaaattggtactggccaaaaccctaatgagttcactttgcctcacataattatttgttggttttgtagtttcttgtttcattcaaactgtgcaagtttctgccatatgtgttgatacatattgagcacaactcttttgttttgggtttcttaacgattatgtttatagtcttatatgtatggatgctacagaaggaagaatcttaattagtaatagtgcgaggcccttgaattcctaaatgtgtcagttttctgctgctcctagatgatcaagagtgcataggataatagtttggatacgttacatatgtttataccactcgatatagtttaattatgatgacatttatgatcatatttgtacttgaaaaatctcaggttctcacggaaatacatgattgagttgtatctttcgcatagttctagcaaaaagctgtgggaagtttgaaaggtgcataacattttggctgagagttttttagctttagcacccgaggcatcaatatctggctgcattcttttaaaaaaaaaaaaaaaaaactc

SEQ ID NO: 28414 - DNA, 659 bp, Glycine max
  unsure (1)..(659): unsure at all n locations
  Clone ID: TF_LIB5118-018-A1-PF1-G7
ctttgccccattccccctaaccaagtttaagtttctagaatggaagaaatgaacagaagctcctcctccacttcctcttcctctcactgttgctctttagagtccaaccataggagccccaacaagccagacagaatcaaaggcccatggagcgcccaagaggatcggatcctgacacgactagtcgaacaatacggccctcgaaactggtccctcatcagccgctacattaagggcaggtccggcaaatcgtgccggctgcggtggtgcaatcagctgagccccaccgtggagcaccgccccttctcgacccaagaggacgagaccatcatcgctgcccatgcccggnacggnaacaggngggccaccatagcccgattattaccgggccgaaccgataacgccgttaagaaccactggaactccacgctcaagcgcagagccaagggtattaacgttaatgttaatgatgccgacaacgaggatgacccgttgaccgcattgactcttgctcctcccggtattgctaatgccactttgaccgaagacgccgtaccggaccaccgggcctcgccggagagtgcggcggaggggttttgggatatgatgagggatgcgatcgcgagggaagtgagggaaaatgcgccttctaatttttc

SEQ ID NO: 28415 - DNA, 1667 bp, Glycine max
  Clone ID: TF_GmC84_4
tattcggctggagcacaccttcttccgttgttctcttccaattgccttcattttctcggaaaattcttcttttccgagaaagttcgtgtttttactgttgaatcgagaattcccaaatcgggggtgtctgaaattcaaagctgttgttgttgttggcggctggggttagtctctgtggaggtttgggtgttttttgaggcagagcttattctcattttgctccaatggagatgcaggaccaaatagaaagcacaagatcaaccatatttggctcagctagtaacatccattccaatgctgaaaagcaggccgaaaatgttgctcccaaggtgaggaaaccatataccattactaaacaaagggagaagtggacagaggaagagcatcaaaagttccttgaagctttgaaattgtatggtcgtggctggcgccaaattgaagagcatataggtaccaaaactgctgttcagattcgaagccatgctcaaaagttttctctaaggttgtgagggaatctgaggtcagtgatgagggttctatacaaccaattaacatacctcctcctcggcctaagaggaaacccctgcatccatatccccgtaaatcagttaattctttcagaggacccaccataccaaatgaacagaaatatctccatctacaaacttgttggttgcagagaagacaccccatctccaacctcggtgctatctacagttggttcggaagcatttgggtctcaattttcagagcagactaacagatgcctttcaccaaactcttgcaccactgatattcactcagtcagcttatcacctgttgaaaaggaaaatgattgcatgacatccaaagaatctgaggaggaagagaaagcatcaccagcttcacgtcctttatccactgtttctaacccaaaaatgtgcatgaaacctgagtttagttccaaggagatagaagatgctactgatatgccacaaaccactagtattaagctttttggaagaacagtctctatggtaggtaatcagaagtcactgaagatagatgatgatggtaagccgataactgtgaagtccgatgaagtagatgatgttgagaatgagaagcttggccaatcaggagaatccaagcaagtagatacacaattatcactcggcgtggttagtggtaactggcctataacacccgatgctgatggagctaatgtgaccagcatagagcccccaaaggagaaccaatgcttcagtgaatctgcacctgatgcattttttccgcagtggagtttgtcccaaggccttccacctttctacctgaggccatgcaatcaggtcctaatcccttgcctcttaggccctcctctttgaaagtaagaacaagagaggaggaaagttgttgcactggttccaacactgaatcagtctgtgacatggaaaaccaaggcaagaactcagatgctgttgattctaagtttcaaaaatatcacgaggaaggagctgcaccccagaagaagcctgcaaggggatttgtaccatataaaagatgtttagctgaaagagatggacattcttttattgttgccatggaagagagggaggggcaacgagcacgtgtgtgctcatagccttacattctatttttacatgattcataatcatggtgttaatcag

SEQ ID NO: 28416 - DNA, 1900 bp, Glycine max
  Clone ID: TF_GmC283_1
ctaactcttactttcccctctgttactttctcgagccgattcggctcgagctacacaacaccaagaaatccaaatctaattccttatctcgtttgatatcctgatttctactctctcagtttccactctattgtatatctgtatatgtatgtatgtgatgaactgatgatatttgcatttgcttttatagtttgcttggtcaccaagtaacgacaaagggaaacagtttctagctttttcttggctgattgtaaataatctctctcttttctatattggatcatagctttctgcaccctcttcctcttaggttctcctatttttctctcttgtcgtggacctcaactttgtaggctcaccttagaaacaaaacttcttttctttttggcgggggtgagagttgctatcttattcctggtttcatctacaagacactaacatctttgttgtttttagtttcagaattcgttatactcacccacacaccaaaattctggtacaccatgatttttccaaggttttgtacgaatctaaaaggtatggcttttatagattctcaactttatcttgatcacacaggtaaaagattctgaaatctgtgcaccttgtgaatcaaagctctataatttcttcctttctgtgtttctgtgagcacccttttctagttcctctccatttccatctctttaggaacttaattcaactaagtttttgtatgcttgtggcttgagatatggaattggaaaccatctaccctccttgttttatgccaaattcaaattggtttgtgcaagagagccacagcacagagtggactagagaagataacaagaagtttgaaagtgcccttgctatatatgacaacgacaccccagatagatggttcaaggtggcagctatgatccctgggaagactgtgtttgatgtgatcaagcagtatagggaactggaagaagatgtgagtgaaatcgaagccgggcgtgttccaattcctggctatcttgcctcttctttcacctttgagctggttgacaaccacaactatgatggatgcagaagaaggcttgcacctgtcagaggctctgatcaagagagaaagaaaggagtcccatggactgaagatgaacacagacgttttctgatgggacttttaaagtatggtaaaggagactggagaaatatctctcgcaattttgtggtcactaagactccgacacaagttgctagccatgcacaaaagtactacataaggcaaaaggtttctggagggaaagataaaaggagaccaagcattcatgatataaccactgttaatcttacagaaacttctgcatcagataagaacaagcctcagttatttaatgcgtctcctgtgcttgcaccacagcagaagctgaatagcatatcaaaggtacagctgggctggactagtagccactacaatgatggatcattcatggttttcaacccaaatagtgatgccttgtttgtgtcatcttcacctgatgtcacttctatggccctgaaaatgcaagggcaagatctctatgactgtgctttacatgaggcttatgccaaggtaaaagttccaggtttcagcatggctcctagagacttcaataatgaagctgtttttggtattcatgcactgtaatgccaaccctgatgatgttaaacaaagaaaattccacgtcatagatcattgttctgtaggattaatgtagatgaccataagctagctagctactttgttcatggttagtgaacaacctaaaagaaaactagaataatgtttcaatccttaaaaactgaatttggaatgaacttattttaaagttttcctctttatgtctatttctttggtgacccgatcagatcgagtatggaaaaccattcaggc

SEQ ID NO: 28417 - DNA, 1416 bp, Glycine max
  Clone ID: TF_GmC948_1
ggtccggagccccggggcgacccacgaataaacgaagaagcgaaatctcctagaaagcgagtttctctcttctctctctcaattttcacatagtcagcgaaaacaaacaaactattggaacacgaaacacaaacatcataacataagcagcagcagcagcaccacccaccttgttcattgttttgaattcaactgagaaaaacgacaaacgaggatgtttcaagagagcagcgcgacacggtggccgactcagccgactcagtggactcgctaccacgacaagctcttcgagcgggctctgctggtcgtgccggaggacctgccggaccggtgggagaagatcgccgaccaggttcccggcaagtcggcggtggaggtcagggaacactacgaggccctcgttcacgacgtcttcgagatcgactccggccgagtcgaggtcccgagttacgtcgatgactcggtggcgacaccgcccagtggcggtgctgaaatttctacttgggacaacgctaatcagatctcattcgggtccaagcctaagcaacaaggcgacaacgaaaggaagaagggcacgccttggactgaagaggaacacaggctgtttctcattgggctcagtaaatttgggaaaggagattggagaagcatttcaagaaatgttgttgtgacaagaacaccaactcaagtagctagccatgcccagaaatactttctccgccagaattcggtgaagaaagagaggaagagatcaagcattcatgacataaccactgtggacagcaactcagttcctgtgcccattgatcagaactgggttcctcctccgggtggttcagtgcagcaatcactgcaatacccatcaagcaacatgctcgatcaaatgggtacatttgggtattcaaactatggctttggcatgtaaagaatactagactagaagccgtatgttctgtatatagtgctgtagatttgattcataagttcccctatgtaaagttttatggttttgctagctgacaagggtgattaggagtattgctaattattgaattcattagtgtaggtttcgtttgaatacctttgtggatcctataaatgaaccatgaggatgaaagggtagtgaatactaatagtgaacctttaggaatgaattcaacaggtatggaaattctttgtatgtgcccaattcaattactgctttgcaattcggattataagtattgaaatgaaaccctaaaccttggccatttcttcagtgagttcagttgagtgaaagcttactgagtatgcattattgcattcaatcagcaaacaaagcctgtttcggttgctgtttcttgatggctttttatggttaaagcctgcaattttattgaagttaatgaaaagagttgcagaacttttatgtagaaa

SEQ ID NO: 28418 - DNA, 1363 bp, Glycine max
  Clone ID: TF_GmC948_2
ggctcgagggcagaagcgagatctcctagaaagcgagtttctcttttctctctctctttcaattttcacatagtcagcgaaaacaaacaaactattggagatttggagcacgaaacacaacacaagcagcagccacctcgtttcattgttttgaattcaactgagaaaaacgacaacgaggatgtttcaggagagcagcgtgacgcggtggccgactcagtggactcgctaccacgacaagctattcgagcgggcccttctggtcgtgccggaggatctgccggaccggtgggagaagatcgccgaccaggttcccggcaagtcggcggtggaggtaagggaacactacgaggccctcgtccacgacgtcttcgagatcgactccggccgagtcgaggtcccgagttacgtcgatgactcggtggcgatgccgcccagtggcggtgctggaatttctacgtgggacaacgctaatcagatctcattcggttccaagcttaaacaacaaggcgagaacgaaaggaagaagggcacgccttggactgaagaggaacacaggctgtttctcattgggcttagtaagtttgggaagggagattggagaagcatttcaagaaatgttgttgtgacaagaacaccaactcaagtagctagccatgcccagaaatactttcttcgccagaattcggtgaagaaagagaggaagagatcaagcattcatgacataacgactgtggacagtaactcagcgcctatgcccattgatcagacttgggttcctcctccgggtggttcactgcagcagtcacagcaatacccatcaagcaacatgcatgatcaaatgggtacgtttgggtattcaaactatggctttgacatgtaaagaatgctagaagcagtgtgttctgtatatagtgctgtagctttgattcataaggttcccctctttgtaaagttttatggttttgctagctgacaagggtgattgggagtattgctagttattgaatttttatcagtgtaggtttcgtttgaatacctttgtgaatcctataaatgaaccatgaggatgaaagggtagtgaatactaatagtgaacctttaggaatgaattcaacaggaatggaaattctttgtatgtgtccaattcaattactgctttgcaattcggatttaagtattgaaatgaaaccataaataaaccttggccatttgttcagtcagtttcacttgagtcaaagctgcttactatgagtatgcattcaatcagcaaccaaagcctgttttggttgctatttcttgatggctactttattatggtaaaagcctgtaatcttattgaaggtaatgaaaagagttgcag

SEQ ID NO: 28419 - DNA, 479 bp, Glycine max
  Clone ID: TF_GmC74328_1
aattcggctcgagtaaacattgacttgaaactgatcagatcaattaacacacagagagagagagagagagaagcatagcaaacatgggaagagctccttgttgtgacaaagctaatgtcaagagaggtccatggtcacctgaagaagacaccaaactcaaatcttatattgaagagcatggaactggtggcaactggatagccttgcctcagaaaataggcctcaagaggtgtgggaaaagctgtcgtctcaggtggctgaattatcttcgtccaaacatcaaacacggaggtttctcagaagaagaagataacataatttgcagcctctatgttaccattggaagcaggtggtctattatagcagcacaattaccagggcgcactgataatgacataaagaactattggaacactaagctgaagaagaagctactaaggaagcaaaagaaggagcaacaggctcaagctcgcaaagtt

SEQ ID NO: 28420 - DNA, 2119 bp, Glycine max
  Clone ID: TF_GmC3745_1
ggctcgaggaatcaaccccaattgcagggacaacaaaagcacgagctagacgctggacagaagaagaggacaaacttttgagtgagaaggtcaagaagcacaatggaaggaactggaagaaaatagctgcatacctccctgggcgaactgacgtccaatgtttgcatcgctggcaaaaggttttaaatcctgatcttgtaaagggttcatggacaaagaaggaagatgatcgcctcattgaactggtcagaaagtatggtatcaagagatggttttttattgcaaaatacttgccaggtcgtattggaaagcaattcggctcgaggtggcacaatcatcttgatccaaccgtaaagaaggatgcatggacagaggaggaggaactaatacttgcttactattaccaaatatacggcagtaagtgggcagaaattgcaaggattcttcccggaaggtactttgtttgaatgttaatatgcaggcttcaaaacattcatcaatacgtatgtataaaatatgattttaatcatgttaatatgatttgattttggttataatttttcaaaaaaaaaaatctgtttattttgagccaattatactattcaataatgttgaacttgaatctttttcaacatgctttggttttgtgatgtcataaatatttaattccaactttacgaaatatcattcacctcacttctttttcacgagatttcccactgacattaaggactaaaatgttcacttcataaaatcttcactttgttttctgactcttcaaatactattttctgctaatgacatggactaaagtaacctgcacatttaatttcaaggtctaaaatagaaattagaagtatattcaatgtttatgcatcttctctcttgtgattgtgacatgaccgtacttgtccatgttagttcgcctctcctttgagaaacaatgtaggctagcaaaagtagaacaatcatattgaagacattgataaatgtacatgcatttctggtttaagtgctacaagtctttctatatctaatgacccatgataattatttgtatcttttgggggagccaggactgacaatgctataaaaaatcattggaactgctcaatgaagaagaaattggatgcatcacccttagggtgtgacataaaagttgccccttccggtttctgtgcttctggaataaggcctgaacatgttgtggctaaagtggagggtcaaagtttcaatggaatggtttctcccaagcagagtcactggttgaatcgcagtgttgataacattctaacaaaattgattcttcaaaatgattcaggagaggaatcttgctctgcttcatccagggggactcctactcctagggcctcaagacagtttttggataattctctggattgtttacctctttccagtactgttacagatgaggcctatgagtcactgaaacggcaaaaggtttatttttcagatacagagcttaaagtgggtgatgaatctgacagtccccttttgaatttgagctactcaaaatctgccaaccgtgagaagaaaggtcaagctggaaatggaggcaattacaactcaaacaacactatgccacatagtgtagatgaattcagtgaatgtctaagtccaaaaacacacatggcattggcatgtgcatacaataacggttgtactcccccaacgtctatactcaagaatgacacaggcgacatcaacccagaaactttgctaagaaacttagcaatgacctatgagaatgttccttctattataaggaaaaggacacccaagaaggcaagctgttgtgaccgtgaccaagcaccttcgagaatgatcgtaaattctcctgaagcagaatgtgttattggcttagataatttaaaactgaacagggggtttattccattccttcgtagaccaaatactcagccatagctagatctatggaaggatgcataaaatgacagacatgatatgctagtcaattgtaatgctcctttgacatagcagaattgtttaatacagtttttacactagctcaactttattcaaactcgaattgaacttctttattcttaataatatattttttattgtaacacaaaaa

SEQ ID NO: 28421 - DNA, 786 bp, Glycine max
  Clone ID: TF_GmC142751_1
ggctcgagcataactccatttttctctccctctcttctctttcttaatttacctattctctcacgtctcaaatattttctcctccatctctcgccagcttcaagatatcactcattgagcaaagtaggtcaaaaaatttgctcaacaaggtaaaacatttattagttagctagcagtatggggagagcaccttgttgtgacaagaatggcctcaagaaaggaccatggacaaccgaggaggaccagaaactcattgattacattcagaaacatggatatggcaattggaggacactcccaaagaatgctgggttgcaaaggtgtggaaagagttgccgtctccgttggacaaactatctacggccagatataaagcgaggtcggttttcatttgaagaggaagagacaataattcaactacatagcattcttggcaacaaatggtctgcgattgcatctcgcttaccaggaaggactgacaatgaaataaagaattattggaacactcacattagaaaaaggcttctgagcatgggaattgacccggtgacacacagtcctcgacttgcccatgtggacatctcctccactcgatccgctgctctccatggcccttctcaacgcatcttcctatggctcctcgccatgcaccagcccatggcgcccccgcagcctccagtacgggctgctccccgcgcctccacctctcgcctcctcccccttctccccctcgccgcgcctcctccatgaccccgatgacagaaccagctttgtgatcctcaaatt

SEQ ID NO: 28422 - DNA, 291 bp, Glycine max
  Clone ID: TF_uC-gmflminsoy066h08b1
ggggtcttgtcttatgatcctggagtggggagggggccatggacgatggaagaggacttaatttggatcacctatattgccaatcacggggaaggggttagggactctttggtcaaggctggtgggcttaaacattccggaaagagatgccggctccggtggctaaactaccttcgtgctgatgttagaagagggaatattacactcgacgaacagcttttgatcatgggacttcatgcagagtggggaaacaggtggttcaaaattgccaagcttgtacccggaaggact

SEQ ID NO: 28423 - DNA, 1572 bp, Glycine max
  Clone ID: TF_GmC1225_1
aagactttacattggggggtcattactcattacaagctagtgtcctgaagacttttgcatttagtttggggaagtgcaatattggtcaggtagctaggaagtggtgttgtttttgtgttagtgctatgggaaggcaaccctgctgtgacaaacttggggtgaagaagggtccatggactgctgaggaagacaagaagctcatcaacttcattctcaccaatggccaatgctgttggcgcgccgtgccaaagctcgctggcctcaagcgctgtggcaagagttgtcgccttcgttggacgaattatcttcgtccagacttgaagagagggctactcacagaggcagaggagcaacttgttattgatctccatgccgattgctgtctcaggtggtccaagattgctgccaggttacccggaagaacagacaatgagattaaaaatcattggaacacccatatcaagaaaaaactccttaagataggtattgatcccgttactcatgagcctctcaaaaaacaagctgcagcatcttctcaggatagttcatcctcccctgcagagcatttgccgcaacctggcaataaccttgatgatcaggtcaaagaaactgaagggattcttctcaactcagaggagaattcaagttcatcacaagctgaaaattcttctggggatgattcacttttgctagatagcatttgcagcgacgattctctattaaacagcatgtggctggatgaaactcctctggtggaagcattatgggacacaacacctaaccttgagaatactagtaataacatgggtttgttaccatcttgggaggataattgtgcttggttattggactgtcaagactttggtattcatgattttgggtttacctgtttcaacgagatagagtcacatgcactgcaaacgataggaatgaaggaagaggggcattagcacgggaatttaattgtctatgaaagaaaattaagggtaagatatcaaatctataaatgtgacaaaataccacgggctcaaatttaggttcttggtgttgaattttatctacctagtattttacaaaaatgtttctctcggaaggtggaaggtgaacgtttcctcttgtgaggttcctcgccaaccaaaacacaaaattgatagcaaagcaaaaccaaatcatcatcaaaatggcacagtacgtacgtactttcttcttctaattaaatgctgcatgtatttatgtgtacggtagggacataacaaatgggaaatgtctagtgagtgcagaaacatattgtacaaagaagtctactttgaaaataatggtaaaatcttttgtgattacaagttcacttgtattctctcctttcctgttttactgtcccattaaaaataaatggataaaaacgtagacgaaaaaaaagtcccaagttaaaggaaaagatttttaataaccccgaacttagcttttagcccaaaggtgggataataagtggcatggaaaaattccccgtgattttagggtgggttttctaaccaaatgagtttgttttgaaataattttcccagggttttcccc

SEQ ID NO: 28424 - DNA, 1382 bp, Glycine max
  Clone ID: TF_GmC148_1
aattcggctcgaggcttcagtacttgctacctttctataaaggtagagagaagagaggacccttctcttgcatagttcaagtgagtgagagtgccaaaaaatgggaagggctccttgttgttccaaagtggggttgcacaaaggtccatggactcctaaagaagatgcattgcttaccaagtatatccaagctcatggagaaggccaatggaaatcactacccaaaaaagcagggcttcttagatgtggaaaaagttgtagattgagatggatgaactatctgagaccagacataaagagagggaacatagcaccagaagaagatgatcttataatcagaatgcattcacttttgggaaacagatggtccctcatagcaggaaggttaccagggagaacagacaatgaaataaagaactactggaacacccatctaagcaaaaagctgaaaattcaaggaacagaagacacagacacacacaaacaagttcaaattacaatgggtagatcaccttgttgtaacaaaaatggcctcaagaaaggaccatggacaccagaagaagatgatcttataatcagaatgcattcacttttgggaaacagatggtccctcatagcaggaaggttaccagggagaacagacaatgaaataaagaactactggaacacccatctaagcaaaaagctgaaaattcaaggaacagaagacacagacacacacaaaatgttagagaatcctcaagaagaggctgcaagtgatggtggcaacaacaacaaaaagaagaagaagaagaagaacggtggcaaaaagaacaagcagaagaacaaaggcaaagaaaatgatgagccgccaaagacacaagtttacctaccaaaaccaattagagtgaaggcaatgtatttacaaagaacggatagtaacaccttcacctttgattccaattcagctagtggatcaacaagccaagagaaggaggaaagccccgtgacaaaagaatcaaacgtggttagtgaagttggtaatgtgggagaagaaagtgatggttttggcttcttcagtgaggaccatgacttagtcaacgtctcagatattgaatgccactcttattttcccacagatcatggcaacctacagcaattgtatgaagaatatttccagctcttgaacatggaccatggccaattcgaactgaattcatttgcagaatctttattagattaaaagaatatcaacaaagatttgttcagttcatgaagatcacattgcttacatataaactttgttgatagatcatatgtaaatatatctgtaaatgatctctgagttatgagatcttttttgtctttaataaatatcgccatctaactcaaaaaaaaaaaaa

SEQ ID NO: 28425 - DNA, 1334 bp, Glycine max
  Clone ID: TF_GmC600_4
ggctcgagtaaagttagaataatattccctacaattagcagaaaaaatggttcagcaagaaatccgaaggggtccctggacagaacaggaggactacaaattggtgtattttgttggcatgttcggagatcgtagatgggactttatagcaaaggtatcaggtttgaaggtggagggagactgtaaataaaataggtatgaatatttggacatgctaagttatactatgaagcaccctttaaccacctcactttgttgtaggtttgaatagaacaggtaagagttgcagattacggtgggttaattacctccaccccgatctcaaacgagggaagctcacaccccaagaacaacacctcgtcatggaccttcattccaaatattacctccaccccgatctcaaacgagggaagctcacaccccaagaagaacacctcgtcatggaccttcattccaaatggggaaataggtttgagaaccatgcagaaataattaaactataagctacctaccttccaatcatcatcactcataattttaattaattttttcctaccatacagtactattagtattaattagttctttggcttatgtaattttttttttttagatagaataggatatcaaaagatttataataatttatatacattgagctagatcgtttgacaccttattttgttaattagttactttgaatttttttccttaattactttgatgattcctttgcagatggtcaagaattgctcgcaggctaccagggcgaactgacaatgagattaagaattattggaggactcacatgaggaaaaagaaggctcaagagaaaaagcatgcatcagcagcatcgcctgtttcttctagttgtcaatcttcactgtcctcaaacaaccatgttgtggattcacatgcttccaaagaggttggagaagagagttgttatgacacaggtggatatgatgatggcatgatgatgggtttaattggtggtgaaaaggggtactccatggatgatatatggaaagatattatgtcagaagaagagaacaacatttataataataatcttcaacctgtctatgaagggcatagtgaagagggatgcaacttctcttgtccaccaccaccaatgattatgccttctccaccatcatgggatcagtacaacatttcttctcaacccttatgggtgatggatgaagaagaaagtaataagatgttattccctacactaagtgaccaatattttccttactatgaacaagggaacgcatttctaactggctaatcaggagattctttttttcttttgtcctttaaaaattatc

SEQ ID NO: 28426 - DNA, 697 bp, Glycine max
  Clone ID: TF_GmC1327_2
ctttacttgaaactcagaccaactgacacagagagagagagaagcatagcagacatgggaagagctccttgctgtgacaaagccaacgtgtaagaaaggtccatggtcacctgaagaagatgccaaactcaagtcttatattgagcagcatggcactggtggcaactggattgccttgccccagaaaataggccttaagagatgtgggaaaagctgtcgtcttagatggctgaattatcttcgcccaaacatcaaacatgggggtttctcagaagaagaagacaacatcatctgcagcctctatgtcagtattggaagcaggtaattaaataggttccttatattgatcagcaaaactcaatttgaattggttattgatattaagcagcctctatgatatttaacggtggactttaattacttaatcgatcgcttagaattccttagaacacatatatacatgcaggtggtcaattatagcagcacagttaccagggcgcacagacaatgatataaagaactattggaacactaagctgaagaagaagctccttggaaaacaaagaaaggaacaacaagctcaagctcaagcgcgccgagtcagcaataatcagcagaagcaagatttgaaaagagaaacggagaatttggtagtggcttctgaagtcatcaatcaagttccctattggtcttcatc

SEQ ID NO: 28427 - DNA, 934 bp, Glycine max
  Clone ID: TF_GmC341_2
ttgatcccctgtatatataaccactcttcctctcctccaaattaaaacacttatcatggatgttaagaaaggtgggtctgtagtacaagcacaagtgaagttgcagaagcataacgaaaaggagatgggcatgagaaaaggtccatgggcggttgaggaggacaccattctggtcaattacatcgccacacacggtgaaggccactggaattccgtggcacgatgtgcaggtctaaggaggagtgggaagagttgcagattaaggtggctaaactacttgcgcccagacgtgcggcgtggaaatatcacactccaagaacaaatattaattctcgaccttcactctcgctggggcaacaggtggtcaaagattgctcaacagctaccaggaagaacagacaacgaaataaagaactattggaggaccagagtgataaaacaagcgaagcagctaaagtgcgatgtgaatagcaaacagttcagagacacgttgcgttacgtttggatgccgcgcttgctggagcggcttcagcccacatcacaagcactggagccaaaccaaagtggacttgtgttacacgcttcatcatcactgcttccttcgaattccgaccatagtattgaaagggggtcggatctgtggccaggtttcaataaccaaatgttgttggaacaggggagtggcggtgacttgttggaaagtttgtgggatgacgacaatatgtgctttttgcaacagctttcttatgacctccaaatgaaataaaatacaattcccttccgtcacgcattctgcaatgcacagtgctgaaagttgagcatgcgttcaatgaatattgttttcctcactttcatgtacatattaaatcttagagactaaactagtcacgtgcctaaaagttgataccagttgaaataatatggtttattaatc

SEQ ID NO: 28428 - DNA, 1770 bp, Glycine max
  Clone ID: TF_GmC6838_1
ctcgagccgttttcacattttcatataacctcttgtaacctagggctaaagctacaccctacaacttcccctctttgtgctttcctaaaccttgtatttatataattcatcttttataattttattcgaattcaaatataataccaaaaccgatccttgtttggccattggctctctacgtactagcggtttgaaacatttgagactcaaagagtaagttatatatatatatatatagagagagagagagatagagagaagaaattggagatagacatggggcatcactcttgctgcaacaagcagaaggtcaaaagagggttatggtcacctgaagaagatgaaaagctcatcaactatatcacaacttatggacatggttgctggagctcagtcccaaaacttgcaggcctgcagaggtgtggaaagagttgcagattaagatggataaattatcttagacctgatttgaaacggggaagcttcactcctcaagaagctgcactcattatagaacttcatagtattctaggaaacaggtgggctcagatagccaagcacctacctggaagaacagataatgaggtgaagaacttttggaattcaagcataaagaagaagctgctttctcatgatgttgttccttctttagccacattttctgatcatattcacggtcctcccaatggttccatggaaagtttcttccctttaactgacaaccctatcctaaactcccatcatcacttagaccagctattccttcccatcatcccatccccaatcctccaagcctttgatcatcatcaccataataatgatatcaagattgacataaacaaattttttaataataatgccaatttcctacaatattttcagaatccaatgccggaaacagtgcctccaatatccaatactactattccatctttgtatgaagaagatgcatggtcttctttggggtgtgtacctattcaccttaatccaaatcaagaaaatcaaatcatgatcaccaaaagtgatcatactaccccacacttgattgttgagaaattcatcaatccaagtacatggcagcagcagcagcactctgtggaagtggaaccccccattttgccaaaagtctgtgagagcattgaggattatgtctgtagcatcccatattcttcttctgttaattcacaagaccaacatgtggaagctgttgcgtgtttcacacctgttatttgtccacaagatcaagtggagtacattgatgccctcatcatgtcatcattgccatcctcaacaacaacatcttcatcagtagtatcattcttccaagcagacaaatagtcacaaaacctatcattccttcaagttaattggttgtcgtcatgagcattggttactatatcatataataggttaattttatgtgtatataattgagtagtgggagagagtactctatttatatttgtgataagcagaattaattccatgcattttaagggggggagaacatgcatatgcatttaatttttctcttgaattttggaataagagggtgagtagatgctcctatcggcaaacctctgagccttgctagttcaggctcgatcttccactgaacgatgtttgctgaagttccataaatatgtacgtctaggttctttcacatgtttgtcgaccaaaagtacgtatccgtgtatgattattgtttctttgtgaagtgctgtatgttgtataacaatcatacgatgcatagttgtgcactttaagttg

SEQ ID NO: 28429 - DNA, 574 bp, Glycine max
  Clone ID: TF_GmC175358_1
gcaaaacatacaattctatattattttatttcataattgatacattacctattgcctgaaataaactgtatcacattgtttattacatttatcactttttttatttccctctgtccctcttatttaatttccactaaactcccttaaaattaaaaaataggatttacaatttcataactcttttcaagcttgtgtaacttgataatagtttcctcctcttccttggtgtagtttcctcttttgaggtttggccttaggtaattaagccaccttagtctgcaactctttccacatctcgcaagacctggcaaattaataacaacaacaacaaagtaaaaccaattacaatggattcatatatgatttagctataatttgtgcatgtgtataattaaacattgaatatatggttcctacaaattcatgtagaagttaaaccaaaccttgaaaacagagaagaagaaaaattgaaagccacattggcgactatattgatggtacatactctcacatacttaatttgtttctaaccaaactatttggtaagttccatttccacctggattgcatgaaa

SEQ ID NO: 28430 - DNA, 712 bp, Glycine max
  Clone ID: TF_GmC78832_3
aaatgttatgatgcatgcagaaaaaagccctgcaactctcaggagttctgatcaggagagaaagaaaggggttccttggacagaagaggaacatagacgttttcttatgggacttttaaagtatggtaagggggattggagaaatatctctcgcaattttgttgtgacaaaaactcccacccaagtggcaagtcatgctcaaaagtattatataaggcaaaagctttctggagggaaagacaataaaaggaggcctagtatccatgatatcaccattgttaatcttacatcagatcaagagaagcctcttttattcaatgatgagtctcacatgacttctgagcaacagaagctaactagcatgccaaaagtacaacttgaatggcggattaatcaccacaacaatggcgggtcaaattatgatatgttcgtgtcacctaattcatctggcatctcttccaagaccctcaagttgcaagggcaggatttctatgaatgtgcttttcatgagacttatgccaagcttaaaaatacgggtttcaggacagcttctagagacttcaacaaggaagctatttttggtattcatgcactgtaatgcccactttgatcatgttatgaaaaacatacaccaagggtacttgttttatgttacgaacataaataatgtttcattccttcaactgttttggaatgaacccttttccaagtt

SEQ ID NO: 28431 - DNA, 890 bp, Glycine max
  unsure (1)..(890): unsure at all n locations
  Clone ID: TF_GmC73535_1
actcctcctcctcctcctcctaccctttcattttcatttcccacatttctctctctctctctcctatacttcctctttacactccccatctctctcacttttcattttcatctccattttttttctctaaaactccaatttcccattttacccctcactgtccccacgcgtccggccctcgctccgattcctaggaacagggttttcagttttcactgttccattaagtttccgagctcaattcagcttccgattcgccgcgcgcaaaacgacttcgtttttggattttggcgtcgcgtcctattcagaagctatatactataagatgagacgaatgaagaaagatattgaagatgaggtgcttcccaatgatatgagtggggcacagttgaatgatgagagttatgaaggaagtgctggcattgttctgaagaaggggccatggacatcaactgaagatgatattttggtggattatgtcaagaagcatggggaggggaactggaatgctgttcagaagcacaccgggctgtttcgttgcggaaaaagttgtcggctgcggtgggccaatcacctaaggccaaatttaaagaaaaggggcgtttgccgcagaagaggagcggctgattgctgaacttcatgccaaaatgggaaacaaatgggcacgcatggcagctcatttgcctggtcggacagataatgagataaagaactactggaacacccggatcaaaaggcgtcaacgggctgggttgccactttatcctccagaagtgagtttgcatgctttgcaagagagtcagcatagccaaagcactggtggacttaaatggtggcgataaaatgcatnctggattcttgcagaaaaacagttatgagatacatgatgc

SEQ ID NO: 28432 - DNA, 1926 bp, Glycine max
  Clone ID: TF_GmC794_1
ggactacgacccttctcatggggcctcgctcttatattagttcaacttcttttctcagctgccagttcattttccttcttcatatcatctctctcactgtcacatgctctctatctatcccagccactccaatagctttggttcactgccacccctgctgacatttttctcgttggaataaacaaactttgtgttaacttaaaaggtttaagggaaaaagaaaaactacaaaatgggaaggcactcttgttgttacaagcagaagcttaggaagggtctttggtctcctgaggaggatgaaaaacttctgaggcatattactaagtatggtcatggatgttggagttctgtgcctaagcaagcaggtctgcaaaggtgtggtaagagctgcaggcttaggtggatcaattatttaaggcctgatttaaaaagaggaacattctcacaagaagaagaaaaccttatcattgaacttcatgcagtattagggaacaggtggtctcaaattgcggcacagttgccggggagaacagacaatgaaataaagaatctgtggaactcttgcttgaagaagaaactgaggcaaaagggaatagaccctgtcacacataaaccactgtctgaggttgagaatggagagaaagcagcagaagtgtctaatgaactgaacctcctgaaatcagagagctccaagtctgattcagcatcctatgagcagagaacatcaatttctccaaaagcctatgcacctgagatggatggttcctgcagctccaagattgaaatcaattttgtaaccaacaacaactgttacaacaaagacttgttcctagacaggtttatgagtagtagccgccaagagagttacaccactagttgccagccctcagatttgatggggaattttccaattcagatgagttatgcaaccaatgatcactgtctccctaatgattcaaactctagtcattggttcagccaaactggaaggtcttttgatatgaacactgacgtttcctttcaatgccgctgtcacttctatcaatcctacacctacaaccaacttgtttcttcctaataattctttttgctacaagccttcacttgctgttccctctgacaatgtttccataccctatggatcccattactgggaagccagtgcctccaacaacagcaatagtagcacagaattgagaagtagcagccccttgaacatcttttcttcttggggattggcagattgtggcacctctactactaaagaggcacaaattcatatgatggagaatcataatacagaagaagctaagtgggatgagtaccttcataaccctatctcaatgctggcttcttctgtacaaaaccaagctcctgagtctctatgcaatgatataaaaacatccatgcatttggtacctgatactttaggggctatgctacctcataaccataccaagcagcaagaacagtctcaaacttctagtttcttttccaaggacatccagaagctcagggcagcctttggacacatgtaaaaggattttagaaagggttccaattcaagggattgctattcttagtacaggtgtgtgaaaccacagattttttgctcttgtatgtaggtctaatacaaaacatttattttcaccttttgtttttccttcactttgtttaacatttgtgagccaaaaaccatttgtcttttactttcttctttcgggtgtggggtagaattgaagaagaataagggttgctattctgtcttaaatctactctttctttgctacactgtaaccgcaatggtgcattttgcagtgtccaagttcaaagccatcacagattttaattggtccatgcaaagtttcatttccattttgagtgccagggacagagttactttacctgcaaacaattttcagaatc

SEQ ID NO: 28433 - DNA, 502 bp, Glycine max
  Clone ID: TF_jC-gmXLIB3563P066cf08a1
ggataatagctttgggcctatctaatagcacacaataataaggaagatccccatgctccgatgataatggcctttagaaaggtccctggactcccgaagaagatcataaactagtccaacccattcaaaaacatggccctggaagtaggagagccctccctaagatagctggtctcaataaatgtggaataagatgtgggctaagggggactaactatttaaggcctgatatcaagaaggggaagttttttcaagaagaggagcaaacaatgttgcatctccattccatccttggaaacaaaagggcggcaatagcatcccaccttccatgcaggacagatcatgagatataaaatttctggaacactcccttcatgaaaaagctgatttcagatgggctttgattcaatgactcaccagcctacaactgaccttgtgtgcaccttgactcatttggtagctttgggcaacattacagacctcatgggccattttacattgg

SEQ ID NO: 28434 - DNA, 1911 bp, Glycine max
  Clone ID: TF_GmC567_1
gcgtaataatcctgtttaattaactaaaggctagcttcataactcttcccctcaccccaccaaaacaccccctttagtttcctggtattcttcttccacgtaggtttaatttggaggacacaagagttttcaaagcatcattggtggtggattgaaagacttggtgagtgacatcgtacacatgggaagacactcttgttgctacaaacagaagttacggaaaggcctttggtctccagaggaagacgagaagcttctcaatcacatcaccaaacatggtcatggatgttggagctcggttcccaaactagctggtttgcagagatgtgggaagagctgcaggttgaggtggataaattatctaaggcctgatttgaagagaggagcattctcacagcaagaagagaacatgattgttgaacttcatgcagttcttggaaacaggtggtctcagattgcagcacagttaccaggaagaacagacaatgagattaagaacctatggaactcgtgcctgaagaagaagctgaggcaaagaggcattgacccaaccacacacaagccactctctgaggttgagaacgacaaggacatgaatatgatgccaccctcaaccgacaaaagcactcagaaagcctctgtgggatccaatgaagtagtgagtaatttggttgatcatcatcagccaccaaaaaccatgcctaattcttcatcagagagataccctcttgaagtttccactactagttccacccaggaactgttcctagataggtttggcaccacccccaccacctgccacgaaaacaacaacaacacttctgatttggtaggatcatacttctccttccagcacttgaactatggaacaacaacaagcatggccctctcttcaaaccccaacacctctctttgtttcattctaccctccacttcttcagacattaataataacaactccatcataacctcctcctccatgctcccttcaattttcccaacacaacatgtgaagctccaatctaataacaacaacccttcttccatttcatctgatggggttcaaaactgggaaacaagtaacaacacaaacaaaaacaatgggaatatgcagttacaaagtagcacaaactaccttgacagcacgtggggggtggcagagtctatgaagattgttaacattaacaaagaggctcatgtagtgcctctacaagcagaacaagaagatctaaaatggtctgagtatctttataccaataccccgtttattctgggaaacaacacagcgcagaatcatcaaattcatacctctcaatctatctatagtgaggttaaaccagaaacaggtttcataacagacgagtcatgtgctacatggcaccattatcagaatcagacaccagctttactttccgatatatatagcaaggatctgcagagattttcagtgactttcggacaaaccctgtaacgtgtgtgtacgtaattaatatatgtggaaaattcaattcaacgaaagagaaaagatgttgccgacttaattttctaaccaatatgatgatgatccaggtcagaattttctctagtgagttctgaccacaggtgtgtgcaaaaaaaaaaaacttcctttctttctttctatattgtaaattttgttacagtgtaatatttgtgattaattccagcttcttattccacccaccattttgttaatcaaacatttatgtagaggcgctactgctgaataaggcttgttccaatccaaggcttctcttctcctcttacaaaatattcttcagttgttaattatggatgtgtagcttgtgagttgtgagtttttttttttttttttaattcgtgtgtacacagttgacagcattaattgttatacattttttttaccttaattcc

SEQ ID NO: 28435 - DNA, 1013 bp, Glycine max
  Clone ID: TF_GmC1102_1
gaaagatattccaacaccatggtaagagctccttactttgataaaaatggaataaaaaaaggtgcatggagcgaggaagaggataagaggctcatggcttatgttgagagacatgggcatcccaattggcgtcaactaccaaagtttgcaggattgcaaagatgtggaaagagttgcagacttcgttggatgaattaccttaggccaaatctaaaacgagggaactatacccagaaagaagagcaaataatcaaggatttgcataaaaagcacggaaataaatggtctctgattgctgaaaatctccccggaagaacggacaacgagataaagaactattggcacagcaacctaaagaagttcctaaagggcaatgagaacaccccttgtgatgatgatgatgagttaaagtccactgaatgcaaagagtttgaaaggtcaatgaacaaggctcatagtgctgattcccaccacattctggagagttcagtgtccatttcctcagaaacttcctacactgaaggcaattccccttcattctcctctagtcatacaacagaatcatcaaccctttccaaggaagaagatagtgttgtttcatggcaaacaatggatgtgcttagtagcaatttctggactgaaccgtttatttcagaaaatgctcttaatcaagactactttcccatttcatcctacggaacagaaccatttttcttgtggtagttgtgaacagttgttctaccaagtggctctagaatttccatagagttatacagcaaatagtgttgcatttttgctagtaagttcttgaaatttgaggaatttgggggaacttagtcacctgttatttcttaatttccaaatgaaggggaaaaaagagaaaaggtttgtgtcagcaactttgttttgcagaacaagcactcaggttatggagagaatcagaatatgttgtattttatacatgatacagtgaaaaattacagaaccaattgcataaaaaaaaaactcgagac

SEQ ID NO: 28436 - DNA, 1222 bp, Glycine max
  Clone ID: TF_GmC5525_1
ccaccacctcccatttatattcccttctctcaccaattactttccaggttccattccccccacacacaacacaacacaaccaacatatcttgttgttatttgctctctctcaaaccatgggaagatccccttgttgcgagaaagaacacaccaacaaaggagcttggaccaaagaagaagacgaacgcctcatcaactacatcaagctccatggtgaaggctgttggagatccctccccaaagctgctggcttgctcagatgtggcaagagttgcagactcagatggataaattacctcagacctgatctcaagagaggcaacttcactgaagaggaagatgaactcatcataaacctccatagcttacttggaaacaaatggtctttgatagctgcaaggttacctggaagaaccgataacgaaataaaaaactattggaacactcacatcaagagaaaactctacagccgcggaatcgaccctcaaactcatcgtccactcaacgctgcctccgccactccggcaaccaccgtcacagccaccgcagttccatcttctaacagcaagaagaagataaagaacaataacaacaacaacaacggttttcagttggtgaataatagtgcttatgccaacacaaagattggaaccgacatgattgctgctgaagattctaacagcagcagtggcgttacaacagaagaatccttccctcatcatcaactcaacttggacctttccataggtcttccttctcaaccccaagtttcttcttcgttgaacccagaaaagttgaaaccagaaccgcaagagcatgatgatcagaagccacaggttttgtaccagttgtatgggaagaacatcactggccaacaaggtgtgtgcctatgttacaatctagggcttcaaagtaaccaagcttgttattgcaaaaccatgggtacttctactactacggttactaccacaactgcgaccgataggaatctatatagattttacagacccatgaacatttagaccttaaaatgtcatgttaattaattattgtgacctctttgttaacatggaaatagttgtagaatcccaaaattttgagaaaatttagatcattttttgtgtccgagaaaatttagatcatttttgggtctaatttttttcattttggttttaatcttttatttatgagattgaattcaatttttgacccttaagttaat

SEQ ID NO: 28437 - DNA, 680 bp, Glycine max
  Clone ID: TF_GmC16783_2
ttcgggaaaacacacttaattttttcacgccttcaatacaccacactcttctagctccttgcaatggctgactcggatcgctcttctagtgaagtttctacacattctactgattcagggaagcgagggtcttccaaagttgaattttctgaagatgaggaaactcttatcatcaggatgtataaactggtaggggagaggtggtctttaattgctggaaggattcctggaagaacagcagaggaaatagagaagtattggacttcaagattctcaggttctagtgaatgaggtgccaagagttctactacgattggtgttcagtctaggatgagcaagaagattttgggtgcaagattagtgtgattttgtgggacataaaaactgaattaaagttggccttattttataggtatttgtatttgtattggctataaaaaaaaaaagtggggcagcaactatagaagctggtttgtgtaatattttccatcttgaaatgttgcctggtgtgatattttccatcttgaaatgttacttggtggttggtcttatctgaattgtacttattgatgttcaccttcgtgtatttttcttattcatttaccattttgggtttttatcttgtgtctgcaatctgtattggaagagtccaactatggaaatgagaattaattagagat

SEQ ID NO: 28438 - DNA, 681 bp, Glycine max
  Clone ID: TF_GmC100_2
ggaattgaacactggggtcaggatcatcaacctagctagctagtgtatacaacaacaatatgaggaagcccgaggtttctggaaaaaacaacaacattaataacaagcttagaaaggggttgtggtcacctgaagaagatgacaagctcatgaactacatgctaaacagtggacaaggttgttggagcgatgtagccagaaatgcgggccttcaaaggtgtggcaaaagttgtcgccttcgatggatcaattacttgaggcctgatcttaaacgaggtgcattctcaccacaagaagaggaaatcatcatccatttgcattcccttctcggaaacaggtacaatatcctctacacccttcttttctacctacatatgcatgtttttattaccatatttgtatgatcatgcatctttaactatatatgccataatgcattttatacttaattctatatgatcttcagtgttgcacatgtattatgtatttgtaaatccaaatatacttatatatacgagcgtgtgtacgtatctcaattatttataatgcaaatccaaagtaattaagcgtatctgacatttctaacatatgtaacacccactagctccttctaactttagccatcgtctttatttgaaaaagtgaaagggagatagatgcatgattaatatgtttgaaaag

SEQ ID NO: 28439 - DNA, 1518 bp, Glycine max
  Clone ID: TF_GmC1274_2
gctcgagctcatgcaagctgtgtctctcttctctctcttatattaatcactcactcacacattcgccacttccacacagcatagatcacctttccttttttcccacagaaaaaaacaccacctttctttttccgactaaaggttcgccggaaaatgcctctatcctcctcttcctcctccgccgtagactccgccgtctccggcgagatcatgctctttggcgttagagtcgtggtggactccatgcggaagagtgtgagtatgaacaacctctcgcagtacgagcttcctcgcgacgctgccaacgccaaagacgacgccgcaggatacgcctccgccgatgatgcagctccgatcaactccgacaagaaccgcgaccgcaagcgagggattccatggactgaggaagagcacaagctattcttggtggggttgcagaaagtggggaaaggtgattggagagggatctcaaggaactatgtcaaaacgaggacgccaacacaggttgctagccatgctcagaagtactttctccgccgcaccaacctcaatcgccgtcgccggagatccagcctctttgacatcaccaccgactcggtctctacaacccctatggaggaaggagtacagatccagcatcaagataatgtgtctctctttcatccagtgtaccctgtaacccctgaaggaagcaacatgaatggatttccaaagatgtccatgtatccaaaggatgttggttctggagtcatgtcagttcaagctgggaatccaatggaaacactcactttgggacaaggaaatgtggaaaaacacaatgtgccaagtactgctaacaaggcctctacagtgtctggtatcatcacccccggttcttctagttctgccattgacccaccaccgacactgtccctggggctatccttctcatctgaccaaagacagacatcatcaagacattcagctttacatgccatgcaatgtttcagcaatggagatagcatcattagtgttgcttgagaatatggtccttggattcacagattaattacatatattaatatttctctagtttcctgtctttttggtgggagaaagagaaagaggttgaaggaaagggcgatggattagagaaggcaagaagagttttaacagactgaatttgatccttctgttccttgtacagaccccagaaaaggtcctgtcctgtttcttcttgtttgcttatgttaattaatgtcatgactttagattcttgtttatttggccgtttacgtttgtagtagttgatgtaactgaaaataacaaagtacactctgttctttgctgataatgtattaacgttcgatatgaactttcactgatgaggtctttgtggctcctttcagttggtagtctgtgtcattcctgttaggtgttagcagttggccacgtttattttttctcatgaatttgggtagctgcagtagtatcataattgttttcgagcaaatgtaaatgttggtcgatttacatgtg

SEQ ID NO: 28440 - DNA, 526 bp, Glycine max
  Clone ID: TF_jC-gmst024169f06b1
ccacgcgtccggagcggacgacacgaagcggccatagccgcacgttgggatcccctccgctacgcctctcgatggtctccgccagcgcgccgccgccgcaggcccagtccgacgcggccgggtcgggggaggaagtgagcaagaaggtgcggaagccgtacacaatcaccaagtcccgggagagctggacggagcaggagcacgacaagttcctcgaggccctgcagctctttgatcgtgactggaagaagatagaggcttttgttggctccaagactgtcatccagattaggagccatgcacagaagtaccttttgaaggttcagaaaaatggaaccagcgaacatgtcccacctccacgaccaaagcgaaaagctgcccatccatatcctcagaaggcttccaagaatggacacattttcgtcatttccgaagagaagatgtctcaagacaagaaggcagttgctgagacgaagctaactgaagaggaaaagcttcttgaggagaagattgctgggtttggtga

SEQ ID NO: 28441 - DNA, 3131 bp, Glycine max
  Clone ID: TF_GmC1050_1
ctcgagccgattcggctcgagatcagagataatcaattttacaagcaaactgctttcagaatcccaagttaaagtgcagagaaacaccctgaaaatgccagcattaattttggatgaaaaagagaagatgatttccaagtttgtatccagtaatgggttggttgaagatccattggctatcgagaaagaaaggactatgatcaatccttggaccccagaagagagagaagttttcttggagaaatttgctgcctttggaaaagattttcggaaaattgcttctttttttgaccacaagacaactgctgactgtgttgaattctactacaaaaatcataagtctgattgttttgagaaaattaagaagcaagatggtgataagcttgggaagtcatattctgccaaaactgacttgattgcatcaggtaataaaaaattgcgggcaggaagctcacttttgggtggatatggtaaagtgaagacgtataggggtgaggacttcatagagaaatcaagcagttttgacattcttggggatgaaagagagactgaggagttatggttattgggatgggaaccgaatacagactggtctctcgacattgcctgattctgccatcttgctagcaaagtatcctgctgccttcagtaattatcccacatcttctgccaaattggagcaaccatcattgcagacatattccaagaataatgaacggctcctgaatggtgcacccactttgacgacaactagagacatcaatggcagcaatgctgtgattgattatcagttgtttagaagggatggtccaaaagtgcagccatttatggtagatgtcaagcactgccaagatgtattctctgagatgcagagaagaaatggattcgaagcaatctcaagtttacagcagcagagcaggggagtgatgggaatgaatggtgttggaagaccggggattcttgtggtgcaatcgtgcggtagagtgacacagatgatgcatgtgttgttgagacaggctcggtggttgaaactgataagtctggcacttaaacagatgaggaccttcatttgtatggcacaaacacataccatgatgaatcccatcctgtggaagctaggaacctgtcagctgaattaaatgaatcaaaggaaattaattggacagaagtagatcttgaagatgcaaatgtcacttctggtgcttgtcaaatcaatattgattctaaacagggctgtgatggtagtgaagttttcttgtgtggttctaacaagtctggatctgttggtgaacgagcagatataattatgtcagatagcacagaagttgaaaatgataaagcaaataaattgggaggtgcagctacagaattgatttctgctccaaatacaagggaaccatgccagagtaattccattgctgaggatagaatggtggtttctgaggtatcttctggcggtcttggaaatgaattggagaggcatagagtgtcttctaccctatgtgttgatgatagagataataagcatgaagctgattcaggtgttatagttgatatgaaaagctctgtgcatgatttaagcactatgataaattcttcaatctcatctttgggcaattcttgttcaggattgagttttagttctgaaaataagcatgtgccccttggaaatcctcgtgtctctgcattgtctatggacaaccttcatgcacttttgcaaaatacagttgctgttgatgttcaatgtgagaaaactgctagccaagatcaaatgtcctctacttgtgatattcggggaggtagagatatgcactgtcagaattccattagcaatgctgaccatcagcatattactgggaatttatcagaccacgttgatgctgttagcattctccagggatatcccttgcaagttcctgtgaagaaagaaatggacagtgatatgaattgcaccagttcagcaactgaattgccttttctgccccataagattgaacaggatgatgatcatatcaaaacattccagtcgtcagattcagataaaacatccagaaatggtgatgtgaaactgtttgggaagatactaaccaatccttcaaccacacagaaacctaatgtgggtgctaaagggagtgaagaaaatggcacccatcatcctaagttaagcagcaagtcttctaatccgaaaattactggccatcatagtgctgatggaaatttgaaaattttgaagtttgaccataatgattatgttggccttgaaaatgttcccatgaggagttatggttattgggatgggaacagaatacagactggtctctcgacattgcctgattctgccatcttgctagcaaagtatcccgcagccttcagtaattatctcacgtcttctgccaaattggagcaaccgtcattgcagacatattccaagaataatgaacggctcctgaatggtgcatccacttttacgactagagacatcaatggcagcaatgctttgatcgattatcagatgtttagaagggatggtccaaaagtgcaaccatttatggtagatgtcaagcactgccaagatgtattctctgagatgcagagaagaaatggtttcgaagcaatctcaagtttacagcagcagagcaggggaatgaatggtgttggaagaccggggattcttgtgggaggatcttgcagtggggtctcagatcctgtggctgcaatcaaaatgcattattccaattctgacaagtatggtggtcagactgggagtattgcaagagaggatgaatcatggggagggaaaggggattgactgagacaggtagtagattgtgctgagcggcaaacacctctttttgccgcactcctgtattatagtttctgttatttgctcaatacagtgtagggtgatttaatggttctcaagcccgtctttttggtaaaatatttaggtgcttgtaatatggcagcagctttgtatttgttgtatttgatgaaaatacagaaataatctctgaaaaaattaggaggggcgattgccattgccaattctggatcctttgctgccttcactcacctgctcattcttacagttacaaccggttgtctggataattgacaagttttgacggttc

SEQ ID NO: 28442 - DNA, 1141 bp, Glycine max
  Clone ID: TF_GmC934_1
accaggagaaccccatcttgtgacaaaagtggaatgaggaaaggtacttggacactggaggaagataggaagttaattgcatatgttactaggtatggctcctggaattggcgccaacttcccaggtttgcaggtctggcaagatgtgggaaaagttgtagattgagatggatcgaatatctaaggcctgatgtcaaaagggggaacttcactcaacaagaagaagaattcatcatcagaatgcacaaaaaacttggtaacagatggtctaccattgcggctgagttaccaggaagaacagataacgaaataaagaaccattggcacaccacactcaagaagaggtctcaacaaaacacactcacaaaggaagaagctagagcctccaaatcaaaggataaggtacttcccaacaagggtgttactgttactcttccagctacttcttcccagatttcagataattcatcattatcgccagcttcatccaccagcagcgagttttccaacataacttcagatccttccactgctgccagcatgcaaaatttggtgtttgaagatgatgatgagttcggttttctggattcatacattgatcctatgaataatgaaagtttctggaaagagctaactctggatgacatttcctttaataatgtaccaatagtttcagaagataccaatggctgttttcaaagtacaagttctagcaatagcaacacccttgattctctgcataaatcaaccagcgaaagtattgttgcggataatgactttggcggctttttcgatgcatacgcagaagcaaccgttgacaacttttggacacaaccatatgtggctggcatgtcctcccacgttccaactgaactacttgctccctccgttgcagaatctgaatattttactccaatatatgatgatctgtggggccaaactcatttgtattattagcttatattctgatatacaaaaaatagtgcttgttcagtttgagagtaactactactattatacacagtcatgaataatgataattattgttacttattgcaggtgtgtattagtcgggttaataaacgagagtgtatatatatataaataaagtatgtatattgaagttgctttagggtaaaaa

SEQ ID NO: 28443 - DNA, 2306 bp, Glycine max
  Clone ID: TF_GmC156_2
ccacgcgtccgatttttcctacgagaaaatagaacttcaacgtctgacgtgtcaccctgtcgttgctccttccttcttttttttcctcacaacaatcacaagaagcactttcggagtctgagctttcacttcttccaacttcttcatctatctatatacttctcttgtaacctctcatctttacaataacactttttccctcagaaattaaccgtttttcctttctgggttttgtataattttgttgattttccattccttctatttttttgctgctgctaagtagcagtggtatgtatgacttatgagctttgagcctctttatattttgaaaagaagattggaattttttttttcttcttttgggaaaggcttctagtggttggatttttgtccatcaagttattgatcgaggagggggttatcacttatcaacctttggtagtgcgtgatcacgggatcttgtagatgatggagagggttttttgtgctttgtgattctgagatgtgaattaatggttggtgaagtaaagaatcaaggcagagtttgcatgataaatttgacttttggatcgaggtgggtccatttttgtacacaatttgttgtttgattctgtttccagctttctaagggagagatgggaggagggtggaacttgtgattttcttgtttgtgttggacttttcttgatttcggaattcgtatccagaagcagagagagaggtggacagatgaagaacataagaagttccttgaagccttaaagctatatggcagggcctggcgacggattgaagaacatgttggcacaaagactgctgttcagattcgaagtcatgctcagaagtttttttctaagattcttcgagagtctagtgggaacagtacaaccttggaggagtcaattgaaattccacctccgcgaccaaaacggaagccaattcatccttaccctcgtaagctagttgagtttccaaagacaggaatttccaactcagaacacccactgaggtctaattctctgaagtcatcagattttggtcaagaaaacaattctcccaagtcagttttatctacagttgtttcagaaactgttggttcctccgattcagatacatctagtcgatgtttgtcaccagcctcatccattagtggtgtccccacaaacagatttccacttgctgagcccaaaacatcatttaaggaagaagggtctgcaccaagttcagctcatgatgagcaacctcctgtgaaactggagttttttcacaaagaaagtgtttctaccagagatgatgcaacagaagaatcatctggtcgtactctcaaactttttgggaccactctactggtaacagacacatgcaaaccttcttctccaacaacggagccgtgcaaaccaacacctgcggctgcaatgtatcttatgcaacttcagaatgtttgttcagatgttacagaaggtcatgcttctattgttccttggtggactcttccccacaatactccatttatgccactgcacaaggagccaaaagggaagcatctatattctaatcttggagagtttgaacataaagaagttcaaaaggaaggatcatggactggttcaaacactagttcaattgatgatggagataacactgaaaaatcagatgatcaagccaaaagtcatgtacatggttttagcaaaagtgaaactttaactatatctgagctaagggtgaggcctaaaacatgtggaaaagggtttgtaccatataaaaggtgcatggcagagagggaaaaccagtgctcatcagtatattatgaggaaagggaagagcaacgtattaagctttccttatagtaccctcttattggcttttcttcaaagcagtttcccttttacaggtataatgtacctgtttctgttgctggatgaccttgcatgagaagaaagataagggagctgaaatttttgatatttctactgcattgttaattctccacaagcctgtgtgttaacctatatgagcttcaagactttgggagaaacactatccagtgaattatcccacctttttatatttcttcatgcctaggccttttgtatttcttcaaattctttctcccaccctccactcggatatatctagtgctttttttctttttaattctaattgtctttcaagtgtaagttacatacttatgtatcgcttattagtgtagttgttcatatttctcaaatgaagcaaattattatactcaaatcagctgaagttgaataaaattgtacttagtactccttccttttgcgacatta

SEQ ID NO: 28444 - DNA, 807 bp, Glycine max
  Clone ID: TF_LIB5118-056-A1-PF1-A5
aatcttactttatcttcaagtcgaggaccttgggcgaggcactttacattggtcaatcagtgttgtagttggtttcccttgttcaattttcctcactttgatcgacagcactcgagcttgttttagattttaataccccgacgacttccatcttaaaatgcctccatcaaagcgttcaaagcacagacgtatgggctctaacacttctacggaagagaagagtgacttcgaagctcgcatgaagatccctgccgagctcgttaagggcccttggaagaagcaagaggacgaattgcttgcttctctcgtggaggaacacggtcctaaggactggtcaaagatcgcaaacaagatggcgcagttgggtcatgttagaatgggaaaacaatgccgagagagatggttcaatcatttgagtcctgaagtccgtaaagaatcctggaccgccgaagaagaccgagttattatcgagtctcaccgccagttgggcaacaagtggactgctatttcacgcctcctgaatggccgtcccgctaacgcgatcaaaaaccactggaattctactttgaagcgccaagttcaattcggcgctgaaattggctccggcagccctagacccggcaagagacaacgcgccactgtcggtcaccagccccgaaagaagagaagactcgacgtctctagctatgagtccgatgaggactttgactccactagcgatgagatggatgacgacgattctgagttggtcacatacgagagccgaaacgaggatcaagaagatcagcgcacctttgctacttcccc

SEQ ID NO: 28445 - DNA, 1387 bp, Glycine max
  Clone ID: TF_GmC1121_1
ctcacagatggaaccggaagaaaccgccgccgccgccgacggaagcttcgacgaggggctgctcgggctagacgacggcggcggcggcggcagggacagagtaaagggtccgtggtcgccggaggaggacgccattctaagccgtctggtgggcaagttcggcgcgagaaattggagcctcattgcgcgcggaatcagcggaagatccggcaagtcatgccggctccggtggtgcaaccagcttgaccccgccgtcaagcgcaaacccttcaccgatgaggaggaccggatgatagttgctgctcatgcaatccatgggaacaaatgggcagccattgccaggcttctaccaggaagaacagataatgccattaagaaccactggaattccactctgaggcgtcgtggagttggtcatgatacgattaaattagaatctgtcagcttcatggaagatgttagcttggagaaagcaaaagcatcatcggaagacactctatcatgtggggatgtttctttgaaatcctcagaagggagagatgtcagttctatggagatcatggatgataaatctgatgacaaagcacaaactgagggccaaatacaccatgaagtcaaggacctacctaccctttttcggccagtagcacgcgtgagtgcttttaatgtataccactcatttgatggtacacagccttcaacatcaattaaaagacctgttccgatgcaaggagctgttttacaatcatcaaaaccagacatggaattttgtagaatgcttgaaggaatttgtggtgatcagtcagtgcctcaccagtgtggccatggttgctgtgctgctccagatggtagaaagtccgaaagctctttgttgggacccgaatttgttgaattttcggaacccccatctttcccaaattttgagttggctgcaatagctacagacattagtaaccttgcttggcttaaaagtggattggagagtagtagtgccaaaatgatgggcaacacctctggaagggtagtatctaatggatctcaagtacatattggccattaaaatgccaaatagatcatcattcctattctgagtgaggactggataatgggtatgataaaagctatagtgatggcaatctattttccttgcaaatctaattaggaaatcaaagttatgtgtgaatcactgctataatgtaaatggattcactaggtaaaaggaggttcttggactgttgaccgattaggacttgatttgggaacctgttattgctaacaaatgttcgttgtagaatagggggaaattacttgcatttcaatcggtttgagttgctgctgttcactttctaagagtgagtagctcgtttaaattaaaagccccttagag

SEQ ID NO: 28446 - DNA, 510 bp, Glycine max
  Clone ID: TF_jC-gmXLIB3563P057bh11a1
ggttctctttcatccgaggctatgagttcctgcataacaagttcagttgatcctgtagaaggtaacagggataggaagttcctgaaagtaaaccctttatgcaaaccacccatgacacctgatgttactcaagatgttgatgatgagacttgctcagatgagagctgtggtgaaatggatcctacagattggactgatgatgagaagactgcttttcttcaggctgtatcatcctttgggaaggattttgccaagatagcacggtgtgttgggacaaggtcccaagaacagtgcaaagttttctttagcaagggccggaaatgccttggattagatctcatgcgcccaatacctgagaatgttggatccccggttaatgatgatgcaaatgggggtgagagtgacacagatgatgcatgtgttgttgagacaggctcggtggttggaactgataagtcaggcactaaaacagatgaggacctgcctttgtatggcacaaacacataccat

SEQ ID NO: 28447 - DNA, 976 bp, Glycine max
  Clone ID: TF_GmC139_1
acgtaagctcggaattcggctcgaggaagtagaggtcttaagagtttgagaactgagaagagatgggtggtgttgcatggacagaagaagaagatcacttgctcaagaaatgcatacaacaatatggagaaggaaagtggcatcgtgttcctttactggctggtttaaacaggtgccggaagagttgtaggctaagatggctgaactatctccgtcctaacatcaagagaggaaattttgcggaggaagaagtggaaatgataatcaaactccataaattactaggcaacagatggtcgttgattgcaggaaggctaccaggaaggactgccaatgatgtgaaaaactattggaactgtcatctgagcaaaaaactaaatgtaatagaagctgaagatagaccaataacaagagatgttcaagtcattaggccccagcctaggaacattgttggttcaagctcagtgaaaagaaggggtcaaaatgagtctccaactgacaaaggagttcaacaagagagtagcatgtcctcactgacgtttgatactgctgatggacagaaccatatgcttgattcacaacaagacaacaacatatatgcatgcctggaccaacagggcattgttagtgagttgtcaatggattttcagttcgaaggatttggagcaatgatgaatggggagggtagtagcagccaatgggattggggtgatttgctcttagacatggacttgtacaagtgaattaattttcttcttagttattgctcctgttgatgtggggatggcaatgttggtctcataccttggctacgtatcaatatcgaagttaagtgtttcgatggaaatggtagctaagttggttgtgtatcatgggtatgtcataatcataattaagatctagtgggtttcatcttttgacccctgtagatggtccatctcactaccatgagccatttataaaatcatcttcagtc

SEQ ID NO: 28448 - DNA, 462 bp, Glycine max
  Clone ID: TF_GmC130538_1
ccacttttaccctctccacgcataacaacactgacacatttttcacctcctcctcaaaaaaacgtttcactgacacaagcacacgggcaatgtctcactatatagagccactgatgaccacttcttcatagttcagagagcctttctccataattaagaaaaacgctgtccttttgtgtccttttttcttcctctgtcctcgcacacatgggtcgccattcctgttgtttaaagcaaaaattaaggaaaggtttatggtcccccgaagaagatgagaagcttttcaactacataaccagatttggcgttggctgctggagttccgtccccaaacaagccggactccaaaggtgtggaaagagttgcagattgagatggataaactacttgaggcctgatttgaagagaggaatcatctctcctctcttctcattactaatcattagtcttcatgaagtctag

SEQ ID NO: 28449 - DNA, 644 bp, Glycine max
  unsure (1)..(644): unsure at all n locations
  Clone ID: TF_LIB4199-010-Q1-K1-A5
ggtccggaattcccgcgtcgacccacgcgtccgaagacacccagtttcactctccactttgcttctcatacgaggctctgtgcttgctgttatcagtttttctctgtttaaccccagaaatacgtaacacaaatcaaaacatcgttgttgtattcgagcatgcaagttggctaagggaaggagcgtcaagaagagagacgccaataaaataagcactctaaaagataaatggtgcaagatatgaagcagcaggacaatggagaatctaagaagaaggagcgtcacattgtgacttggactcaacaggaggatgatatactaagagaggagattggtattcatggaactgagaattgggcaattattgcatctaagttcaaagacaaaacgacaagacagtgcagaagaagatggtacacttacttgaattctgatttcaaaaaaggtggatggtcagctgaggaagacatcctcttatgtgaggctcaaaaaatatttggtaatagatggacagaaatagcaaaggtggtctcaggcagaacggataatgctgttaaaaatcgtttcttcacactctgcaggaagaaaacaaaatatgaagctttagcanaagagaacagcacatcatacatcaaattcaatac

SEQ ID NO: 28450 - DNA, 4201 bp, Glycine max
  Clone ID: TF_GmC1645_1
caattccaaaacattaagtgattccttcacgttaccgtggatgcagaaattatctaattcctcaagtgtagctctatatcgactatcattagatgcattgtctgattcgccatcatgatatgcattatttgatagatgagagccaacccctgatctttgtgcaatagtcaagtttggcaaatatcgaccatcttttagactatgctgaaactgtccagaacttgggtactattgacgcatttcatgactcccgatgcattaacaaccttactgattcttgctcgaggcttgtgcctttgttgtagttgaagtcgctcccctcattcttctttcgttgctacttctactgtttcttcctccgatccctcattgccgcaaatgactcctcctgctagtgttaggtgaattccctcgcttcacatgcatgatcgcaccttcaactctcttcttcttcttcttctccatggctttttttcaaggttttggcgccgtggagttcgttttgtagcatcaccgtatcatcagcttcagcttgctttcaccaaaacggctttactatttggtgtgttccatgtcacaaaaaacgaaaggagatattccttttacccactcctcgtcagggaagatctgaagcagcgctagcagcacacgtcctctaatggacgccgactcctctggagaagaagtggttattaaaacaagaaaaccatatactatcacaaagcaaagagaacgatggacagaggaggaacataacagatttctagaagccttgaagctatacgggcgagcatggcagcgcatagaagagcatataggaacaaagactgctgtacaaatcaggagtcatgctcagaaattctttacaaagttggagaaagaggcctttgtaaaaggtgttccaataggacaagctcttgatatagacatcccccctccacggccaaaaagaaaaccaagcaatccttatccccggaagaccaattgttctaagactgctgttttttgcagtactcccttcgttgctatttcttctttttttcactgggttccctctctgcagcctcttacccttaaatgataccttttggtagatttactcgcttcacatcccttcacataccttaaaatctcttcttcttctttttgttcttgctttttgttggtggtctttacatagcggagcaacgtatggaaagtctctcatttcaattgtatcttcacgtggtaaacaagcattgggctttatgaactctgcctctctatagaagagtgttttttaattatggtttttttacttttttaactatataatctttattagttccatactacctaccaatcttcactgtacgccttagtttctcaagatatgctagtaacttgagatcaacctcaatgttaattttgctttcaaatatccctaccaccagtcacatgtcattttgtggtaacgctacgcctctgtaatatacgggcgatttcaactacgaaaatgatattgtatacttaccaacattggactgtaaatcagggtacatccttagaaggtctatacaaggttgtcaaatgttccgggccgaaaagtcgaggaaatagtaccacttccaaatgagaagcataatgtcgaggccaacataaggaccaccataaggtggttatactacgagagctttgtgctcttcaacatctgaaagccaacgtccaagatcaaactttatcaagtctccacctatgaagtcccctaaccctctacactgcacaattcctacccttttggatgtgttgttagtgttaccatgtcttcctctccaacccttcatcactctcacactgttgtgcttattgctcaagaaactgttcctcattgcttgctgcttctttgtgtgatgaacgttgttgaagcaggttggagccccataacccaagctagcagtggatgacatttttttcttttttatttacaattatctaagggtcaccaaatgcaagagtatcttccgccaacaagaattcaacatcaatatcagtgccactgagaaattcatgtgccctaagggagtttataccttcggtaaaagaggtaataactcgagatgaaaccaacgaatcttttgttactgatgagcttgaaaatcagaagttggagatagatgatggcaagcacacacaaaagactaatgacacttgtgaagtctctaagttggagaattctggtgcttcagaattggttcaaactgagaaaacagatggtcgtaattgtgcattaacaatagatggggtgccaggcaatcagaattacccaagacatgtccctgtgcacgttgttgatgggaaccttggaactagtactcaaaatctatccccagatatggtgtttcaagactccatatttcagccgaagggaggggttaataggcaacctaaccttgtcaccaattctgctacatcacacataagtgaatgtcaaaacaacgccgcacggtcctctattcatcaatcatttcctcctagtcctcctttcgcacaggatgattatcattcatttcttcacatgtcctccacattttcaagtcttattgtctctaccttgctgcaaaaccctgcagcccatgctgcagcgagttttgctgctacattttggccatatgcaaatgcagaaacttctgcagattctcccgtgtgcactccagattttccatcaagacaaattggctcgcctccaagtgtgacagctattgcagctgctacagtagctgctgcaactgcatggtgggctgcccatggactgcttcctttatgtggtccactccatacagcttttgcctgtcctcctgcatcagcaactacagttccatcaatgattattgatgaatcaccacaaaaaacagaacgaggagagattaaaccacaaaatcctcctctgcaagatcagataccggatccagaacactcggaagctcaacattcagctcctaagtcaccagctgtttcttcatccaaatctgaggataggggagatgccaatttagatacttcaccaaaggctactaatcatgagatgaaccaagcaatttctgagaaccccgattccaacaaaatgaagggcagaaaacctgtagaccgttcctcatgtggttccaacacaacctctagcagtgaagagactgagttactagagaaggatgagaaagaaaaggaagagcccaaaacacctgatgcaaacgttttagataccgagcttagtaatcgtcgaagtagaagcattaacaaccttactgattcttggaaggaggtctctgaagaggggcgtcttgcctttcaggctctattctccagagaggtgttgccacaaagcttttcacctactcatcatttgataaataaagataatcagatagatagcatcaaggataacgagctaaacacagactacaaagatgaagaccttgaaagcaagaaatgcagttctatttgtgatggggtgcagaaaaatctgctatttgtcaaagataacaatgaggaggagggactgctaaccataggtcttggaccaggaaagctaaagactcgtcgaacagggtttaaaccttacaaaagatgttcggtagaggccaatgaaaacaggatcggaacagcctgcatccaaggtgaagaaaaaggtcccaagagattacgcttgaatggggaggcttcaacttgatgcctgatattcccatgcaaccacacaaagaaaatctctagttttgcatatatttctaagtttccttgttcattgtctgtattgcttattttctaattctgcagctcacgaaacttgtcgtgtaggtctgtgtaccatattaaattactacatacacactttttactttcttggcctgatgttactgcagttaaaaactccgctaaaatagacttagacaagaaacattaagtaccgtttgagcattgatcatttaagtaatttatgatgcttcattcagtccaaaaaaaaaaaaagagtgtaatgtaataatttaatatggtggacccacattctgcactacgtggtatgcagatcaccctcacgactattactgttaacactattgtgctgaacgtggacacgctcgacactatggacgatatgatggagaaaatgcaagacatcgaaggagtccaaccgaagctgcttatgcttgtcttacctgtcgaagatcta

SEQ ID NO: 28451 - DNA, 1045 bp, Glycine max
  unsure (1)..(1045): unsure at all n locations
  Clone ID: TF_GmC184_1
cggcattcggctcgagggaagacaaagtttacctaagagccaactttatcactatattgtatgtattacgaagatatggcgggaaacgtggggtggggtgtgatagaagaggagggatggaggaagggaccttggacttctgaggaggacagattgctcattctgtatgtcaagttcccatggtgagggcagatggaactctgctgctaggcttgcaggactgaaaagaaatggcaagagctgcaaattgagatgggtgaattacctgaggccacacctcaagaagggtcaaattacaaattcggctcgaggcataattcaagagctgcatgctaggtggggaaacaggtggtcaacaattgcaagaagcttgccaggaagaactgacaatgagataaagaattattggaggactcacttcaagaaaaagatgaaaactccatctgatgctgctgagaaggcgagaatccactcctcgaggagacagcattttcagcagcaacaacagcagttgaagcagcagcagcaacaattccaattcaacttggacatgaaagggatcataaacttgcttgaggaaaatgaccatagagtgccttctatatctcaagaggcacaagaaatggccagcatgtacccaaacacttcagaacaccagggctacttctactcaatattcaatgtcaatgacaatgacaataatgtctctgcacctgagtcctcaaatgaagaaattctatgggatggactgtggaacttggacgatgttctttgcaatttcaatgcagctagtgccacaagcaaagccagtttacacaatttagtttctcctttctgttaaaaggttttatttagccttgaaaacagttaggaagaatagtagtgtactaatgtcagtcacggcttgataaggctccaaaatcctgcagcttagagttaggattaattgtttcttaaaagtgtggagtctgggtagtaagtaatttctgaaggcgagttattgtgtaaccctttaataaagtatctcaattttgcttataanana

SEQ ID NO: 28452 - DNA, 1397 bp, Glycine max
  Clone ID: TF_GmC1130_2
ttagaagatgagcctaaggtgtatgaaataagacgacaatattttgttccgatgggaccggacaagggacgatgaaatcagtgtagtggaagaagttgtgtttttgttcgagcaattggtggctctcaaattgtgaaccgcacatatacccaccctgcttcccacgccacatcgatctcacgttctctctctttcttttttcttgttgaaactgtgagtctatgttatttgtggcggagcatgaactcctccaccaacacctcgaattctcagtcaatggctgcagcagccagtgatgggtctgggaagaaggtaagaaaaccttacaccataaccaagtccagggagagttggactgaggaagagcacgacaagtttctcgaagctcttcaattatttgacagggactggaagaaaattgaagattttgtaggttcaaaaacagttattcagattcgaagccatgctcagaagtacttcttgaaagttcaaaagaatgggacagtggcacatgtgcctcctccccgtccaaagcgcaaagctgctcatccttacccacaaaaggcatcaaaaaatgttttggtgccactaccagcttctgttggttatgcttcatcaagaaatacgcttgcacctgggtttgcctcatgggatgaaacttccctgctgatgaatgccggagctgataaacccatgacctgtcaggatgaactcaacatgttcatcatggaaatgatgggatgaacgatgaatgccggaggatatgactgtcaggatgaactcaatgttcaattcggctcgagagctgatattggatcaaaggggataacacagattaccaacagcagtctcagtggtgttggaaattctactagaacactactgacttctgagataccaaagcaagggaaacaagctccagtgcttcatggtttgccagattttgctgaagtttacggtttcattggaagtgtatttgatccagaaacaaatgaccatgtccagaagctgaaggaaatggatcctataaattttgaaactgttttgttgctaatgagaaacctcactgtcaacttgtctagccctgacttcgaacccatttgatagaatggggagacaccccaatactactgggcaaggcgccaatgacccacccaaaagattactgcacaagcttaaaccacaagtaatttgacaactactcaattagtccctagacgtcaagggatctctctgagaaggccccagagtgttctctttttctaattacatgtgaatgacgtgataggatttccatgtaataaatataggctcttgtattaatttgtgattagccccggattacttgaaaaattaaagtatttattagattagtaagtgtataaaaattttaatat

SEQ ID NO: 28453 - DNA, 543 bp, Glycine max
  Clone ID: TF_GmC1130_3
attttgtccggatgggaccgaacaagggacgatgaaatcagtgtggtggaaagaagttgtgtttgtgtttgtgggtggtgttgggacaattgataggggtggctctcaaattgtgaaccgcacatatacccaccctgcttcccacgccacatcgttctccctctccctccctctctctctctctctctctctctctctctctctaagctctttcttgttgaaactgtgagtctatgttatttgtggcggagcatgaactccaccaccaacacttcgaattctcagtcaatggctgcagcagcaccgagtgatggttctgggaagaaggtaagaaagccttacaccataaccaagtccagagagagttggactgaggaagaacatgataagtttctcgaagctctccaactatttgacagggactggaagaaaattgaagattttgtaggttcaaaaacagttattcagattcgaagccatgcccagaaatacttcttgaaagttcaaaagaatgggactgtggcacatgtgcctcctccccgt

SEQ ID NO: 28454 - DNA, 740 bp, Glycine max
  Clone ID: TF_GmC6850_6
gggagcgtcaaagaaagagagccacagcaatagaataaacactcacacggagacaagaagaagatcatgcaagatatcaagaagcagcaggataagcagaagaagcaaatggtcaatgaagaatctaagaagaaggagcgtcacattgtgacgtggagtcaagaggtccttcttctctcactataaaattattttccttctgttttattttgtgaatttctccttctttggagtctaatgagtgttatgagggttgcaggaagatgacatactgagggagcagataggtgtacatggaactgagaattgggcaattattgcttctaagttcaaggacaaaacaacaagacagtgcagaagaagatggtacacttatttgaattctgatttcaagaaaggaggatggtcaccagaggaagacatgcttttatgtgaggctcaaaaaatatttggtaacaggtggacagaaatagcaaaggtggtttcaggcagaacggataacgctgtgaaaaaccgtttctgcacattgtgcaaaaagagagcaaaatatgaagccttagtaaaagagaacagcacttcatacatcaattcaaataacaaaaggatttttctccagcacgggtgtgatacaaatgtagcatcagaaactgcaattaagaagatgaggaggtcacatatccctgatgccgcagagaaaatcaactttgggagacagatcacataaacaaaatggggattca

SEQ ID NO: 28455 - DNA, 1347 bp, Glycine max
  Clone ID: TF_GmC192_4
cattcctcttggctcccttaaactctctttctctctttgtgtgtctctttctctatttctgagtctcagtgttaggggggttattcattattcataataacttggctttatagcattttcccttttgatataaaatgggaaggcaaccttgttgtgacaaagttgggttgaagaaggggccatggactgcagaggaggataagaagctcataagcttcatcctcactaatggccaatgttgctggagagctgtccctaagctagcagggcttttaaggtgtgggaagagttgcaggctcaggtggacaaattacttgaggccagacttaaagagaggtcttttatcagaatacgaagaaaaaatggtcattgatcttcatgctcaacttggcaatagatggtctaagattgcttctcatctccctggaagaactgataatgagataaaaaatcattggaacacacacataaagaaaaagctcaagaaaatgggcattgatcctgccacacataaaccacttcctaatgcaaatgaacaaaaccaaaatcaaaccagacaagatcaacaactacaccaccaaccagtagaattagaagagcctaaccaacaacctttgcaagttgactttgaccccaaagttgacccaaataaggagccagagaagccagagacttcattggaatcatcaaccatcactgaagaagccaaagaggaagaccaaatcataacacccttatttgacacaatggagctaatgaatggtttctgcacagatgaagttccaataattgaacctcatgagattctaatgccttgtgctccttcctcttcatccaccacctcttcatcatcttcttcaaattcaaccaattttcttgaagacttgcagctaccagattttgaatggtcttgtaattacaatgataataacactattactaacaataacaacaatgaagacaaagacgacgacaacaacaacaatagcagcatggccttgtgggatgatgacattattggcaaccgttattggctgattaatgaagatgatgatagtgatgaaaaccaagtgtttgatgcttctctcactcaattctcaaaaatgttcatggaatcagaatcttggggatatggcttattttgatttgaattttctccccattatttgcgatttgcttctaagtttttacgaagaataaacggttaataatttattaggaagaacacaactgttgtttagcattaccaacttttcactttatcatttacacaaattacatgtaatatgttaatggaaataataagtttctttttttgcagtaaaaaaaaaaaaaaaaaaaccccac

SEQ ID NO: 28456 - DNA, 658 bp, Glycine max
  Clone ID: TF_GmC482_2
ctcgagccgcttctggcttctgctgttaataacaaaaaaaaaaaggaagacataataacaaattatgcttatgatgattgatttaatgaaaaccctagttattatcagaaaaattagaagacacatattccctcacttccctcgcgatcacatccatcatcgctgcccatgcccggtacggtaacaggtgggccaccatagcccgattattaccgggccgaaccgataacgccgttaagaaccactggaactccacgctcaagcgcagagccaagggtattaacgttaatgttaatgatgccgacaacgaggatgacccgttgaccgcattgactcttgctcctcccggtattgctaatgccactttgaccgaagacgccgtaccggaccaccgggcctcgccggagagtgcggcggaggggttttgggatatgatgagggatgtgatcgcgagggaagtgagggaatatgtgtcttctaatttttctgataataactagggttttcattaaatcaatcatcataagcataatttgttattatgtcttccttttttttttaggcaaattattctgcaatttgattttgccttactggactttggaatcggatcagggaaataaattaaaacccttctggcttctgctgttaataaccc

SEQ ID NO: 28457 - DNA, 1637 bp, Glycine max
  Clone ID: TF_GmC563_2
tttgatttagccttttcttttctcttttggttgtcatggtggttatttcacctcctcttagatctgaagagtttcataagggtttttgctttgcccatcattgattctcttgagttttgtaaaagaaagcctcttttagattcctttgatcataagaagctcctatcctctgcattcctctctgagggtatctctctctctttgaacttagagagagagagagagagttgaatttagaagtatcgtttttgctatgtgcaattgttagagagatcaatgaataggggaattgaagtgctctctccagcctcctatctccaaaactccaattggttgttccaggaaagcaaggaagcaagatggactgcagaagagaacaaactgtttgaaaatgccttggcttactatgataaggacaccccagatagatggatgagggtggcagccatgattccagggaaaactgttggtgatgtgatcaaacagtacagagagcttgaggaagatgtgagtgtcattgaagcaggtttgatcccagttcctggctatactactgccagttctttcacattggagtgggttaacaatcaaggctatgatgagttcaagcagttctgtaatgttggtgcgaaaaggggtgcatccacgaggccaactgagcaggaaaggaagaaaggagtgccatggactgaagaggagcacaggcaatttctgctgggtctcaagaagtatggtaaaggggattggagaaacatctctaggaactttgtgaccacaaggacaccaactcaggttgcaagtcatgctcagaagtacttcatcaggcagcttacaggagggaaggataagagaagatccagtatccatgacatcacaatggttaatctccaagaaacaaaatctccttcatcagacactaccaaaccctcttctccacttcagaatcaggcattgtctagcatggttaaggaggaatatgagtggaaattgccatgtgagggcatgcccattgttttcaattccacaagtggaaacatgttcatgtcagcaccactgcatggcatttcttcatatgaatctagaccacaggagcaaaatttacttagacaatctccatggatgccagttttcaccttgtgatgctattttgcaaatgcaattgatgcgacatcggtgatctatacaagtggtgcagggattagagttttgaagttagatggaaggtttgtgtgagctagcatccgatgttcatcttcctatataggcagccaggagttatctgcagatcgccctgaggaagaggagctatctcttgcctttttaaaagatgcttcaaataaatatattcagttccaagtatacataaagaattaaataaaggcatcaatcatgttgatgtactagtggtgtaatataaaacaatttggactgttaatttttataaccctatattaggagtgtatttcaagccataaagttatgattataccagaaagattttccaagtgtggtgaggagttggacagagctttggtcctcatgtaaaaatgtgatcataaagcatttgatatgaaacataatgtcttggaagcatttgttccacaacatggtggacattaagatccaagctgaaagtc

SEQ ID NO: 28458 - DNA, 1289 bp, Glycine max
  unsure (1)..(1289): unsure at all n locations
  Clone ID: TF_GmC1779_1
atagaatgagtactccatcctaactgccacactcttggaaatcatcatctctatccaactacagttaaaaacaacacacattttaaattaatgaaacaaaccgtgagacgttataaaataatgacgaaagaatcataacaggaacaccatcaaacaaaccaccttccttgctagagtttctaggaaaaggcgttatttaaaagaggaagttataacttcctccattattaattaatcttttctcatcacccactctcttcataaaccctcaattctctcggagaaacctaagtccaaaccaaaaacacccacacaccaagaggtcgtggaacagattggaaccagaaaccttcctatcccacggagttaatcaacgttaatcaacttgttctcgttaattagtactgaaaaatgacttccaagatacaaatattatcaatcctaggcatgttggccatgttctttcttatctccacggaggtgttagccactggattacatggtgttggtgttggtggtggattacctggtgttggtgttagcgctggattacctggtgttggcactggattacatggtgttggcggcgctggattatctggtgctggtggcgttggattatctgccgacgcgggattatctcgtgctggtgacgctggattatctggtgctggtggcggccgtcgtggtcgtgctggctccccttctttgtgttttttctctgtcattttctcgaacaggtgaaaggcgacgacaacgatgaccggtggccacgatcgcgtgaagggttcatggagtcctcaggaggatgcgacgttgctgaaactcgtgaacgagcacggggcacgcaactggtccgtcataagcgccggaatttccgggcgttccggcaagtcgtgccgtctgcggtggtgcaaccagctgagtccggaggtgcagcaccgtccgttcactccggcggaggacaagatgatcataaaggcgcacgccattcacggaaacaaatgggccaccatctcgcgcctcctccccggccgcaccgacaacgccatcaagaaccactggaactccactctccgccgccgtcgcgcggtggagtcatcctcctcctcatcggcgtctccgccggcgaaacgtcactcttccttgtttgacacgcttcaccctttcaagaaacagtgcatcgagaaggaaaacgaagaagagcgagtgctgagtcccgttacgacgtcgttgagtcttttnctcgagcgcgaattnccgaggcttagcgtnacggcgtgccatgc

SEQ ID NO: 28459 - DNA, 1490 bp, Glycine max
  Clone ID: TF_GmC78832_1
acgcgagcttgagcttgggatggagtttacattcatctcaagccatttgtctctcacatcaattcatgcttctcctctcttttgaacacacaacaaaaccagagttaccaacagatccaattctaatcctttgaaattcactaaccccctatttctattctctcttagttccagtttttcactttgctagtgtcttctgcatttgcttccacagttgcttcgccaggaagaaataacaaaaggaaacaccttcttgcttttcctacctgattgtaaagaatctctcttttctcatttgggacatcactgttcactttctgcatcaactcgctgttggattttaatatttatctctgctatcaatattattaaggtctcacttctgggattctgaattctatgccccttggaccaaagtttctgtaaggggattttttgttgtaaagtatggaattcgagacttcatatccaacttgttttatgtcaaattcaagttggttttctcaagaaagccaattcacagaatggacaagagaagagaataagaaatttgaaagtgcccttgccatatatgataaggataccccagacagatggctgagggttgcagccatgctccctggaaaaactgtctatgatgtgatcaaacaatacagagaattggaagaagatgtttgtgaaatagaagcagggaggattccagttcctggatatcctacctcttctttaacattgaagatggttgacaaccaatgttatgatgcatgcagaaagaagcctgcaactctcaggagttctgatcaggagaggaagaaaggggttccttggacagaagaggaacacagacgttttctgatgggacttttaaagtatggtaaaggggattggagaaacatttctcgtaattttgtggtcacaaaaactcccacccaagtggcaagccatgctcaaaagtattacataaggcaaaagctttctggagggaaagacaataaaaggaggcctagtatccatgatatcaccattgttaatcttacatcagatcaagagaagcctcttttactcaatgatgagtctcacatgacttttgagcaacagaagctaactagcatgccaaaagtacaactagaatggattaatcaccacgacaatgggtcacgtatggttgtcaacccaaattatgatatgttcatgtcaccttcatctggcatctcttccaagaccctcaagttgcaagggcaagatttctatgaatgtgcctttcatgagacttatgctaagcttaaaaattcgggtttcaggacaacttctagagacttcaacaaggaagtcagacagttatttaacatgtctatttctttgtatagactcaatctgcatcacaggatgcgccattcaggtattctcagtctcgggcaacgagacaatattcagtattcatgcactctgatcttgttatgaacagcataccggttctactacatagatca

SEQ ID NO: 28460 - DNA, 810 bp, Glycine max
  Clone ID: TF_GmC1768_2
ctcgagccgcaagagagagctagcagtgcaagctttcaacatccaaaacaacagagagtttttggctttagaagctgaaggaatatagttatcacaatggggagagctccatgctgtgagaaaatggggttgaagagagggccatggactccagaagaagatcaaattctcatcaattacatcaacacttatggccatgctaattggcgtgcactgcccaaactagctgggctattaaggtgtggaaagagttgtagactccggtggataaattatctgagaccggacatcaaacggggcaactttaccagagaagaagaggacactataatcagtttgcatgaaatgttgggaaacagatggtcggctattgcggcaaggttgtcagggagaacagacaacgagataaaaaacgtgtggcacacccacttgaagaagaggctgccacaaaattaccaacaaagccatcacactaaaaaacgaagcaaaaaacaaccaccaaagttggatgcggacgcctccaaatccaaccaagacgccaaactagaacaacaagaccccgttaatattcatggatcgaactctgaggacatgatgatgccactatctcctcctcattgttctagcgacatgtcctcctccctcaccaccagtgacaacaatagtaacgttaatattattaataataatcatgatatgtccttaaatgttaatgattatgatattgacaccgaataatcacgaatcggctatagcggcaaggttgccagggagaacagacaacgagataaaaaacgtgtggcacaccca

SEQ ID NO: 28461 - DNA, 1418 bp, Glycine max
  Clone ID: TF_GmC1321_2
aatccaactctctttctccctatcccaacaatctcactcatacctcttcaatctaacaaacttaatttcttttgttttgagtttcttagagaatggatgaaaaaggagcaagaagtagcaacacccttttaagttgtgaggacgagatggaccttcgaagaggcccttggaccgtcgatgaagacctcactcttatcaattacattgccactcatggcgaaggtcgctggaacacgctcgccctctctgctgggctgaaacgaacggggaagagttgcagattgaggtggctgaattatctgcgtcctgatgttcgacgtggaaacatcacacttgaagaacaacttttgattctggagcttcattctcgctggggaaaccgttggtcgaaaattgctcaatatttgccgggaagaaccgataatgagataaagaactattggagaacccgtgtccaaaagcatgccaagcaactcaaatgtgacgtgaatagcaagcaattcaaggatgccatgcgttacctttggatgccaaggctggtggagcgcattcaagcagcggcgacggcccaccaccaccgtaactgctgcggtttctccaacggcatctgccggtgctaccacaaccatcaccaccaacaacaacaccaccacatacaactactacgacaacaacaaccttaacaacagttttgaggtgcacagtgggaacatgatggtgagaaatccaacaatcatgaacaacaataacttttgtggttcacatagttacactcccgagaatagtagcacgggtgcatcatcggattcgtttggtacacaggtttcacctgtctcggacttgactcaggattattacaataatgtcacggctgggaataataacaacaataaccctaatcctgatcagtattaccaacaagcacatgatcaactgagtttcttagactgcatcacaagcccatcagggttgttcgatttccaacccatggaaccaaacaccccgtggattaatctgagtaatgttggggacacgtccaacggtttctggaatgttgaaaacatgttgctctttcaacaattctctgacaacaacatgtgaaacattcgtaggagaattcatggtgaaaaccgtgacgaaggggggaaatattgttaaatttacagatgataaagttatataagtagaaaattgagcaaatagaataaattcatatgtaggacacacgtaggatccacgacatggacatagattttaagctaaggatattataagagcaaagagaaggaaactgtgaattactttttttaagtttaatttgtacggacttttttttgttctttgattttccttattttaaagggggtgtgggaaatatttgtaatttgagctttctcagtataagatttcattctttg

SEQ ID NO: 28462 - DNA, 1182 bp, Glycine max
  Clone ID: TF_GmC988651_1
atgtttgggttttctcagcaacataacaatgttgataataatggtgggaccagcagtttgagtgatgatgaggatgatttgactcggttctttgattatgacactgcgccggggcagaatctagatgagctattcgcgccgagcattgtcactcagcttcctcccatgttgccggcggaggccacccaacaccaccatacattgcctcagcacgtgaatcagattgtgtcgtcgtctccggtcgatttgcccagccacgtcccaattgaggcactggtgcagcagaatggtggttcatcggttcagcgtcagagaggaaaagggttgcaatggactgtagaagaacacatgaaatttttagttgcacttgacgaagttggcaagggagactggataaccatctcaaaacatattggaacaaaatcttctactcaagttgctagtcatgctcaaaaatactaccttcgccaaaaagccaaaaagaaaataagaaaaagcattcatgacattactttaaatacaatttctcaccaggatgacacacaaaattcaactcctcatccagatcctgaaattcaaccagttcatgaaattcaccaaatgcaagaaatgccaccaaacagcatgactcatcaaatgagtggattcgaatattttgccaatcaacaagtccatgaaatacaacaaatgcaagacatattgtcggtgtatccatcaaacaacataactcatcaaatgggtggatttgaacattttgtcaatcaacaagttcatgaaatgccggtgtatccaccaaacaacatgactcatcaaatgagtggatttgaacattttgcgaatcaacaagtccatgaaatgcaacaaatgcaagacatattgtcgatgtatccatcaaacaacatgattcatcaaatgaatggatctgaatattttgtcaatcaacaagtccatgaaatgccggtgcatccaccaaacaacatgactcatcaaatgagtggatttcaatatcttgctaatcaacaagtccataaaatacaacaaatgcaagacatattgccggcgtatccatcaaataacatgactcaccaaatgagcggatttgaatgttctaataaagactttggaagaggttgctacaagccggagtatccaccaaacaacactagttcatccaacaattaa

SEQ ID NO: 28463 - DNA, 1463 bp, Glycine max
  Clone ID: TF_GmC1310_1
aaataacactctctctctctcaattatttctgccgtaaatagacaagggttatctcaaataatcaatctaagctagctgaaagcaacaacaacaacatggggagggcaccttgctgtgacaaatcaaacgtgaagaaaggcccttggtcgccagatgaagatgccaaactcaaatcctacatcgaacagcacggaaccggagggaactggattgctttgccacaaaagattggcctcaaacgatgtggcaagagttgccgtctcaggtggctaaactacctccgccctaacatcagacacggtggtttctccgaagaagaagacaacatcatttgcagcctctacgttagcattggaagcaggtggtcggtcattgcagcacaattgccgggaagaactgataatgacataaagaactattggaacacgaggctgaagaagaagcttctagggaaacaccgtaaggaactacaggcacgcaacaaaggaaacggtggtatccttaaacaggagaacagttcctcgctcttgcttcagcaaaacagtgctcaacaattacatccatgttggccacagattccagtgctgccactttcatcaccgtacacaaaccaaagtccaagtttcaacgaccaagattccattagaaagcttctaatcaagcttggagggagattctccgatgattatcaacccatcctagatgggttgaatcttcagttcccacatggttcaaattctctctcatcaacacaacaaattcaagaggagcaagtccatgttggttcttctgcactagggtgcatgaactctattggccacaatcaagtacaatttggtcagagtaatgagtactgtgctgagttggtgcaaggacaagggagtttcattaccacagcaattggggaaatggtttcttctaatgattattctcgaaggttattaggtgggtcgttggagttcttctatggggaggaaatgattactgataataagataatgggtgcttgtgcttcttcaagttgtgggcaaagtactaattggggtgaaaccagtagttctctgatgtatccttctcttgttgcttcgaattacgagggtgtgcggcaagagatgccacgagaatgtgcttttcaagagttgagctacccgggggcgcaatagcatgtgtgtacattatttgttatcaattggtggaggttgggattatatgtatccaaattgaagctagcaaaagggaattaactttgtatttgattcccatatagataataaaaatcagcttgatttatatataactagagacttgtccgctatgtgagactttctcatgtgctgatcccttagtggcagtgcagtttaattatctgatttgtttgtgtattatttggttgtaatcttgagagtcatttaaatatatccttttatgttccaagctaaaaaaaaaaaaaaagaaaaccccc

SEQ ID NO: 28464 - DNA, 1161 bp, Glycine max
  Clone ID: TF_GmC691_1
ttggctttgtggcaaatgaggaaaccttatatgatggaaaaagacaaaatgaacaacaacattaagagcaagctaaggaagggattgtggtcacctgaggaagatgaaaaactcctaaggtacatgatcactaagggacaagggtgttggagtgacattgctaggaatgctggccttcaaaggtgcggcaagagttgccggcttcgttggattaactacttgagacctgatctcaaacgtggtgcattttcaccccaagaggaagaactcatcattcatttgcactctattcttggcaacagatggtctcagattgcggcacgtctccctggtcgcacagacaatgagatcaagaatttctggaactccactctgaagaaaaggttgaaaatgaacaacaatattaacgccacttcatcaccaaacaatagctactcatcatcagagcctagagatgtcaatgtcatgggtgggatcatgcccatgaacgagcatgacctcatgaccatgtgcatggactcctcctcatcaacatcatcatcatgcatgcaatccatgcatacaaccaaccgagccgtaactgaccaatttgatccctttcccttgttgtccaacaaccgttacgacatgaccggcgcaaccgatttccttgacaacatggctgcatgcttaacccaagttggcatggtagatcatgatcatggggttgttcatgatggttatgggacattggagcctaacaaaacgggtttagaaagtgacttttcccttcctccactagaaagtagaagcattgacgacaatagtagtaccccaattgatcatgtgaaaagccataacaacaacaaccacttcaagaatagttgcttcaataacactgatcatcaccatcatatccaatgctccaacaacgtagttgtagaggatttgtttgggtttggaaatcatggacatggagaaagctttagaatggaagaatgggactttgagggtttgattcaagatattccctatttttcttcccttgatttccaagtttaagtatgtgtttggatcacgttatcgcaatcgataaacgctacaatttgtagcttctgcattgacatgacgcgttgatacagtttcaaacacactttaaatgttggccattcttttgaaaaa

SEQ ID NO: 28465 - DNA, 1093 bp, Glycine max
  Clone ID: TF_GmC3823_1
caacaaccttagcagttaattagcacaacacaaaaggagagagagagagagagagagagagagagagagagagagagagagatggggagaagcccttgttgttcaaaggagggtttgaatagaggtgcttggacagctcatgaagacaaaatcctgagagaatatattagagtccatggtgaaggaagatggagaaaccttcccaaaagagcaggtttgaaaagatgcgggaaaagttgtagacttcgatggttgaattatctcagaccagatattaagagaggcaatatatccccagatgaagaagagctcatcatcaggctccacaagctcctcggaaacagatggtctttaatagctgggaggcttccaggacgaacagacaacgaaataaagaattattggaacaccaatttagggaaaaaggtgaaagatggtcaccaaacaaccactggaaacaacacacagaatccaatgcccaacccatcaccctccctatctcctcctaaactagattcccatgttgtccgtacaaaggctaccaagtgctccaagttgttattcctaaacccaccccctcacccatcaatgcagaacaagttcaagactgaggcagaagaagaagaagaagaagcaaggcttgtgaatggtgtaattagaaaccaaatggaacacactacatacgacaacgggttcctgtcgtttccggatgaagaaaaagaactctcaacagatttgctcatagatttcaacgtgggggatttctgcttgtctgattttctcaactcagatttctcaaactcgtacaatttcagctgcaatattaataatgttaacaaccacgagcagttatcgccttgttcggaccaacctgatcctatgttctctgatgaagttctcaaggactggacacacagcaattttgcagacgaagcgaatgcttccaacaatcttcgttctttcatttcgttccttgagtccactgaggaaagattaggagaatgataatggcaacaaatattgtacttttgcacgtattaatatgcgttcaccaataaaattcaccaattcgatcgctttaaaaaaaaaaaaa

SEQ ID NO: 28466 - DNA, 1601 bp, Glycine max
  Clone ID: TF_GmC508_1
cttacgcgtccgcccacgcgtgcgcccacgcgcgggctcacgcgtccgcccacgcgtccgaactcagccacagccacaacacacaaacacaaacccttcgttcctctctcgttcccttcttcaattcgatcaaacacagaatagtacttttttattatgatggccgtggcccgaaaggaaatggaccggatcaagggcccgtggagcccggaggaggacgaggctcttcagaagctcgtggagcggcatgggcccagaaactggtccctcatcagcaggtccattccgggccggtctgggaaatcgtgcaggctccgatggtgcaaccagctgtcgccacaggtcgagcaccgggccttcacgccggaagaggacgagaccataattagggcccatgctcggttcggtaacaagtgggccaccatagcccgcctcctctcgggccgcaccgataacgccatcaagaatcactggaactcaacgcttaaacgcaagtgcgcgtccttcatgaccgccgatgaagccgccgccggcggcttcagcccgaggccgctcaagcgatcgttcagcgccggcacggcggtgcctcctccaggaagcccctcaggatccgacgtgagcgagtccagcgctgctcccggcgtggtctctgtctctgtctcttccttcacaagtgtttcgccccgtgccggttcggccggttgtcgaaacggcgtcgtcgcaagacgacgccgatgccgacgccgaggatgctggacctactacctcgctgtcgctgtctcttcccggggtggagtcatcggaaatctctaatcgcacctcgacggttccggtgatgccggtgcacaccgtggctgcggcggctccggttccgttaccggcgccggaggttggattaggagcgttgaatttgaatgcggagtttatggcggtgatgcatgagatgataaggaaggaggtgaggagttacatggagcagcagaatgggatgatgtgttttcagggtatggaaatgatggaagggtttaggaacgtgtcggtgaagagaattgggattagcagggtggattcgtaattattattattattattattattatgacctaattagtgttttcacaaaatgaggtttatgaagaactatgatcaagggaagagaaaaaaaaaaaaggaagctgttttcctttttttattttatttttagggaataataatattggttagtgtacagtgggaacgggacgagagaagccaagagtagtagcctggaatggaatgatggaaagtgaaatttcatggcaaatttgaaatttctttggcttgtttctgagcctctttggatgatcctgtgcttcaggtttatttagtttggaaaaaaacataaatgaggggttagatgcgaaaaaagaaagggttggatttaaaaatgaatggaatatcctcaaattttcaatattaagttcacattttattttcatatccgcagaagcataatgtagatatttgttttcgctaatagtgtttgggcgcaacaacagaaaggaaaaccagccggtatttggtttgaaagtagtttttgtctgttgttctttcatggatct

SEQ ID NO: 28467 - DNA, 1786 bp, Glycine max
  Clone ID: TF_GmC508_2
cccacgcgtccgcccacgcgtccgcccccgtccgcaaaataactcaccaacaaccgcaaacacaaacacagacccttcccttccttcctccctccctcattcccttcttcaatttcatcaacacaaccatcaatttcatcaaccatcgcataataatagtattatcatgatagccgtggcccgaaaggacatggaccggatcaagggcccgtggagcccggaggaggacgaggcccttcagaagcttgtggagcggcacgggcccagaaactggtcgctcatcagcaggtccattccgggccggtctgggaagtcatgcaggcttcggtggtgcaaccagctgtcgccccaggtcgagcaccgggccttcacaccggaagaggacgagaccattattcgggcccatgcccggtttggtaacaagtgggccaccattgcgcgcctcctctcgggccgcaccgataacgccatcaagaatcactggaactcaaccctaaaacgcaagtgcgcgtccttcatgatggcgggtgatgaagccgtcgccgtgagtccgaggccgctcaagcgatccttcagcgccggcgcggcggtgcctcctcccggaagcccctccggatccgatttcagcgagtccagcgctcccggcgtggtctcggtctctccttcgcacgtgtttcgccccgtgccggttcggccgattgttgaaacggcgtcgtcgcaagacgatgccgacgatgccggacccgcgacttcgctgtcgctgtctcttcccggtgtggagtcggcggaaatttcaaatcgcgcaactacggtgccggtgatgccggtgaataccgttgcggctccggcaccggttccggcggaggttggattgggagcgttgaatttgagtggagagtttatggcggtgatgcatgagatgataaggaaggaggtgaggagttacatggagcagcagaagaatgggatgatgtgttttcagggtatggaaatgatggaagggtttaggaacgtgtcggtgaagcgaattgggattagcagggtggattcgtaattattatgacctatttagtgttttcacaaaatgaggtttattaagaacttcgatcaagggagggaagagagaaaaaaaaaaaagaaggaagctgttttcctttttaatttttatttttagggaataataatattggatagtgtacagtgggaacgagacgagagaagacaagagtagtagcatggaatggaatgatggaaagtgaaatttcatggcaaatttgaaatttctttggcttgtgttctgaacctctttggattatcctgtgcttcagggtctatttagtttggaaaagacataaaaatgaggggttagatggagaaaaaggaaagggtaggatttaaaaaattgaatgaaatatcctcaaattttcaatattgagttcattttactttcatatctgcagaagcatgatgtaaatatttgttttcgttcaaatccaaaattagcaaatagtgttttagtgcagcaacagaaaggaaaaccggtgcttcgtttgaaagtagtttttgtctgttatccttttatggatctgaaagcagttagttaatcagtttactgcataatcttgcaccggattttttgcaacctaaaaattggggttaagctctcctggagtgttttagccttttaggaatcagttgagaccgtttatccagatattttgaatatttgaacctcccttcgacacacgtggtgaataaaacttataaattaaaattatattatttg

SEQ ID NO: 28468 - DNA, 662 bp, Glycine max
  Clone ID: TF_10237307
ggcagaaccttgtctctgcatcatcataattctctcaattgaggagcccaaagggatcaaatctcttcaacccagaagaagaaaaacaaaagagaaattatagaattaagttgctatagctaatagctataactggcttagatataccatttttattttatttttattttggggtgtacaaaatgggaagaccaccttgctgtgataaaattgggattaagaaagggccttggactcctgaggaagacatcatcttggtctcttacattcaagaacatggacccggaaattggagatcggttcccagtaacacaggtttgatgagatgcagcaaaagctgcagactcagatggaccaactatctccgacctggtatcaaacgaggcaatttcaccgatcatgaagagaaaatgataatccacctccaagctcttttgggtaacagatgggctgctataacttcctaccttccacaaaggacagacaatgacataaagaactattggaacacccatttgaagaagaagctgaagaagatgcaaaattggaggtggtaatgagatgataataatgatggacagagaaactcttctaacaattcaccaaattagggttcaatgcgaagaagaacttatacagatttccacatggcaagacatgct

SEQ ID NO: 28469 - DNA, 813 bp, Glycine max
  unsure (1)..(813): unsure at all n locations
  Clone ID: TF_GmC90208_1
ggtccggttacgcattcgacccacgcgtccgccctgcttttccgttttttctcttcttctcgtgcttcggcggaaatcggcttagctcttcgaccgctttgctttttggttcaaggacataagagctcaatggcaccaacaaggaaatctagaagtgtgaataaacggatgtcaagttcaaatgacaattcccctgagagagatggaattaattcaaataaaaacaagctgcggaagaaaaagttgaccgataaattgggatctcagtggagcaaggaggaactagagcgattttatgaagcatataggaagtatgggaaagattggaagaaggtggctgcttttatacgtaatagatctactgaaatggtagaagctctttacaatatgaatcgggcatacctctctctgccagaggggacagcttctgttgttggcctcatagcgatgatgacagatcactacaatgtgatggaagggagtgatagtgaaagggagagcaatgatgcaccaggatctcaaaaacctgtaaaacgaaagcatgaagaagttcagcttagtgtctctaaagatcagtctcattcaattgcttctagagatgattgcctctctatattgaagaagagacgctntgatggtatgcagctcaagccttatgctgttggtaaaaggactcctcgcgtnccggtttataagaaagacgatacagaanattatgtttcaccttatagaagaaagcctgaagtcgactattgatgctaatgatgaatgaaagtgctcatgnntgtagcttttggcattaaactgaggctg

SEQ ID NO: 28470 - DNA, 1254 bp, Glycine max
  Clone ID: TF_GmC1813_1
cgcttccgcttggttgcagagaaacacaaacactgaaacactcaagtgagttcgatagtatatttgtttttctttttcacaaagatggtgagaaccccatcttgtgacaaaagtggaatgaggaaaggtacttggactccagaggaagatatgaagttaattgcttatgtcactaggtatggctgctggaattggcgccaactccccaagtttgcaggtcttgcaagatgtgggaaaagttgtagattgagatggatgaattatctaaggcctaatatcaaaagagggaacttcactcaacaggaagaagaatgcatcattagaatgcacaaaaaacttggtaacagatggtctgctattgcggttgagttaccaggaagaacagataacgaaataaaaaatcattggcacaccgcactcaagaagaggtctcaacaaaacacactcataaatgaagaaaccaaagccatcaaatcaaagaataaagaatcagttcacaacaacggtgtatttgttactcttctagcaacttctcagatttcagataattcatcattatcgccagtttcatccacctgcagcgagttttcctccataacttctgatctttccactgctgccagctgtatggaaaatttggtgtttgaagatgatgacttgggttttctggatttatacaatattgatcctatgaatggaaatttgtggacagaactaaatctcgatggcatttccttcaatacaccatgtgaaatagtttcaggagatactaatagcactttccaaagctcaagttctagcaatagcaacacccttgattctccgcatcaatcaaccagcgaaagtattgttgtgaataatgactttggtcgctttctcgattcatacgaagaggcaacagtcgataacttttggacacagtcatatgtagctgacatgtcccacgttccaagcgaactatttgttccctccgtggcagaatctgaatattttactccattatatgatgatctgtggggtcaaactcatttgtaccatgaaaatcattgcttattctgatgaacaaaattactccatctctagagatcaatagttttgagagtgttattagagttggtgattccaattcttgatccaacctagatggatgaatctttttatatttttggcttaggggtttgtatagtattgtagcagttgctctcctatatttctcttgtaccaattttttataaagtgaattgcttctgcttt

SEQ ID NO: 28471 - DNA, 525 bp, Glycine max
  Clone ID: TF_GmC148_3
gcttcagtacttgctacctttctataaaggtagagagaagagaggacccttctcttgcatagttcaagtgagtgagagtgccaaaaaatgggaagggctccttgttgttccaaagtggggttgcacaaaggtccatggactcctaaagaagatgcattgcttaccaagtatatccaagctcatggagaaggccaatggaaatcactacccaaaaaagcagggcttcttagatgtggaaaaagttgtagattgagatggatgaactatctgagaccagacataaagagagggaacatagcaccagaagaagatgatcttataatcagaatgcattcacttttgggaaacagatggtccctcatagcaggaaggttaccagggagaacagacaatgaaataaagaactactggaacacccatctaagcaaaaagctgaaaattcaaggaacagaagacacagacacacacaaaatgttagagaatcctcaagaagaggctgcaagtgatggtggcaacaacaacaac

SEQ ID NO: 28472 - DNA, 459 bp, Glycine max
  Clone ID: TF_GmC143158_1
ggtttgtccaatccctccaactctctaacggaaaacactttcccatcttcccccaccatatattctcttcctgtgtctctttctatactcccttgtctttattgttagtttcttatctctattattcctctctctctctctctctctctctctctcttatagctttaatattctttactcatcatagcttagggaagggaagataaatagatcaagcacaagagggaaaaatatataccctattcttgaattagggttttttttttctttctttgtgtttcagctcctagctagggagagataattaatatgtgcagtagaggccattggaggccagctgaggatgagaagcttcgagaattggtggaacgctatggacctcataattggaacgccatagctgagaagctccgaggaagatcagggaaaagctgtaagttgagatggttcaatcaattg

SEQ ID NO: 28473 - DNA, 506 bp, Glycine max
  Clone ID: TF_jC-gmfl02220131d02a1
ctcggaattcagctcgaggtctctttctgtgtctctatctatcgttttctcaagataatgggcaaatcaccatgcgactcgagtcatgatccataagtgagaaagggaccatggatcatggtcgatgacttgttcttgataaactatcttgctgatcacggtgagtgtgtttggaattctccagccgaagcttgtggtctcaaacgaacatgaaagagctgtcgactccgtttgctaaactacctttgtcctgatgttagatgaggatacattacaccctgagaacagcttttgatcatagaacttcatacatagtggggctatacgtggtccaaaattgcaaaggatcttccatgaagaactgactgtgtgattaagtgcttctggagacctaggatccagaagcccatttagcaagctgagactctacaacgacatgggaattcatcagaaaataagaactatgagcatcatgccagcaatagcactagccaggtgtccaccat

SEQ ID NO: 28474 - DNA, 2033 bp, Glycine max
  Clone ID: TF_GmC274_1
acaccgcatacgttgtttcccttgggcgacccacgcgatgggaataatttttttttttttttttttgtgctgagttgttttgtttattactatttcttctcttttccttgtgacacagacaaggaaaaagggagaaagaacagttttttttttcttttttttgaataagtctttctctaccctcagttgctctcatagactcttgactctttcagttgtttactaattaacactcatcacattcgttgtgtttggcttcttcactcgctttctctatttttttctcactaaaaagttccatcttttttttttttttttaatttctggggttattattgctttctgtgattctgtctcagttccattttggtatctttgagggaaattcattgggtttgcagggttttatcttgttagaatttagaccaattggctaacagataatagtcttcattgaacatcaatttcaagcattctctctgatttttttgatcaagtggctcttttctagattctgattcccttcaaaatgcttctggatttatccttagtattgattgtataaaacctccacttctgttatcattttctctctgccttatcttcctcagtttccactcatcaagtttcaatcttcctttgaataagcccaaatttgattgtatgaaccagtagcttttgcttgtaaattgaattgatgaagtgggaaagtataaccctttcttctcctacttcttgtactccaaactccaacaccaattggttggtggaaaataatagcaggagcacaaaatggacccctgaagagaacaagctctttgaaaatgctcttgcagtgcatgataaggacaccccagatcggtggcacaaagtggctgagatgattcctggaaagacagtggttgatgtgataaggcagtacaaggagttggaagtggatgttagcaatatagaagctggtttgattccagttcctggctatagtagcactgctatctcacccttcaccttagattgggtgaacactcctggctatgatgggtttaaaggatgtggaaagagaccttcctcagtgagacccattgagcatgaaaggaagaaaggagtgccttggactgaagaggaacataaattgtttctattgggtctgaagaagtatgggaaaggcgattggagaaatatttctcgcaatttcgtgattactagaactccaacacaggttgctagccatgctcagaagtacttcataaggcaactttcaggaggcaaagacaagaggagggccagcatacatgacataacaacagtgaatctcacagaaaccatcacaacttcttgttcagaagacaccaatagatccacttcaccacatgttctctcacagccgcagcagcaaaattctactcctactacccccagaactcattttcagtggactaatcagtctaacacaggagtagctatgactctcaaccctgctcatgaaagagtcttcatgtctccttatggtgctaactcctttggggttaaaattgagggacagaatcttcatgagtcttcttacttgggacctcagacacagaacatggttttccaaatgcaacagtcctcacaacactagttccatgcattagaacttgttgtagtgaattattaatgggtagaagtagaaccagaatcttctgtccatttcaataagtacggtgcttgagttgagctttttcctaagttcttatgtgaatatcctagattattggttagttattatgaacttgaaggaaggtacatagatttgtttctttaacaaataagaacttcctgaaaggagtggcaggcaaccaagtcccaaacgttggtcttggttggttttgttgtctgggaataatggatttcaagcaaagtgtataaataatggaatttcgacttagaggaaaagaggcacttctcgtgtcttgtcctctccggcatatatatttgtatgtggaggatactgttactgcaattgaattcaaagcaaactttttatagaaatc

SEQ ID NO: 28475 - DNA, 559 bp, Glycine max
  unsure (1)..(559): unsure at all n locations
  Clone ID: TF_LIB4392-025-R1-K1-C11
aaattcttagcttcagagagagaggcgaagagagagaagcaatcgtggtttcttctatgagcttcacttcaattcccgccacttctctgcaagcataggatatggctgaggtggtgaaatcagaggattgttgtcaggagaataagcaatctactgctgcttcttgctcctctgtatctgaaggcagtggcagtgcaannctcatgtctccggcgatatgtagccccgcatccacatcaccctcacatcggaggaccactggccctataaggcgtgctaagggtggttggacagcgcangaggatgaaacattaaggaatgctgttgcagtttttaagggaaagagttggaagaaaatagctgagtttttccctgatagatcagaagttcagtgtctgcacagatggcaaaaagttcttaatccagaacttgttaaaggaccttggacacaggaggaggatgataaaattgttgaactggtgtcaaaatatgggcctacaaaatggtctttgatagccaagtctttacccggtcgaataggcaaacaatgtcgagagcg

SEQ ID NO: 28476 - DNA, 724 bp, Glycine max
  Clone ID: TF_GmC8312_1
cgctgacctttcttcaatatcgtttattatttttctctctctctctctctcttttcatagtgttctaactcctcttgtgctatataaagaagtagaaaagtcaccacagtgtttatcactgtttccacttgctccaaaaatgggaagatcaccatgctgtgacaaggtgggtttaaagaagggaccgtggacgccagaggaagatcagaagctcttggcttatattgaagaacatggccatggaagctggcgtgctttgccagcaaaagctggacttcagaggtgtggcaaaagttgcaggttgagatggactaattatctaaggcctgatattaagaggggaaagttcagcatgcaagaggagcaaaccatcattcaactccatgcactattagggaacaggtggtcttcaatagctacacatttgccaaagagaacagataatgagatcaagaactactggaacactcatcttaagaaaaggttagacaaaatgggcattgaccctgtgacccacaagcccaagaacgatgcccttctctccaccgagggcccttccaagattgctgccaacatcagccacatggctcagtgggagagtgccaggctcgaagcaaaagcgagattacgcagagaatcaaacctacgtagttcttgacactcatcatcatcatcataaaaccacacccctattggcacttctgcatcatcatcatcatcactt

SEQ ID NO: 28477 - DNA, 547 bp, Glycine max
  unsure (1)..(547): unsure at all n locations
  Clone ID: TF_17400850
aaacgaggtaatttcacggaacatgaagagaagatgataatccacctccaagcccttttggggaacagatgggctgcaatagcttcatatcttccacaaaggacagacaacgacataaaaaactattggaacacccatttgaagaagaagctgaaacaaagtgggagtgatgagggtgttgaccaagagggacattcttcttcttcttcttctaattcacatccaaagggtcaatgggagagaaggctgcaaacagatatccaaatggccaagaaagccttgtgtgatgctttgtcccttcacaagccagcaacagcaacagcaacaaaccttgttgtgcctgatgatgccaccaaaccttcttcaacttctcaccaaccctacaagcatgcatcatcctcatatgcatcaagctacgagaacatttcacggntgatggaaaactggatgaaatccccaaactcaaactcaacaaataattcgccagggtattattcttcttccttcagcaacatggtcaataataacactacaactggatccagtt

SEQ ID NO: 28478 - DNA, 1342 bp, Glycine max
  Clone ID: TF_GmC1413_1
ccggacgcgtccggcaatcagtaagaagaaaatcatgaaaagagagaaaagaagagagggagatagatatattatagctagctagatagagattagaagctatattattatatacataaagttatattatttatattgaactaaaagaaagggtacaagggaaagatgggaaggccaccatgttgtgataaaggtgtgaagaaaggaccttggactcctgaagaagacatcattttggtgtcttatattcaggaacatggtcctggcaattggaaagctgttcctgccaatactgggttgtcaaggtgcagtaagagttgtagacttagatggactaattacctgaggccaggaatcaaaaggggtaacttcacagaccaagaggagaagatgattatccatcttcaagcacttttagggaacagatgggctgcaatagctgcttacctaccacaaagaacagataatgacataaaaaactattggaacacatatttgaaaaagaagctgaacaaaaaattggaagcaggttctgatcaaggaagcttgttgggaggaggacataataatattgggttttcatcagtttctcaaccaatgtctagaggccagtgggaaagaaggcttcaaacagatattcacatggccaaaaaagcacttagtgaagcactctcaccaaacaaggcatcatcatcatcatcaaccttgttagctgaatcaaattcaaacctctccaatgaaaatagtaccttctataatagtaacactaataaaccaacaacaacacaatctatgtgctatgcttcaagtgctgacaacatagctcgtttgttgaaagggtggatgaaaaacacaccaaaatcagcctcatgtgctgcctcggctgtgactcaaaattcctgttcttctagtgaaggaattacaacaacaaagggaagcacaacaagcactagtactgttgaattgtctgagacttttgagtccttgtttggttatgagtctttcgataattactcttcaaattctgagttctcaccatctctttctcctgaggctactcttttccaagatgagggcaagccagatataactacaggattaatagacatgcctttctctttgcttgagaaatggcttctagatgttgatgctggtagtcaagagaaacttggcttctagattattagttcaatttgatatgttttttcttagttacaggagagtaagttaaatctctctctcactttggccctcaacccttcttttggttctagaagtgtatattccaatccaatgttaacattattatatgataaatctataataccactatcctataatt

SEQ ID NO: 28479 - DNA, 1308 bp, Glycine max
  Clone ID: TF_GmC1768_1
aaggcaagcaaaatcataatcagttggattatgtcggtctgcaaagattctctctttcgctgcaacattttcacgtgctttttttaacataacatttaagcacatcaatcaatatcccacaacattattactactgtatcattattgtgacctatggagcagcaagagagagctagcagtgcaagctttcaacatccaaaacaacagagagtttttggctttagaagctgaaggaatatagttatcacaatggggagagctccatgctgtgagaaaatggggttgaagagagggccatggactccagaagaagatcaaattctcatcaattacatcaacacttatggccatgctaattggcgtgcactgcccaaactagctgggctattaaggtgtggaaagagttgtagactccggtggataaattaatcttgtgataattacacaattgcgtgcagatggtcggctatagcggcaaggttgccagggagaacagacaacgagataaaaaacgtgtggcacacccacttgaagaagaggctgccacaaaattataaacaaagccacgaccagaaaaaaacgaagcaaaaaacaaccaaagttagatgtggacgcctccaaatcaaaccaagacgccaaactagaacaacaacaagagcccgtgaataataattttccctttcatgcatcgaactcagaggacatgatgccactatctcctccacaatgttctagccacatgtcctcctcctccctcaccactagtgacaacaacggtagcattaacaataaccatgacatgtccttaaatgttaatgatgatatcgacacgccggagacggacgcgggggtggacgaggatttctggtcggaagtgttgtcgtctgataattccggtgagacaacaagcggatttccgaccattgactatgatcatcagtttctaccgatgtctcctctaatgaccgaagaaggggtccttatagatgctagttcgtcgagtgtgtgcgacgacggcatggacttttggtgcaatgtttatgcgagagctgaggaatttacgcagttattggaattgtgatgttagttaatgttgctcttaattagtagaggccaagtccttcattcaacggaaaacaaaagatcatgtcattgttcttctattgtttggacttgaattaatttcctagatagaaattaataaagtgtgtccattacgactgttactcgatgtgattataataaagtgtgcgtgttcattgttcgtaatattcagtggagactgtcaagcttttatgttaaacaatt

SEQ ID NO: 28480 - DNA, 1101 bp, Glycine max
  Clone ID: TF_GmC1466_1
cggctcgaggctgcgagaagacgacagaagggggagctagttaggtgttaaatatttgattgcaatattaatatgaaggcacagtgtgagtagtgagaaggggcattagtaaagaggatgggtagacgaccctgctgccccaaagagatcaacaaaggtgcttggtctcgagaagaagatgaaaccctctccaaatatgtttccatccatggagaaggaaaatggcagaaggttgcccaaaatgcagggttaaagcgatgtggaaagagttgcagacaaagatggttgaattatctcaagcccggtataaaaagaggccacatctctgtggatgaagaggatatgattataagacttcatcgtcttcttggtaacagatgggcattgattgcaaagaggctacctggacgaacagacaatgaaatcaagaactattggaacacaaatctgtcaaagaagttacaaaaacatccaacatcatcagtttcttcacttcaacacaaacgtcatgaaaaagaaaaaaccatacaaatgcatgtatcacccgaagcaccacggcctaggagagttaatgcagttgaatacagtaaaaatttggagaatggtgggtgtggaaatagacctagtacaactcccagtccctcaaataaagtagagggtagtagtgaagaagcttcttttagtgatttcctcatccacgacattgatcaaaaccaatttttgattgctgatgattcaaactcaaaggtgccacaaatggaagaagatcacccccacaacaacaaggtggaattaataaccaacaacagtcctagctcttcatcaccttctgatcattgtcaccatctcttgccagagaaatttgacccttttgagacccttttggatgtggagctggcttcctttcttggatttgaaaatgattgatcaagagattttatttattattattgcatgcagtgagatgaatgaaaaaaggtcaagtacttagggagtgttatagataatatcccatctatatatggaatgcctaactaattatgcatctagctatagctagatgtaatatacaaatccagggtttctttttctttttcccgg

SEQ ID NO: 28481 - DNA, 1495 bp, Glycine max
  Clone ID: TF_GmC146_2
ggaagaccaccttgttgtgacaaagaaggggtcaagaaagggccttggactcctgaagaagacatcatattggtgtcttatattcaggaacatggtcctggaaattggagggcagttcctgccaaaacagggttgtcaagatgcagcaagagttgcagacttagatggacgaattacctgaggccaggaatcaagcgtggtaacttcacagaacaagaggagaagatgataatccatcttcaagatcttttaggaaacaggtacaagtcaatcttccaagcacctacttacttggagttttgtgttcaattcaagcaattaagttactaatgaaatcttttagcttataaaaaagaaaaaaactttgttttgaagatttattttttataactgtttttgagtattttgatttgggaagttctatcttttggatccacatgcttaacttaactggatcacattggctatgttacagatgggctgcaatagcttcataccttccacagagaacagacaatgacataaagaactattggaacacccatttgagaaagaagctgaagaagatgcaagcaggttgtgaaggtggtagctttggagaagggttttcagcctcaaggcaaatccctagaggccagtgggaaagaaggctccaaactgatatccaaatggcaaagagagccctcagtgaagctctttcaccagagaaaaagccatcttgtttatctgcctcaaactcaaacccttcagatagtagcagctccttctcttccacaaaaccaacaacaacacaatctgtgtgctatgcatcaagtgctgacaacatagctagaatgctcaagggttggatgaagaacccaccaaagtcctcaagaaccaactcgtctatgactcagaactcattcaacaacttagcaggtgctgatactgcttgtagtagtggagcaaagggaccactaagcagtgccgaattgtctgagaataattttgaatccttgtttgattttgatcagtctttggagtcttcaaactctgatcaattctctcagtccttgtctcctgaggccactgttttgcaagatgaaagcaagcctgatattaatattgctgcagaaattatgcccttctctttgcttgagaaatggctccttgatgaggcaggttgccaagagaaattagttggttgttgtggtgatgccaagtttttctaagttgggttcattttgtgacatatgagcctgtgggatttttttattttattttattttatttcataagttataggtagggcctcatcaattaatctcgcttcggccttattagagagagaagttttccagcctttggtgctagacgtgtatatgttaattattattgacattatgatgattattatcatactgtgttagttgccatacactggcaaacttgcttctcttatgtaaagttgatcttgcgacgagatcttgctttatgaattaattgtttttaaagt

SEQ ID NO: 28482 - DNA, 1799 bp, Glycine max
  Clone ID: TF_GmC1321_1
cccacgcgtccgtccacgcgtccgcccacgcgtccgcccacgcgtccgctctctcattctctttccctcttcaactcaaccacacacttcttagatcaaaagctatctttgttgctttgagtttgaaccttgaatctatcaatcaatcaaagtgggtggtgactcatggaagtgaaaggaataagggcaagcaactccaccaccaccaccacaatccaaagtgaggatgagatggaccttcgaagaggtccttggaccgtcgatgaggaccttgctctcatcaattacattgccaatcacggtgaaggtcgatggaactctcttgctcgttcagctggactcaaacgaactggcaagagctgcagattgagatggttgaattatttgcgtcctgatgttcgacgtggaaacatcacacttgaagaacagctttttattcttgaactccactgtcgctggggaaaccgatggtctaaaattgctcaatatttgcctggaagaaccgataatgagataaagaactattggagaacccgtgtccaaaagcatgccaagcaactcaaatgtgacgtgaatagcaagcaattcaaggacaccatgcgttacatttggatgccaaggctcgtggaacgcattcaagccaccgctgcggcctccgccaccacaaccgttaccgctaccaccgcgaccaacaatgcatacacctacggaagcaaccttaataacaacaaattcgaggttcacgatcacaagggcaaaatggggttaaccgatccttcagttatgaacaatgacttagtgggttcacatgtcacgcaaagttacacccctgagaatagtagcaccggtgcgtcatcatcagactcgtttgggactcaagtctcagcaatttctgatttgactgaatattacactgtcactgttagtggtaacaataacaatactaattctgcggattattatcaaccctctcaaattagttactcggatagttgcatcacaagcccatctgggttgttccctcaagggctagattttcaatccatggatccaaacaccccgtggaacatgcaaagtggggactcctctgacagtttttggaacgttgaaagcatgttgttcttagagcagcaactcatgaatgacaacatgtgaaaacattgggaataggaaaataagacttagatacggttcttcttagtattgtgttttaattaaagttaaagttaacacaagttattgaagtgaaactttaattttaattgaataataatactgaaaacaagagttgtatttaagttttattcttttatgaattatgaattagattgacagaaggggttgtttgtgaaatatacaggtgaaagtatagaaagtagcaacattaataaatcattcatgtgtagcacacacctagatatttaggatctatgatcaacaaatatctgaaacggtggattattataaggataaagagaaggatttttttttacaagcgtgtaggaatttaaattataaagtttttataaattttttgttattactaataatcgatctcactttttattcttttatgtattagtatgaattatgaattagattgacagaaggggctgtttgtgaaatatagaggtgaaagtagaaagtagcaacatcgaataaagtattcatgtgtagcacacacctagaaatataggatatctatgatcgacaaatatctgaaactgtggattatataagctttaagagaaggaattgttttttttttttcaatttgagctttctcagtataagatttc

SEQ ID NO: 28483 - DNA, 2444 bp, Glycine max
  Clone ID: TF_GmC1272_1
gaagatttggctctggcatgtcttcattggattttatactcatggaaccagctgaagttgcaggggttaatggtggaaagtggactgatcaggagactctcctgctccttgaagcattagaactgtataaagaaaactggaatgaaattgcagaacatgttggaacaaaaacaaaagctcagtgcatattgcactttgttcaaatgccaattgaggatacctttgttgactgtgatgatgatgttgatgctggttgcaaagaaactgcggatccagttgcaacaaaaagtgactcatctatggacaaagatgcttcagaatgtattgagaatcatactagcgatggcatcaaagacagtgaaaaaacttccaaagctgaagatctcgaagtcaaagtgaatgagaaggagactccaaagttacaagaaggcagtgatgagaaagccagcgaggaaacttctaaatcagaagatgctgttaaggtaaagattgatcaggaagcagacaatgactgtgctataaatgctcttaagtaagcatttgcttcttttggttttctcctggacctgaaggcccttcttcatttgctgatgtgggtaatcctgtcatggcactggcaacttttcttgcacacttggtgggttctgatgcggctgttgcttcagctcacagctccataaaatccatgacaagaaattctcctggcaccgagcttgctgcaaggtgttgctttcttctagaagatccgccagatagcaagaaggaaccaactagttctgagagggattctaaaagtgagggagaccaggatgaagtaaatgtaaaccaggataaatcaacattggaggataaagatttaccgaatgatcacaataataagaaaattgaaagtaatgctttagaagacaagggaaagccggcttctacagatgatggagccttggaaaaacccatttcttcaaaggagcaagcagtggttaataatgaatgtgggcttgacaagggtcatgatctcaacaatgcaaagctacccaatgatcaagcaccaggcactctgcataattcaggtggttcaacatccaaggctgaaattccacctagttctgacaaggctcaggaggaaactttaattgaagaaccttgcccttctgtaaaggacaagcatgtgtctgattctcttctatcagacaaatcaaaagatgctgagatggtttctaatgctattccctcaactaagagcaagcctcaaaatccagagtctacaaatccagctcatgaatctctagaaacaacggactcagtaatggatgtggatggagtttctaattccttgccattggaaaagattgactctcagccactaattacatcaaaatcatcccaatgtaatgggacagaaaaggatgtagaagtgatgtcaccttcaaatccagttagatcaaattctagtgctgaaaatggtccaaatacaggggcaggtaaagataatgcagataatggagcaaaagtggaagatgatggtacaaagactaaacaggatagcagttttgagaaagtgaaacgtgctgctgtttctacacttgctgcagcagcagtaaaagcaaaacttctagcaaatcaggaagaagaccaaattcgacagcttacttccttgttgatagaaaagcagttgcacaagttggaaacaaagttggctttttttcaatgatgtggagaatgtggtgatgagggcaagggagcatgtagagcgatcacggcataagctttatcatgagcgtgctttgataattgcatcaaggcttggtataccaccttcctcatctagaggtgtaccaccatctataccaaccaatagaattcctacaaatattgcaaactcactcccaagaccacaaatgatgatgaatccaccaagaccactgatttctagacctgcaggcacggtagcaactattcaaaacccattaacaccttcaactgcagcaggaaattcagttcggccatctaatcaggaaaagctttcttctgttgggacaaaataaatgtcaatacatatagaaaaatgttcatgtcttcatacttactgatctctcgccatcattttgacaattaaattcttgcaaaggtcaagtgctggttaggactaactccaaattgagtagtattgggaattcggtgaccagagtagtgtgcattggaagctcatcctttccccgttattaggagcagccgcagatgagaggacggaagtttactgatagatttgaagttgtagaccgatttttttatatttatttttgaggtgtttaacttaaaactagtggatagttgtgcaaaatgcgcgccttcaatcctctaacttgaatgctattcactacattattattggatgagagcatattgaaatttggatgacttcataaagaatatatagcagtctggca

SEQ ID NO: 28484 - DNA, 1002 bp, Glycine max
  Clone ID: TF_GmC116854_1
cgattctctaccagagttgcaatattttttcttaagttccaacgtctccccttccacgccgcttcctggctcttcgtctcactccgccgcctcgtaggttcctgtcgcaatcgcttaaggcataatattagtgcacatggggagacactcttgctgctacaagcagaagcttcgtaaaggcctctggtctggctcgagagacgagaagcttttgaattacatcaccaaacatggccatggatgttggagctccgttccaaaactagctggtcttcagaggtgtggcaagagctgcagattaaggtggataaattatctcaggcctgatttgaagagaggagcattctcacagcaagaagagaattccattgttgaacttcatgcagtccttggcaacaggtggtcacagattgcagctcagttaccaggaagaactgataatgagataaagaatctatggaattcctgtctgaagaagaagcttaggcaaagaggcattgacccaaacacacaccaacccctctctgagattgagaatgacaaggacaagcctctcacagctgacaaaagcaaccagaaagcctccaatgaagtgatgagtcattcggagccaccaaaaccaaagccaatagctactactgcaactacttctatgcctatggatagacatccccttgaagtttcttccacctccaagatcagcagtggcaacaacaacagcaccctatacaggtttgacagctccatcactgttctgatatgatgggaatgggatattttcctttccagcacctcaactatggaccaaacatgggactcactactactcccaacaacaccccactttgcttcataccaagttccacttcttctcaaatgatgtcagagctgaattccaccatgttccattctatggttccaacacatgtaaaacccactggtagtcttcactctaacaacaacaacaaccctttttcaatatcctctgatggtggtcaaaac

SEQ ID NO: 28485 - DNA, 1279 bp, Glycine max
  Clone ID: TF_GmC57353_1
tagagctccttgttgtgaaaagatgggattgaagaagggtccttggaccccagaggaagatcaaatcctcatgtcatacatccaaaaacatggccatggaaattggcgtgccctcccaaagcttgcagggttattaaggtgtggcaagagctgcaggctaaggtggattaactatttaaggccagatatcaagagaggaaatttttcaagcgaagaagaggaaattatcattaagatgcatgagttgctggggaacaggtggtcagcaattgcagcaaaattaccaggaagagacctggagacttgaattgctagtagatggcattgaccaagaaatattgaactgggttaaggatggaaaatacattttcttgttcggaggggatgatcctgaatgggtaagaagatttgtgaaggaagcccgcagagttgcaacggctacacaaatacccctagagatggtatatgttgggaaaagcaacaaaagggagcaagtgcagaaaatcattgacaccataattcgtgataagctcaacactcaatactggtcagagcagagcatgatatggttcttctggacccgtcttcagagcatgctcttctccaagcttcaactcaagcaaacagacgacgatgaccacgtgatgcaggaaatcaagaagcttctgagctatgacaaacagggtggatggattgttctggcaagagggtctcacattgtggtcaatggacatgccacaaccgggttgcaaaccttggtggagtatgatgctgtgtggaaagaacttgctgacagagatgggtttgaaccagcatttaagaatcactacgacaaggttcattcaattgttagtccttgctgcaggtttgagttctctcattcaatggggagaatcccagagaggctcacgtgccccgagtgtcgccgcaacatgcacgtgctcaccaccttccagtgctgccacgatgaaaaaattgatgaggacttttttgtcagcactgttactcctcctaccatttgataattcattgttcactctctattgcttcctgtgattctctgcagcgcaatttcatgcatagccctatatgtttacatgtatttttttatttttttttatcacatatctatgtaataaaatgtgagtggtgaggttcaggctcccccattgaggtatgggtaaattattatgtgatttgtgtcagggcttgactcttattgtacaattgacacttaaagaagagtatggataaattgagtacttttgaatgatcaaaa

SEQ ID NO: 28486 - DNA, 2065 bp, Glycine max
  Clone ID: TF_GmC692_1
ccacgcgtccgtaatctctctcgcgctaatcttctccctattcaatctggttcagacctactcctgctgacatttcatctacaagtgtcgttcaaaaacccattagttaattggaaaggtagctcattcccacattgttttgtgggggaaaacccacaatacaaaatgggaaggcactcttgctgttacaaacagaaacgtaggaagggtctttggtcaccagaagaagatgaaaaacttctgaggcatattacgaagtacggtcatggatgttggagctcagttcctaagcaagcaggtttgcagaggtgcggcaagagctgcaggcttaggtggatcaattacttaaggcctgatttgaagagaggtacattctcacaagaggaggaaactctcatcattgaacttcatgcagtgctagggaacagatggtctcaaattgcagctcaattgccagggaggaccgacaatgaaataaagaatctgtggaattcttgcctaaagaagaaactgaggcaaagaggaatagaccctgtgacacataagccactgtcagaggttgagaatggggaagaggacaaaacaagaagccaagagttatccaatgaattgaacctcctgaattcagagagcttcaagtcagatgaagggtcctatgagcagagagcatcatcatcaattgcccccaaagcctatgagatggaaggctcttgcagctccaagattaacaccaccaaaaatgacaccaacttgatgtccaattgttccaacaaagacatgttcttagacagctacaccactagttgccaaccctcagatttgatgggaaattaccctcttcaaatcactgacactctcccaaccaattcaaactcttgccattggttcagccaaactgcaagaccctttgatatgaactctgagtttacaatcacttccaatgttatgtccattcttccacctacaacaacctcatttctcccaagcacttctttttgctacaagccatcacttggtgtcccttcagaagatatttcaacagcatcttttgctttgaatggtcccaattactgggaagccagtgcctccaacaacagcaatggaagcaacaacacaagtgatggcagcagagagttgacaactacaagtagcaagaacagtgtactctcttcttggggattgacagaagaaacaaagtggtctgagtacctccaaaacccaatgctaatgctggcagctcctgaatcattgtgcaaccaaattaggccagccacacatttggtacctgataacactttagggtcaataatagtgcctgattccaaggaccaacaacaacaacaacaatctcaaaattctagcatcttctccaaggacacgcagaagctaacagcagcctttggacatatatagcaccaggctttgacacaatgaaatactattttagaagggctccaagggatttatttgtgttcttagtacaggtgtgtgaaacaacagattaattttgctcttgtatatagataaggtctgtaaaaaaaaaaaaaacattttggtaatacatttgtgagccaaatcatttgttttttttaccttctcgggtgtgggtggaatagaattgcagaataaggattgctctgctttgttctttctactctttcttttcatttccttgctacactgttgactgcattgcaacggtgcattcattaacttccaatacttttacaccatccacagatgtttattagcacacgggaagtatcacttttagttactttgaccacacactatttaccgaatctctttcatccgttatgatcttctattcttctctcaccgcactatcttttagagtactcaaaatggcatcaaacttgtgcagccaaaactttaccctatccaatatcctaagggttgcccatcattttcttgacacaagaatgatttattctattttatttatttcacttccataaataatagcctaagtttcaagactttcccatctaagcaagttttaattttacttgcacaaggaggtgacttggtgttgttatctctc

SEQ ID NO: 28487 - DNA, 859 bp, Glycine max
  Clone ID: TF_GmC1076_1
aattcggctcgagccgaggaagatcagggaaaagctgtaggttgagatggttcaatcaattggacccaagaataaacagaagtcctttcacggaggaagaagaagagcgtcttctagcttctcaccggattcatggcaatagatgggcagtaattgcaagacacttcccaggacgaactgataacgctgtcaagaatcattggcatgtgatgatggcaaggattcggagagaaaggtctaaaaattatagtccaaaacagccactttttcctccaaacttgcaggtcgatcttgagacaaattttgagaccatcccttcttttgttgacaagtattatgaaaagtacagccacccttgtgtcgcactcactcatagctcttttcaatttcccaccaagaatttttactttcaagatccaagttctgctggttccacagtgcctcgagacaattgtgaatcagtagagttctatgattttcttcaagtaaataccgattcgaataaaagtgaagtgacagacaacgccagaagagacgaggaggaagtaagtcaagatgctgtgggaatgaagaataaggacaatggtgttccattcattgattttttgtctactggaggctgctaacatatatataattgccaaagtacaacctcaattacttccaatattgatcaattgatcgagtctgactacagaacaaaatctccacgtacgtagatccatttatgtaattaactacctactgcattcacaaaacagtaatgtatttaaggatatatacatgtacatttataacatgtaaaaaaactgcttctaagaagctccatgcatcgaagatcaaaaacgtacattgcatc

SEQ ID NO: 28488 - DNA, 402 bp, Glycine max
  Clone ID: TF_LIB3109-021-Q1-K1-D10
ggaagaggaaggggctagagaggaaagaactagctggctggaagctgagaactttagcatggactagtactactagtacattcatgcatattacgttggactatggtggcttaaccatagcatcgagagcgcaaagatggtgtgagctccttggtgagaaaagatgcgcctgaagaaagagccttgggctatcgaggaagatcaaattctaagatgttacattgacaaacatggacatggcgaattggcctgccctttcaaagcaagcaagcttgttaaggtgtgggaaaagctgtatactacgctggattaactatgtgaggcccgatgttcaaagacggaatttcacaattgacgaagaagatactatcattgagctggatgacatgctgaggaacaggt

SEQ ID NO: 28489 - DNA, 544 bp, Glycine max
  Clone ID: TF_jC-gmro02910019d05a1
ggctcgagaaagaattaaagtagcaacaaatactctttcctacacttggcagaaaaaaaatggttcaacgggaaatccgaaggggtccctggacagaacaggaggactacaaattagtgtattttgttaacatgtttggagatcgtagatgggactttatagcaaaggtatcaggtttgaaggtggagggagactgtaaataggtttgaatagaacaggtaagagttgcaggttacggtgggttaattacctccaccccgatctcaaacgagggaagctcacaccccaagaagaacacctcgtcatggaccttcattccaaatggggaaataggtttgagaaccatgcagaaataattaaactataagctacctaccttccaatcatcattactcataattttaaattaattttttcctaccatacaagactattagtattaattagttctttggccttatgttttttttttatagaataggatatcaaaaagattatattaattatatacattgagctagatcggttgacaccttattttgta

SEQ ID NO: 28490 - DNA, 1775 bp, Glycine max
  Clone ID: TF_GmC937_1
ctggccaaaccatatctcaaccaaaactattacctctctctcttttctctctaacaaacactccataaacggaaaagaaaagccacacaacaattaattaagttgttaaatttttgtgagatggagaggagtttatcaggaagtagtgaagaggagatgtcaataacgaaaggtccatggacagaggaagaggattctgttctcttcaattacatcactgtccatggggaaggtcactggaactctgtcgctcgctacacaggtctaaaacgaacaggcaaaagctgcagattaagatggttaaactacttgcgtccaaatgttcgacgtgggaacataaccctcgaagaacagctcttgattcttgacctccattcccgttggggcaacaggtattatcatttatgtttattattcattaaattttttaggttaaaatattccttggttcatgtaatttttcttatttttagtctcttgtacaagaaaattgtaaattttaatcccttcacatgcatccatgtttgctaaagttttggttcgcgtcactactaacatatatggaagactttttaggttttagtagtataaagcagccacaaacactttctccaattaatataagccgctaaaaaaatgttgtacatacattaaaactgaaaaatgtttgagaaacactcaatataccatcatatacttaatgagaaaaatatagataggaggtaaataaaatctgattaataattatttttatcaagaagcaaactcaaatattattcaaatgattcaaccttaatttcaacagcacatgaattacttatgctgaatcccctaattaggtggtgatttcctgcacagaactgaaacttaagatgaagcaagcaaatagcagtttgaccaatttttaatctgttagtgatagaacttggtaattgaagtgatgttgtgttatttgttttataaaatgaaggtggtcgaaaatagctgaacatttaccaggaagaactgacaacgagataaagaactattggagaacgagagtggtaaagcaggctaagcaactaaagtgtgaggtgaacagcaagcaattcagggacacgttgcgttttgtgtggatgccacgtatgttagagcggatccaagctcaggcctcatcatcatcatcatcatcatcaggccaagcccaccaaaccacgttaatctccaacgctcaagcacacagtgacccttgcggagtcatgacgaccaacccaagtttgttgtcggaggtgtcatcatcagcccttgatgcccacgcgccttctctctatgactctagtgcgtcttacaatctaatgggtggtggtagttcctcatcgtatagtgcagaatattgctactactcggacatagcaggaaatggttttggtggttcggacttgtggacggatgaaaatatttgctttctgcaacagctgctcgctgatcatgacttgtcgtgaaacatgcatctttgttttaaacttaggtgaaattaatttgcatctatcaagtatcaacgtaactattattatgtatacttcaattaatttcaagagaactgctatttgttgtaaatttaatttagcctgatttctaagagataatgatgagtattttaatttcccagaagacgattttgttcacaacaaatagaattaataatagagtaataaaatgtgattcgaaaaaatcatacaaatgcatgagtgtaagtttttgacagaaataacatgtgatgagttgtatttggctgg

SEQ ID NO: 28491 - DNA, 1461 bp, Glycine max
  Clone ID: TF_GmC1085_1
ggtccggattcccgggtccgccccacccttccggaaccatgggctttcccccccagtcctctctcacaaatggggtcgccattcctgttgtgtgaagcaaaaattaaggaaaggcttatggtcccctgaagaagatgagaagctatttaattacataacaagatttggagtcggatgctggagctcggttcccaaactagctggattgcaaagatgtggaaagagttgcaggttgagatggataaactatttgaggcctgatttaaagagaggcatgttctcacagcaggaggaggatcttataatcagtcttcatgaagttcttggaaacaggtgggctcaaatagcagcacagttaccagggagaacagacaatgagattaagaacttctggaactcatgtttaaagaagaagcttctgaagcaagggattgacccaagtacacacaagcccctcacagaagctcatgtgaaggaagaaaagaaaatcatagagacatcaccaatgcaaacaccattgtctcaaggcccttcagttccattaatctttccttcatcacagggatcatcacttctaataagtgattccagttactatgatggagggctaacagaagcctcaagagaaattttcatgaccaagccagcattggaccctttgtcctactatgattttccaatgggtgttgcacagtctggttttaacttacctgttagtcagtatcagacaagccttaaagcatctgatcagaacccctttggacccaattcaagctatgtattctcttcaatgccaagtctaaccaattctgatcacgggaacgtgtcggtgactgagttttcagacaacaattcagcttccaaaataagttcattgttcatgaatgaccaggtgaaagaaagttccagcaacagctcaaacttgagcaccatttaccatggaggagggtgtcatatcagcagcatgatggaaaatgcagggttctcgtgggagggtgacaacaagtttgaccctttgtttcagttccaagtaaatgccacaaaatcagaggattttaagacaagttcatgggaagaagggcagctgcatactcaaaattccatagatttcacgagctttccgttaacgtcactttcagaagatctaacaggagcaaattttgatgtattccagcatatatgaactgtaaattcttttctttctttcttttgatttttttgaactctttttcatgttagcaaaaatagaatgatgttgatagtacaggagatttgtagcaaaagatttgagatgagatgattccccccctcccccgcatctattattaccattgatgtatctgttttcatcacccaaagtttgaataacgatatattcaattgagtgcagctaattttgttttatgactgtaatatttccatgttgtccaactagtgaattattattatcattattattta

SEQ ID NO: 28492 - DNA, 736 bp, Glycine max
  unsure (1)..(736): unsure at all n locations
  Clone ID: TF_GmC241740_1
gaaaagaaaagacaattattattcccaacagtcccctcagttattcaagtcctcactacccttaaaataggaatttcttattgaaaaagaaaaaagaaaacagaaatgggacgtattccatgttgtgagaaggacaacgtgaaaagaggacagtggacacctgaggaagataacaagctctcctcctacattgctcaacacggcactcgcaactggcgtctcattcccaagaatgctggtaagtccctccccactctatattgatatcattcatatcaatgccaaaaaaaacaagcttttattcttgattttgcttatgaaataggcctccagagatgtggaaagagctgcagattaaggtggactaattaccttcgtcctgatctcaaacatggccaattctcggattcggaagagcaaaccattgtgaagcttcactcagtttttggtaacaggtacattgaatattagccatacattgaaattattgttctgttgattcttttaaataaatgttttactttaatgggtgtttagatggtcactgatagcagcccagctgccaggacgcactgacaatgatgtcaaaaaccactggaacaccaagctgaagaagaaactgtcaggcatgggtatagaccctgtcacccacaagccattntcccatctaatggctgaanatgctacaacattggcacccccacaagcagctcaccttgctgaagcggcccttggc

SEQ ID NO: 28493 - DNA, 843 bp, Glycine max
  Clone ID: TF_GmC189_2
ggtgggagagagagatgggaaggtccccttgctgtgagaaagcacacacaaacaaaggtgcatggaccaaagaagaagatcatcgcctcatttcttacattagagctcacggtgaaggctgctggcgctctctccccaaagccgccggccttctccgttgcggcaagagctgtcgtctccgctggatcaactatctccgccctgacctcaagcgcggcaatttcaccctcgaagaagaccaactcatcatcaaactccatagcctccttggcaacaagtggtctctaattgctggaagattgccgggtagaacggacaatgagataaagaattactggaatactcacataagaaggaagcttctgagcagaggtattgaccctgccactcacaggcctctcaacgatgacaaggtattggaacgctgccctgacttgaaccttgagctaaccattagtcctccccgtcaacctcaatctgatcagcatcacttgaagcccgttgggagaaactcaaacctttgctttgcctgcagtttgggtttgcaaaatagcaaagatcattgtagctgtgcgctcaacactgccaacgctgcttctggccatgatttcttggccttgaaaaccagcgttttggaaatgaaatgagtcaaattcattttggaatctttcttccctaattaattagttgttaatggatgcaaatgattgcctgcccaatttcctcgtggagccctttctattattcctatgttcatgtacatgtgcgtaagactacaaactttcttgtttatacgattggttctttccaaatagaatacaactatatatttttgctatttct

SEQ ID NO: 28494 - DNA, 979 bp, Glycine max
  Clone ID: TF_GmC937_2
acacaagaattaagttgtgagatggagagaagtagtgaagaggagatgttaataacgaaaggtccatggacagagcaagaggattctcttctcttcaattacatcactgtccacggcgaaggtcactggaactctgtcgctcgctacacaggcatgcaaagcattaattatattcatcatcttaatcctagcttctttcttactcacactcatcacgttttcaatcacaggtctaaaacgaacgggcaaaagctgcagattaagatggttgaactacttgcgtccaaatgttcgacgtgggaacataaccctccaagaacagctcttgattcttgacctccattcccgttggggcaacaggtggtcgaaaatagctgaacatttaccgggaagaacagacaacgagataaagaattattggagaacgagagtggtaaagcaggctaagcaactaaaatgtgatgtgaacagcaagcaattcagggacacgttgcgttttgtgtggatgccacgtatgctagagcggattcgggctcaggcctcatcatcggcccaagcccaccaaagcagcttaatctccaacagtaacactcaagcacacagtggattgttgtcatcagcgcttcatgcccacgcgccttctctctctgactcgagcgcgtcgtacaatcttatgggtgctgatgctggaagttgctcatctcatagctactactcagacatagcaggcaatggttttggtggtgcggacttgtggacggatcaaaacatttgctttctgcaacaccagcttgctcatcatgacttgttctgatcatgcatacttcaacatcttgctccaaaattcactctaaactgcaacatataaagcaattgtaacactagtcgtgaaacatgcatgtttctttttatgttaatttggtgtgaaatttaataatctatacttcaattaatttcaagagaactgccatttgttgtt

SEQ ID NO: 28495 - DNA, 744 bp, Glycine max
  Clone ID: TF_GmC106208_1
cacgcgtccgctgcattttagcgcgtaaatacctaaatcctcagcggcaacgtaaaagcttcagtttttgtatcaattcgagtgatccaattgcactattccttaattgcaacctcaaaaaaatctagggtttttatcgtaaaaagtagaaagtatagctacccttttcttccattctgatcctgcgcctcaacaaattcaaattcattcaggagttcgcgcagagaatcaatgggtcgctctcgtctcgagccgattcggctcgaggaggaccccaaccagaggtcaaggagaaaaaagaatgctgccagtggagagaattcagaatctggagctgcaggccaaggagcaggtgaagggaaaaaggctctgtaccactgcaattattgtaataaagatataacaggaaaaatccgtattaagtgtgccatgtgcccagattttgacttgtgtatagagtgcttttctgttggagctgaggtgacacctcataaaagcagccacccttacaggggtatggataatttgtctttccctcttatttgcccagactggaatgcagatgatgaaatcttgcttctagagggaattgaaatgtatggcttgggaaactggacagaagttgctgagcatgttggaaccaaaaacaaagagtcatgcatagaacactataggaatgtatacctgaactccccgtactttcctggtccggacatgtcttatgatggtgggaaaaacagaaaa

SEQ ID NO: 28496 - DNA, 552 bp, Glycine max
  Clone ID: TF_GmC1274_7
ggtgtgtccccttagccaagctcgcgtctcacttctctctcttatattaatcactcccgcacacagagcataattcacctttcttttccgaccaaaggttcgccagaaaatgcttctatcctcctcctgctccgccgccggctccgccgtctccggcgagatcatgctgttcggcgtgagagtcgtagtggactccatgaggaagagcgtgagtatgaacaacctctcgcagtacgagctccctcgcgacgccgccaacgccaaagacgacgtcgctgccggctacgcctcagctgacgatgccgctccgataaactccggcaagaaccgcgaccgcaagcgagggattccatggacggaggaagagcacaagctattctatctcgggttgcagaaagtggggaaaggtgattggagagggatctcaaggaactatgtcaaaacgaggacgccaacacaggttgctagccatgctcagaagtactttctccgccgcaccaacctcaatcgccggcgccggagatccagcctctttgacatcaccaccgactc

SEQ ID NO: 28497 - DNA, 589 bp, Glycine max
  Clone ID: TF_GmC879133_1
gcaccagtaacttagcttttccccaagagcatacacttgctaataactgctaactattctttgccttagaaaatatattcgctgtgccactgcattatgggaaggtcaccatgctgtgaagagaatgttggtgtaaagaaagggccatggacgccagaagaagatgagaagctgattgattatatcagcaaacacggccatggcagttggagaacacttccaaagcgtgcaggtctcaataggtgtggtaagagctgcagattaaggtggacaaactatctgacgcctgatatcaagagaggcaaattcagtgaagaagatgagaggattatcatcaaccttcattcagttctcggaaacaagtggtcaaagattgcaacccatctgccaggacgaaccgacaatgagatcaagaactattggaacactcacataaggaaaaagcttctgaagatgggtattgatccagaaactcacaagccaaggacagacttgaatcacctcatgagtctttctcagttgcttggcacgtcaaacttgagcagtgccatgaacactacttggggcaataaccctcttggtttacaac

SEQ ID NO: 28498 - DNA, 2364 bp, Glycine max
  Clone ID: TF_GmC6850_1
ttctcatacgaagctctgtgctcgctgttatcagttttttttcctctgtttaacccagaaatatgtaacacaaatcaaaacatcgttgttgttttatttgagcatgcaagttggctaactcttggaaaggaaaggagcttcaagaagagagagataaaataaatggtgcaagatatgaagcagcaagacaatggagaatctaagaagaaggagcgtcacattgtgacttggactcaagaggaggatgatatactaagagaacagattggtattcatggaactgaaaattgggcaattattgcatcaaagttcaaagataaaacgacaagacagtgcagaagaagatggaacacttacttgaattatgatttcaagaaaggtggatggtcagctgaggaagacatgctcttatgtgaggctcaaaaggtatttggtaatagaaagacagaaatagcaaacctggtctcaggaaggacggataatgctgcgaaaaatcgtttctccacactctgcaggaagacaccataatttacatcttaaaaaaaagagatttgcacctcgcacatcaattcaactaacatggggttgaagtctcaacattgtaataatatggatacaacatcagaatctggagtacctattaagaatttgaggagggccgatattgctgatgatgcagaaaagatcaaatttgaggaccgatcacatttacgaaatggaactccaataaatcagcagccaagagcaccacttgcagtcttagctcaaaactctcataactcaaacaacttgacagaccagcatcatctttgcaatcccaagtttagcagttccgcccaaaataacaagattcaaggaacatttctcaaaaaagatgacccaaagataagtgcattgatgcaacaggcggagttactaagttcactagctctaaaagttgatacagagaacatggaccaaagtcttgaaaacgcatggaaggttcttcaagagtttctgaaccgatccaaagaatcagatatccctggacaaaaggttccagatgtacggcttgtagatcttaaagatatgattgaggagttgaagagtggtaatgaggaaggccgggttcttcaagagcttctgaaccgaaccaaagaatcagatagtactgggcataaaattccagatttacggcctgcagattttaaagatatggttgaggactcaaagagtggtaatgaggaaggccaggtacttcaggagtttctgaaccgaaccaacaaatcagatatccctgaacataagattccaaatttacagcttgtagatcttaaagatatgattgaggacttgaagagtggtaatgaggaaggccaggcttgttggaggaaaatggactgttatgaaaactctccaggcagttctggatacagtacaggatcaattctcatctgtcagtcagctagtgataatttggagcactcattgcatcaggatattggaaccgaaatgaagtctaaacaacttgaagatgaaaaaggagtaaaagtggttatgcctactgcaaatgtagatcaagatatggtaccatgttgtatggaacagataaacaatgacgggattgtttctacctcatcaagattggagttcagctcccctcttcaagtaacccctctgtttagatctttggcggcaggaattccaagcccacaattttcagaaagtgaaaggaacttcttaaggaaaacactaggaatggaatctccatccatcaacccaagtgccaactcatcacaaccgccaccctgcaaaagagccctactacctagtctataaactatctgagatacaaatattgaaccgttctttccctgttctgaatcctactttgtcttccttggcagtaatctggcttgtggagaaaaaaatacaatttcactgtgcctaaaattttgaaaggcatatgctgctccccaagaatgttatgatgcattctttccaccttcaacatatctaacaactcaaaagttacctttttgaaacttgcacataaaaattggcttgcttagtgtgtcattctttggcttgttttcttataatattattctgggtttgtttttctccaatccagcaatcagcattttgtccggaaccttattttttttgtacagagcttgctgtgtaatcactagcatcctgattcctgagtgtgtatgaatacattagcatatatagaagagagaaaaaagaaagtgagaacttggattctaatttgttgtttggtgtgtgcataggtattttaataaagatttttcccttatggttctgatgtactgaaacttaactataagtgattggaaatgcattttggttttggtgtgc

SEQ ID NO: 28499 - DNA, 400 bp, Glycine max
  Clone ID: TF_GmC142212_1
gtgtgtgtgtgagaagagatgggaagagctccttgttgtgacaaggccaatgtaaagaaagggccatggagtcctgaagaagatgaaaagctaagagagtacatagagaaacatggaactggagggaactggattgctctcccacaaaaagctggtttgaaaagatgtgggaagagttgtagactcagatggcttaattatctcagaccaaaccttaagcatggggagttttctgaaggtgaagatagaataatctgcactctctttgctagcattggaagcaggtggtcaataatagcatctcagttgccaggaaggactgacaatgatatcaagaactattggaacaccaagcttaagaaaaaaatgatgggagtggaaatgaaccccttcagcactt

SEQ ID NO: 28500 - DNA, 2113 bp, Glycine max
  Clone ID: TF_GmC192_1
gcaaaggggttttatttgtatgatgataaatgcaagcctagtcctgatcctgaattgaaaaactatatcgagaaagcaattcggctcgctctttctctctcgctataccaatattaatttgaacctctctcagttcaattccagatagactttgttggcatttgagttttgtcgaatagaaccaaaaagaaaaaatgggaaggcaaccttgctgtgacaaagtggggttgaagaaggggccatggaccgcagaggaggataagaaactcatcaatttcatcctcactaatggccaatgttgctggagagctgtccctaaactagcagggctgttaaggtgtggcaaaagttgcaggctcaggtggacaaattatctgaggccagacttgaagagaggccttctatcagaatatgaagagaaaatggtcattgatctccatgctcaacttggcaatagatggtctaagattgcttctcatctcccaggaagaactgataatgagatcaagaatcactggaacacccacataaagaaaaagctcaagaaaatgggaattgatcctgttactcacaagccactttccaataaaactgagcaaactcaagcccaaccagatgaacaacaaacccaccaaccattgcaagaacaacaagaagaacctatcccagttgagaaagacaccaaatttgaacctgaaaaagagcaaaacaaggagccagagaagccagagagttcaattgaatcattaaccatcactgaagaagccaaggaggaagaccaaattatgacacccttatttgactcatgggaactaatgaatgagttctgcactgatgaagttcccataatagaatcaaatgagattctagttccttctgctccttcttccacttcaccaaccactactactactacatcatcttcaacatcaacatcagcatcttcaaattcaaattcatccaacttccttgaagaccttctgctcccagattttgagtggtctgatgattacaatgatactaattttgacaataataacaatagcagcatggccttgtgggatgatgactttattagaagttggaatttgcttattaatgatgatgatggtgatggtgacagaaagcaagtgtttgaggctcctatcaatcagtacccaagagtgatcatggattcagattcttgggcctatggcttgttttgatttgaaatttttttttctcctctctcccccggctgcttacttgtaattgttcttttaagttgttgcaaaagaaaataaaagaaaatcaggattcttgtttaagaaaaggacatcattgaaatgacattctttcctgtggtgaatgaggcttgtcgagtccttgatgaaggtattgcagtcaaaggatctgatcttgatatttctgctgtcatgggcatgggttttcccccttacaggggaggtatcctattctgggctgactctcttggatccaagtacatatattcaaaattggagaaatggtcagagttgtatggagaattcttcaagccttgtgcctacttggctgcaagagctgccaaaggaattccactgagtgcctctgtggagcaggcaaattcacggttgtaataaataaatagctcgttacatgtttgcttgattcaatggtcctttcctttctaatggtaggaatatagtggtgaattgggagataccaaaaaagtgtacgatgagaaaatatttgaacagttgtgtgtgaggcagtcgaaattattaaatgtcagtaaattttttcagagaaaaaaactgtattttttatttaggacgtggagcatggtttcttctttgtatgtttcatcataagttactgttgcagtgctgctgattattgttagaacctaagctcatttatttccttttcattcaagcaaactatttgtcatgttattcttggattgtttagtaacttaaggtaattttgaggtctaaagggcccttcacttacactttgcatctgtagccagaaagtcaagatcgtctaatggaatttgtctattaaaactatgcttggtagtactgtagtatttattagaataaaggctaaaagagttaactccattactccc

SEQ ID NO: 28501 - DNA, 1095 bp, Glycine max
  Clone ID: TF_GmC100_4
ggctcgaggaaaaattggccatcagtggaataatattttgaacactggggtcaggaatcatcaacctagctagtgtgtacaacaatgaggaagcccgaggtttctggaaacaacaacaacaacaacaacattaataacaagcttagaaaagggttgtggtcacctgaagaagatgacaagctcatgaactacatgctaaacagtggacaaggttgttggagcgatgtagccagaaatgctggccttcaaaggtgtggcaaaagttgtcgccttcgatggatcaactacttgaggcctgatcttaaacgaggtgcattctcacaacaagaagaggaactcatcatccacttgcattcccttctcggaaacagatggtctcaaatagcggcgcgcttaccagggagaacagacaatgaaattaagaatttttggaattcaacaataaagaaaagactcaagaacatgtcatccaacacctcaccaaatggaagcgagtcctcatatgagcctaataacagagaccttaacatggcagggtttactacttctaatacccaagatcaacaacatgctgattttatgcctatgttcaattcatcatctcaatcaccctccatgcatgccatggttctcaattccataattgacaggttgcctatgctagagcatggactaaacatgccatgttctggtggattcttcaatagcacagggccatgcttctcatcatcacaaagtggagttgacaacaaagggatttatttggaaaatggaggagtatttgggagtgtaaatattggtgcagaaggggatgtgtatgttccccctctagagagtgttagcactacttctgaccataacctgaaagtggagagcacatgcaacacagatactaacaatagttactttgatgacataaacagtatcctccttaataattgcaacattaatagcaacaataagagagctgaaaatagggctggtggggtggagaatttgtttcaggaagagttaaccattggagagtgggacttggaggagttaatgaaagatgtttcatcctttccctttcttgatttttcaaatatccaataa

SEQ ID NO: 28502 - DNA, 1039 bp, Glycine max
  Clone ID: TF_GmC875_2
ggtgagtctaatcatggaactaaggcttcaagatcagatcaggaacgacgaaaggggattgcttggactgaggatgaacacaggttatttcttctgggcttggataagtatggaaaaggagactggcgaagcatatcaaggaactttgtggtgacacgaactcctacacaagtagcaagccatgcccaaaaatacttcattcgtttgaactcaatgaacaaagatagaaggcgatccagcatacatgatatcaccagtgttaacaatggagatatttcagcacctcaagggccaataaccggtcaaacaaacggttctgctggaaattctactgccaaagcagccaaagcggccaccccggcctcaactggggtgccaggtgttggaatttatgcagctccaaccattggacaacctataggaggacccttagtatctgctgttggcaccacagtgaaccttcctgcacctgcacacatggcatatggggtccgagccccagtacccggtgcagttgtacctggtgcaccggtaaatatgggccctgtgacgtaccctatgcagcatacgtctgttcctcacaggtgaagtgctgtttagaggcctagtgtacaaaagaaacaagagactagtggtggcttctgcagtgaatgaaattcttttcttgacaattgctttttgcttattatatgcaacaatgagttatatgcataatctgtcatttcaaataagccatatgaggaagcaattgaatgtatccgtgtaggctgccatggaatgtttgacagccttgacataggagagcataaaagtacggttgttttgtagacatttgaactggctattattaaaccgtgctatagaggaaggttctatggatttcaagtgtaaattattgttgcactcttggtttttgtaggaaataaactcttcgcctatggtctaccttaactttatgtgtgtaagttactacaattgaattggcacgaattattaaggttatgcttggattaaagtttggaaaatacttttatgaaaa

SEQ ID NO: 28503 - DNA, 595 bp, Glycine max
  unsure (1)..(595): unsure at all n locations
  Clone ID: TF_GmC8609_13
gggattatggtgaactagatggggatagttggactgatcaagaaactttgctgcttcttgaagcaatggagatttacaatgagaattggaatgaaattgctgagcatgttggtaccaagtcaaaagcacaatgcattcttcattttctccgtctacccatggaagatggaaaattggaaaatattaacgttccaagcatgtctttgtcatccaatgcaataaatagagatcatagtggaagactgcattgttactcaaatggagatactgcaggaactgtccatcaaaccagagattctgacaatcggcttccttttgcaaattctggaaatcctgttatggctttggttgcctttttagcttctgcggttggaccaagagtagctgcttcttgtgctcatgcagcattagcagtattgtcagaggataattctggcagcacgtcacaaatggaagcaccgggacatgataataggacaaattcagaaaacatacatntgtcgagatggtggccctcatggagaaacagcagtttcaaataatcataatgaggataaggcaaaggtgcgtggttcatggggtctgaatgaaggta

SEQ ID NO: 28504 - DNA, 966 bp, Glycine max
  Clone ID: TF_GmC316_1
tgatccgaacggtgctaggttgtggttagctgagacggcaaagattttcgaggctataggttgccttgaggagcataatgttctttatgcgacagtgcatgctccaaggggaggctgagacgacagccaccaccgaaattcccaagtctccgttgacatctttatctgcatctaattcaatatacaacactgaaactttcaaagctcttttgagaacttgttattgcaatggctgacatagatcgctcctttgataataatgtttctgctgtttctactgagaaatcaagccaagtttcagatgttgaattttctgaagctgaggaaatccttattgccatggtgtataatctggttggggagaggtggtctttgattgctggaagaattcctggaagaactgcagaagagatagagaaatattggacttcaagattttcgactagccaatgatcggtggcagaaaacgaagcaaggaaatttttggtgcctacaagtcattacagtgactttgtggggatatgaaatggaaattgatcctattaatcatatgggtacttatatttgcattttgcggtaaccaacaaaaaggggcatgccattctaaaagcccttatgtttaatgttacttaattttatctttgtaatgttcccaagtgttttaggcaatctatgattcagatctgttcgatcatggcaagaacagtatgtacttaattaatgcagatcacctgcatgtgcatgtgtatttctggttcatttagccttcttgctaatggttacaactagctttgccttggcctatagcattggatttggaagcggattttttctttgcatgtatacatctgttgatgtacgtcaagtgaagtatgtttttaatgcagaccacctgcatgtgcatgtgtatttctggttcatttagcttcttgctaatggttctacaattgtcatgtggctacaaaa

SEQ ID NO: 28505 - DNA, 1094 bp, Glycine max
  Clone ID: TF_GmC1195_1
ctctattcggctcgaacatgcacacaaagtaatggacaaaaaaccatgcaactcatcatctcatgatcctgaagtgagaaagggaccatggaccatggaagaagacttgatcttgataaactatattgcaaatcacggtgaaggtgtttggaactccttagccaaagcttctggtctcaaacgaacgggaaagagttgtcgactccgttggctaaactaccttcgtcctgatgttagaagaggaaacattacacccgaggaacagcttttgatcatagaacttcatgcaaagtggggcaataggtggtccaaaattgcaaagcatcttccaggaagaactgacaatgagattaagaacttctggagaacaaggatccaaaagcacattaagcaagctgagacttcacaacaacatggtaattcagagaataatgatcatcaagcaagcactagtactagcaaagtgtccaccatggcacatccaaatgagactttctctccaccctcataccaaggaacttttgagccattccaacctcaattccctacaatcactgatcaatcaagttgttgtaccaccaccaacgacaacaacaactattggagcatcgaggatatctggtcgtctatgcaattactcaatggagattaaacctagctatatgcatgcctatataaatcatatatatgatgatatataaacctaagctcttgtagagtgtgttcaggcttaataacatcattaggtctgtttatatgagtagtctaagtttggtgtttgtaatgcatgatgtgagttaagaattaatttagttatggattgaaatatatagtaacttatatactacatgtgcattctcctattatcgtaaataatatggttgttgtaccatatattatcagtgacgggcatgctcgtattttagtaaatcggtataaataattgctttgtctcaaaaaatatttgagaactgcaaaatttgaagcataagatatatatattatcagtgacgggcatgctcgtagttttagtaaaaaaaaaaaaaaaaaaaaaaaaaaaaaaaaaaaaaaaaaaaaaaaaaaaaaaaaaaaaa

SEQ ID NO: 28506 - DNA, 1709 bp, Glycine max
  unsure (1)..(1709): unsure at all n locations
  Clone ID: TF_GmC1584_1
atgaagatgtagaagtacaggaaccattggaagagagtgttgatgcgaatcaggaagtgggtgggtttgacttatctcctcggagggataaagcaattccaaagcggaattctcagcttaaacacaaacactctgcatttcgtgcatctcataggggaaggggagttgaaatatctagtccgaaggaagtgaaggcaaccaaatcatggagcaaacatgatcctgtgcctagtgctgaagttaaaaaagttcgggaatccctaaaatcaagttctttggagttacgagcgttggttaaggatcctcttccccatgcattgcatatatctgatgttgtaagatccaaattggcaactagtgatacaaaaactgagccactgattgaaaaccaacatgaagatgtagaagtacaggatccagatgtttgtcagagtattgtaccttttcagcctaatgatgtcaatcttgggaagaagtcttttgttcattgtagtaatattcatcagcccagcttgatggaacggaacagaagtgctcgtacctttgagtgggaggattcaatagacaactcacaacaagcaagacagccaaggaggaggaaaaggaaatggagttcgttggaagaagagacactaagggctggtgtaaaaatgtttggagaaggaaactgggcaacaatccgaagtttttacagtaacatatttgaaaatagaagtggagttgatctgaaggacaagtggagaaacatgatacggtgacactaacgcgctactttcatgtgtatatcttggtaatgacaattttgacagcagcttctctctatgcaatcaagctttgttaaaacaccatccaaatcgtacagttagtgaggaccaactggtatccaaggccctttcaaacacatcattcatccccgcgttttggtttcaatggctcagctgaaggttcccccattatggtatgctcggtacgaaaagaaatcatggcaatttcgaggtcttaattgtattagttaacattgaatttcgtatgatggtgttttttgtttcatctgtatattcaattattccttgatacggctacgagtatgatagctatgtaaatttttaatccaacgtatgcttttgtctagtaattaagtcgtagaatttttcaaaaagactgggcttcgctccgtgcctctctcagccccggttctgacttcagaggcggtggggggctcaaggtggcctggaggcgcttgacaccgtgacacttgtctgctccgctcgtgtgtttatcccggtcaggtaatgacaattttgagagcagcttctctctatgcaatcaagcttttttgaaacaccatccaaatagtacagttagtgaggaccaactggtatccaaggcccacgcatgggccttttcaaacacgtcattcatcactgggttctggtttcagtggctcagctgaaggttggatttgaaattgcaggttttgatgatgcatgcatatagcattaatatatctataagttttgtggttgttacctgtttcatgttttaaagtagcttgtaatcattaagtagagtaaggtttcttgtcatggtgtcaacaccttgtaatgaactcctgcttctctttcgcccaaggagattttaattttcttgctactaattttgaataaagaaatcgaaggatagaaacttcnnaaaaaaaaaaaaaaaaa

SEQ ID NO: 28507 - DNA, 531 bp, Glycine max
  Clone ID: TF_17022754
gaaaaaaaatgtaagaactaaccctaatttttcatccctaaccctaaatcctgaatctaaacagaaggtgatataagtaccggttgccgaggaggcggtggaggcggaggatgagatcttcctcgtcgggggcgatgtggccccgcttaacggaggggcggaggtagttcatccagcgaaggcggcagctcttgccgcagcggagaagtccggcgcgcttggggagcgttctccaccgtccttctccttctttcttgatgtaattcgctaatacctcgtcttcttctggcgtccatggacctcgcttcaacccaaccttgttacaacatggagagttgttgctaccaatgttgttgttactattgttcttcaccttggtcttggttgttgttgttgctgctgttgttgttgttgatgatggattcctcattttcttcttcttctgaaattagggcaattaatggaagtggaacgaagaatgaagagtatatagtgagtgagttttgggtttggaaaggaaatgataatgga

SEQ ID NO: 28508 - DNA, 1832 bp, Glycine max
  Clone ID: TF_GmC283_2
gaacacaaccacctctcacctcaaatgacttcccattctctcttttgaaatcactacacaacaccaagaaatccaaatctaattcctcatctcgtttgatatcctgattcctactctcttagtttccactctattgtatggatgcatgtgatgaactgatgatatatgcatttgcttttatagtttgcttggccaccaagtaacgacaaagagaaacagtttctaactttttcttggctggttgtaaataatctctcttttctctattggatcatagctttctgcaccctcttcctcttaggttcccatatttttctctcttgtcgtggacctcaactttgtaggctcgccttagaaaaaaccttcttttctttttggtgggggtgagagttgctatcttattcctggtttcatcaacaagacactaacatctttgttgtttttagtttcagaattccttatactcacacaccaaaattctggtacaccatgatttttccaagattttgtacgaatctaaaaggtatggcttttatagattctcaagtttatcttgatcacacaggtaaaagattctgaaaatctgtgcaccttgtgaatcaaagctctataatttcttcctttccgtgtatctcttctgtgttttttgtgagcagccttttctagttcctctccatttccatctctttaggaacttaattcaactaagattttttgtgtgcttgtggcttgaggtatggaattggaaaccctctacaccccttgttatatgccaaactcaaattggtttgtgcaagagagcctcagcacagagtggactagagaagataacaagaagtttgaaagtgcccttgctatatatgacaaggacaccccagatagatggttcaaggtggccgctatgatccctgggaagactgtgtttgatgtgatcaagcaatatagggaactggaagaagatgtgagtgaaatcgaagcagggcatgttccgattcccggctaccttgcatcttctttcacctttgagctggttgacaaccacaactatgatggatgcagaagaaggcttgcacctgtcagaggctctgatcaagagagaaagaaaggagtcccatggactgaagaggaacacagacgttttctgatgggacttttgaagtatggtaaaggagattggagaaatatctctcgcaattttgtggtcacaaagactccaacccaagttgctagccatgcacaaaagtactacataaggcaaaaggtttctggaggcaaagataaaaggagacctagcatccatgatataaccactgttaatcttacagaaacttctgcatcagacaagaacaagcctcctgtgattgcaccacagcagaagctgaatagcatgtcaaaagtacagctggactggactagtagccactacaatgatggatcactcatggttttcaacccaaatagtgatgacttgtttgtgtcatcttcatctgatgtcacttccatggccctgaaaatgcaagggcaagatctctatgaatgtgccttacgtgaggcttatgccaaggtaaaagttccaggtttcagcatggctcctagagacttcaataatgaagctgtttttggtattcatgcactgtaattccaaccctgatgatgttaaagaaaaaattatagatcattgttctgtaggattaatgtagatgacctgaagctagcaagctacttcgttcatcattagtgaacatcctaaaagaaaactagactaatgtttcaatccttaaaaactgaatttggaatggacttcttttaaagttttcctcttttatcttttt

SEQ ID NO: 28509 - DNA, 597 bp, Glycine max
  Clone ID: TF_GmC14594_1
aaaatatgatgcattttcaggttcccacatggaaacgaaggacgacagtgctgaaaaagaagaagcttggtcttctcatgaagacgaaattcttttgaactatgttcaagtccgtggagaaggaaattggagaaaccttcctaaaagagctggcttgaaacgatgtggtgagagttgcaaacaacgatggttgaactatcttaagccaaccatatctagaggaaacatttctttagatgaacatgaactcataatcagactgcataagctcttggggaatagatggtctatcattgctggacgattaccaggacgcaccgaagaagagatcaagaactactggaatacctatttgagaaaggaggcagaagagaaccaaaacaataagaacgaatttccaagcacaagtatgacaacaactagcatgtctagtgttcaatctccatggtacttccgaacattccgtaggtaccaatcccacggaatctccaaatcctgtgattagacctaaagttgtgaggttatctaagtttaatttgtcgtgccaagacaggtagcctatgaaatacacaatgaccgtgataattgtttttgcta

SEQ ID NO: 28510 - DNA, 377 bp, Glycine max
  unsure (1)..(377): unsure at all n locations
  Clone ID: TF_GmC941313_1
ccacgcgtccgggtggtcactaatagctgggagattgcctggacgtacagataatgaagtgaagaactattggaattctcatataagaagaaagcttattagcaaaggcattgacccaaataatcatagattgaaacatgcgatcccttcttcccttcagaattcactcatgtctgatgatagtgcagaagcctttaggatgaaagacactaataagaacgagacaagtaaattacctcgtgtctacaaccatgttgaagtttcagatgctgcaagtggtgaggctgagtcaccgtgtgcatggcccgatttaaaccttgatctctctattaccaatcctgcagcttcacagagtatgnnnggaaacaatgtaaaac

SEQ ID NO: 28511 - DNA, 464 bp, Glycine max
  Clone ID: TF_uC-gmrominsoy223d02b1
ttctttttgatcaacagggctgttaaggtgtggaaagagttgcagactccggtggataaattatctgagaccggacatcaaacggggcaactttaccagagaagaagaggacaccataatcagtttgcatgaaatgttgggaaacaggtaatcaaacattttccctagctagctagcataacatttcacattatttcgttaaagatagatgatttagtccaacttaatggaaataaattaatccttaatgaaagaggttaattgaaaagccaagactgcacaagggatagtctcaataatacatataaccatatgtagtactcaggctcgaacagtgaagcaaattaattaagattcccagatatcttcatttctatatgttgggtcctcttctattctgttccatgaaactgatggaggagatgcatgtgacttcataaacttcaactctcggtagtatatac

SEQ ID NO: 28512 - DNA, 1209 bp, Glycine max
  Clone ID: TF_GmC600_2
aaagaattaaagtagcaacaaatactcttccctacacttggcagaaaaaaaatggttcaacaagaaatccgaaggggtccctggacagaacaggaggactacaaattagtgtattttgttaacatgtttggagatcgtagatgggactttatagcaaaggtatcaggtttgaaggtggagggagactgtaaataggtttgaatagaacaggtaagagttgcaggttacggtgggttaattacctccaccccgatctcaaacgagggaagctcacaccccaagaagaacacctcgtcatggaccttcattccaaatggggaaatagatggtcaagaattgctcgcaggctaccagggcgaactgacaatgagattaagaattattggaggactcacatgaggaaaaagaaggctcaagagaaaaagcatgcatcagcagcatcgcctgtttcttctagttgtcaatcttcactgtcctcaaacaaccatgttgtggattcacatgcttccaaagaggttggagaagagagttgttatgacacaggtggatatgatgatggcatgatgatgggtttaattggtggtgaaaaggggtactccatggatgatatatggaaagatattatgtcagaagaagagaacaacatttataataataatcttcaacctgtctatgaagggcatagtgaagagggatgcaacttctcttgtccaccaccaccaatgattatgccttctccaccatcatgggatcagtacaacatttcttctcaacccttatgggtgatggatgaagaagaaagtaataagatgttattccctacactaagtgaccaatattttccttactatgaacaagggaacgcatttctaactggctaatcaggagattctttttttcttttgtccttaaaaaaattatcaatattttgttcttatgtgtgtgccatctgtcacaataagaaggcttaagtgttaacctgtacagcatagtatctttgagctttcggcatggtcctccatagtgtgacacagctgtaatcgatctcaaatgtaactgtagtctatgtcaaaatgtgtttgtggttttactttaaagaaacatccaatagggaaagtggttatgttctgaattatgtaaaatatacatcaagcacttatgcaaattcaagttttaatctaatttgaatggatgcctatcaattatagc

SEQ ID NO: 28513 - DNA, 1162 bp, Glycine max
  unsure (1)..(1162): unsure at all n locations
  Clone ID: TF_GmC600_3
ggttcagcaagatatccgaaggggtccctggacagaacaggaggactacaaattggtgtattttgttggcatgttcggagatcgtagatgggactttatagcaaaggtatcaggtttgaaggtggagggagactgtaaataaaataggtttgaatagaacaggtaagagttgcagattacggtgggttaattacctccaccccgatctcaaacgagggaagctcacaccccaagaacaacacctcgtcatggaccttcattccaaatggggaaatagatggtcaagaattgctcgcaagctaccagggcgcactgacaatgagattaagaattattggaggactcacatgagaaagaaaaaggctctggagaaaaagcatgcatcagcatcagcatcatcacctgtttcttctagttgtcaatcttcactatcttcaaacaaccatgttgtggattcacatgcttccaaagagagtttttatgacacaggtggatatgatgacatgatgatggggttaattggtggtgaaaaggggtactctatggatgatatatggaaagatattgttttgtcaggagaagagaacagcatttataacaacaataatctgcaacctgtgtatgaagaagggcatagtgaagagggattcaacttctcttgtcctccaccaatgatgattatgccttctccaccatcatgggatcagtacaacatttcttctcaacccctctgggtgatggatgaagaagaaagtaacaagatgttattccctacactaagtgaccaatatttttctcactatgaacaagggaacgaatttctgaccggctaattaggagattcttttttttctttctcttttcaattatcaatattttgttcttatgtgtgccatctgtcccaataagaaggcttaagtcttaacctgtactgcttattatctttgagctttcnccagggtgcttcttcatagtgtgacacagctgtaatcgatctcaaatgtcactgtagtctatgtcaatgtgtttgtggttttactttaaaaaaaaaaaaaaaaaaaaaaaaaaaaaaataaaaaaaaaaaaataaaaaaaaaaaaaaaaaaaaaaaaatttttaaaaaaaaaataaaaaaaaatataaacaaaatcaataaaaggcc

SEQ ID NO: 28514 - DNA, 1103 bp, Glycine max
  Clone ID: TF_GmC184_2
ggaagacaaagtttacctaattaagagccaaacttaaaaactttttgtatgtattgggaagttatggcaggaaacatggggtggagtgtgataatagaagaggagggatggaggaagggaccttggacttctgaggaggacagattgctcattcagtatgtcaagttccatggtgaaggcagatggaactctgttgctaggcttgcaggactgaaaagaaatgggaaaagctgcagattgagatgggtgaattacctgaggccagacctcaagaagggtcacataacaccacaagaagaaagcataattcaagagctgcatgctaggtggggaaacaggtggtcaacaattgcaagaagcttgccaggaagaactgataatgagataaagaactattggaggactcacttcaagaaaaagactaaaaccccctctgatgctgctgagaaggcgagaatccgttcctcgaggaggcaacaatttcaacagcaacagcagcagttgaagcagcagcaggttcagcagcagcaacaacaacaacaacaattccaattcaacttggacatgaaagggatcataaacttgcttgaggaaaataaccatagagtgccttctatatctcaagaggcacaagaaatggccagcatgtaccctaacacttcagaacatcaggactacttctactctatgttcaatgtcaatgacaataatgtctctgcacctgagtgcttaaacgaagaaattttgtgggatggactgtggaacttggacgatgttctttgcaatttcaatgcagctagtgccacaagcaaagctagtttacataatttagttgctcctttctgttaaaggttttatttagccttcaaaattgttaggaagaatattagtactaatgtgagtcacggcttgataaagctccaaaatcttggagcttagagaaaaaaaatatcattaaatgttccttgttagtttttgttagtgagaaatttaaactcacaacctctccgctcctccttgaagcttagagttagggtagtgaatgatattctgaaggcgtgttattgtgtaacccattaataaagtgtctcgattttgcttat

SEQ ID NO: 28515 - DNA, 1766 bp, Glycine max
  unsure (1)..(1766): unsure at all n locations
  Clone ID: TF_GmC1182_1
tccgagtgcactgtattccagttcacgtgtcttctggttgctttctcgcacttccaccatacgtaattcaggtttcgaaggcgtgctcgtaataagtctccagtgctatattcatggccaccgccgaatccgggccccgtgctaaaatcatggccaccacagccaccgaacctctcccttcctccgctgaaatgcctcctgccccgcctcctccgaagcaaccgccgcaaccggtggcggcggcgtcagcagtgaagcctgaggctccattgtccgattcgaaagcttcggcggaggcgaacgtaatagtggtcccgagctactctcgttggttctcgtgggattcgattgacgaatgcgaggtgcgtcacctccccgagttcttcgaatcggcgtcgaagagccctagggtttacaagtactacaggaactcgatcgtgaagtacttcaggtacaatcccacccgaaaaatcaccttcaccgatgtccgcaaaacgctcgtgggagacgtcggttccatccgaagagtcttcgatttcctcgaaacttgggggcttatcaattaccatccctcttcgtcgctcaccaaacccttgaagtgggacgacaaagagaccaaatccgattctgcctccaacaccaccgaatcttcttccgctcccgccaaagaaaacactaagagactctgcagtggctgcaaagtcgtttgcaccatagcttgttttgcctgtgacaagtatgatttgactctttgtgcgaggtgttatgttcgtggcaattatcgagttggtgtgaactcttcggattttaggcgagtggagataagtgaggagacaaagacggattggaacgaaaaggagaccacgaatcttctggaagctattacgcattacagtgatgattggaagagggtttctcagcatgttcctggcagaactgagaaggagtgtgttgctcattttctgaagcttccttttgtggatcaattccagcattatcaacaacaccctgctgtcaatggcactgatgacagttgtaatccgttaaagagggtaactaatgctgatgcagaatctgaattggatactgttgcctctgctgaacccaataagagaatgcgtctcacgcctcttgcagatgcaagcaatccgattatggctcaggctgctttcctgtctgctttggctgggtcagaggttgcacaagctgctgctcaagctgcattgacaactctgtctgaggtttacaaagcaactaaaataaattatcggtcgtttccgaggaatacattgctgcaagatgctggtatcatgtctaacggtggtaatacttcagattcatttcaaggatctcgattgcatgcaaacatacagcttgagaaggaagagttagatgtggaaaaagcaatttctgagattatagaagttcagatgaaaaatatccaagataagcttgttcagtttgaagatttggacctgctgatggaaaaagaaggccaacagctggagcaaatgaaaaatatgtttttccttgatcagcttactcttttatttcataaatcatctgcaccaaaaactggagaatgccaagaaggcaataatgtaaagacgaaccatggctattgatcttaggcttagcgaatgtattcaattttccttttcaattatcctgctctctccatttgctttggcctcgagtcactggactatttcttcaatatcatacaactctatcttgatgtttataaccaannnnnncatgcatta

SEQ ID NO: 28516 - DNA, 1276 bp, Glycine max
  Clone ID: TF_GmC1004_1
caaccctgcttcccataaaagtttgtgcaatctttcaagtaaaataaaatccacaaacatacacaccaaaccaaaccaatcctcaattggctgaaaaccttgttctacatgctctcatagttcgtgtgttgaattgtgttgtgaatttggtgtgatgaagtgggaaatggagatcctccctcctgcatcaccttacatgtacaattccaattggcttcttgatgataacaggaccaacaacaccaaatggacccctgcagagaataagctgtttgagaatgctcttgccgtgtatgatagggacactcccgatcggtggcacaaggtggccgagatgataccaggaaagacggttatggatgtagtgaagcagtacaaggaattggaagcagatgtttgtgacatagaagcagggttgatcccaattccggggtacagtagtggtaccaccacaacctcacccttcaccttggattgggtgaacactagtcctgcttatgatgatggcttcaaaggaatcactgctaagagatcctcctctggaagaccccttgagcaggaaaggaagaaaggtgtgccatggactgaagaggaacataagttgtttctactggggctgaagaagtatggcaaaggtgattggagaaacatatcgcgaaattatgtgatcactaggacgccaactcaagttgctagccatgctcagaagtacttcatcaggcaactatcaggaggcaaggacaagaggagggctagcatccatgacataacaacggttaatctcacagaaaccaccagaacttcttctgatgaaagcaagagatctgcttcgccacaaaattccgcaatgctctcacgccaccagcagctgaattctaatgctgcctcatccggattgaatttccagtggagcgatcagccaaatgcaggggtagctatggcactcaaccctgcacatgaacaagtcttcatgtccccttatggccttaactcatacgggtttaagatgcagggccaaaatctgcacagaagttctcttcatgagtcttcttacttaggacctcagacaccaaacatggttttccaaatgcagccctcccaacactattcccatgcatgaggtggtggtggttgttgttttgaattattattactattattattattattattatttatggctagaaccagtgtcttttgctcagttcactagtacagtgtctgtgctttttaccatgttttatgtgaatatctttcattacactgttgaaacaaa

SEQ ID NO: 28517 - DNA, 1255 bp, Glycine max
  Clone ID: TF_GmC143_1
tcccggggtcgacccacgcgtccggttggcgtttccgtttcaagtgtttgcgagagaatggagttcctggacgaggacgcaaggccaaggttcgtgttccagtccggtgcagctgcgaggagcagcgagccaccgcacccgatccacaaacctaccaagccattcctcttcgccaccgtttccctctcctcactcttcctcactctctccctcttcttcctcgaagcggagcccttcaaatcgctcctcttctggctcgcactctctctcctcgttggccccttcgcccctccctccatcactggcggcgacgtccgcgtcggccgcggcgaggtcgtcaacttccccgatccggagcccgagcccgacgaggacgccagtaggaagtcctcacaacggcgatccagacagcggagggccgaggaagcctccgccgccgtaggcccggtggtttccgtcagcgcggcggagaagagaaaagaatcttctggaatcgagaagcgtgcgacggtggtggaggaggagaaggggtggagcgaggaggatgtggaggtgctgaagaagcagatggtgaagaatccggtggggaagccagggaggtgggaggcgatagcggcggcgttcggggggaggcacggagtggacagtgtgataaagaaagcgaaggaattgggggagaagagagtggatgattcggagtcgtatgcgttgtttttgaagaagaggaaagcgttggataagagggttgtggaggagaatgcggatgagggtgagaaagttgttgataatggttggagttctgctgaggatatcgcgttgctgaatgctttgaaagcgtttcctaaggaagtttccatgaggtgggaaaaggttgctgctgcggttcccgggagatccaaggctgcttgcatgaaaagattcgccgaattgaagaaagggtttcggactgcaaaagctgcagccgagtgagcactgaacactctcaaagggatcatttttttgtttgattttgatatgttaaggtaaatggattcgtcgacttgtaacttaaacataattttttgtttctagctattttgagttatgatttatgttggcctccttctaggtgacactcaaattgtggttgtgtaactttataaaatgcaatgaaccgatcgagattgtgtattcgggatctcttatagtgcgaataaatatttaatatttcgacttgaaaaaaaaagaaaaaaacaagggcggcagctctagagga

SEQ ID NO: 28518 - DNA, 1756 bp, Glycine max
  Clone ID: TF_GmC1274_1
gccaagctcgcgtctcacttctctctcttatattaatcactcccgcacacagagcataattcacctttcttttccgaccaaaggttcgccagaaaatgctgatattcttaaaaagcaagagtatcatccccggttctagtccatacgtcacaatcacacatccttaccggaattcccgggcagcgtctctctgtctcaactttccttcattttctctcttcctctcaccgagtcacgcactcggctcgactcgtacgaactccgatccccccccgagtcacactcaaccagcaccaccgcccgatccgacgatgtctcgcgcctcctccgccgcagattccgccgcctccggtgagatcatactgttcggggtcagagtcgtcgtcgattccatgaggaagagcgtcagcatgagcaacctctcacagtacgagcatcctcaagacgccaccaacaacaaagacgccctcgccgccggctacgcctccgccgacgacgccgctcctcagaactccggccgcctccgggagcgcgagcgaaagcgaggagttccgtggacggaggaagaacacaagctgtttttggttggattgcagaaggtagggaaaggtgattggagaggaatctccaaaaactacgtcaaaacgcgaacgccaacgcaggttgcgagccatgctcagaagtactttctccgacgaagcaacctcaatcgccgtcgccgtagatccagcctctttgacatcaccaccgacacggtctctgcaattccgatggagggagaacaggtccagaatcaagacacgctgtgtcattcacaacaacaatcacccgtgttccctgctgaaactagcaaaatcaatgggtttccagcgatgccagtgtatcagtttggggttggttcttctggagtgatttcagtccaaggtgcactggaaacccaatggaagaactcactctgggacaaggaaacgtggaaaaacacaatgtgccaaacaaggcctctacagtgtctggtatcatcacccccggttcttctagttctgccattgacccaccaccgacactgtccctggggctatccttctcatctgaccaaagacagacatcatcaagacattcagctttacatgccatgcaatgtttcagcaatggagatagcatcattagtgttgcttgagaatatggtccttggattcacagattaattacatatattaatatttctctagtttcctgtctttttggtgggagaaagagaaagaggttgaaggaaagggcgatggattagagaaggcaagaagaagttttaacagactgaatttgatccttctgttccttgtacagaccccagaaaaggtcctgtcctgtttcttcttgtttgcttatgttaattaatgtcatgactttagattcttgtttatttggccgtttacgtttgtagtagttgatgtaactgaaaataacaaagtactctctgtttttatgctgataatgtattaacgttcgatatgaactttcactgatgaaaaaaaaaagtggctcctttggggggatattatcaagttggtagtctgtttcattcatgttaggtgttagtagttggccacgtttttcttttctcataaatttgcgtatttactaaaagggaaaaaaaaaaaaaaaggcggccctggtagctgcagtagtatcataattgttttcgagcaaatgtaaatgttggtcgattcacatgtgaagttataaatttgtttaaaaa

SEQ ID NO: 28519 - DNA, 994 bp, Glycine max
  Clone ID: TF_GmC344_2
gcgggcgtgggaggcactcggtcctccggattttaagggccgccgggggcgcaccggacaccacgcgacgtgcggtgctcttccagccgctggaccctacctccggctgagccgtttccatgggaggcagacagatgttattagagcaagcaaaagttttgagagatgcactgagttctaagaaagaagaggcggttgatgagaaaactaatcaacaaaatgccaatggttccatcaaggctaatggcagtccttcactaagcaacattgagaagaaggagaaaccctggagtaaagaagagattgatctattgaggaaaggaatgcagaaatatcccaaaggaacctcacggagatgggaggttatttcagaatacattggtactggaagatctgttgaagaaattatgaaggcaactaaaactgtactccttcagaaacctgattcgtcaaaagcttttgacacatttcttgagaaaaggaaacctggtgcacaatcaattgagtctccattgacaaccagagaagaattaggagtgccagctcctgcctcctctacaaataatgcagaagactctcagaacaaaggtactgatgatcagaactcccctgctaatggagtttcttccagttcagaacaggatgtgtggtctgcggtgcaggaacgagcactagttcaagctttaaaagcctttccaaaggaaacaagccagagatgggagcgtgttgcaacagctgtacctgggaagactgtgaatcagtgtaagaaaaaatttgcattgatgaaggagagtttcaggaacaagaaaactgcagtctaatgttctgttgtgatattttagattatattaaatttttctcatgagtgtataggctagtttcgaatatccatatactagtttatgagccaaaatttctagttttcttatcgtattgattgcttttgataccgtactttgaacttggaattaatacatttacttttattgcttgt

SEQ ID NO: 28520 - DNA, 1646 bp, Glycine max
  Clone ID: TF_GmC1167_1
cggctcgaggaaggatggtaaaactgattagtttccttccatcaaggtcatggagtatataaagcactcacatgcattggtactattggcaatacaagctcatctcttgggaagaaattagtttaagcctttgctagaaatagcaaagtgagttagagggatggtcggtggacacaagaagaagaaaagatgcagtgagtttgcgtccaagaacaaagaccacaaaatggggaatcattgccgatgtatcctggtttgtcaaagtacaggtcaaggtacagccttggatggacaaattacctcatgtcaggaaccaagacatggaacatcaaattccaggacagtggatactaataccgggttatcaaggtgcagcaaaagttgcaggcttagatggacaaattacctaaggccaggaatcaagagagggaacttcaccccccatgaggaagggatgataattcatttgcaagctctactgggtaacaaatgggcagccatagcttcctatcttccacaaagaacagacaatgacataaagaattattggaacacacatctaaagaagaagctgaagaaatttcaagcagctttggatcctcactcagcatcagactcaacagccagtggtcaatttctaccaaagagctttagtgacagaagaagtactttagacatcagcagcaacaacaacaataatcatggctcgtccattaggcttagtcatcatcaatctcagtcctcttccacaacaacatatgcctcaagcactgagaatatctcaagactcttggaaggttggatgagatcttccccaaagcaactcaacaagggatcatcatcccaagatgatgaagatattcagctccaaggcatcaatgatgatgataaaaataacaacaactttgaaagcactactaagctagtgaaccttcatcatcttcagcacaaagtaagaaacaaagatgagcatcaagagggtggtggtggtggcgtagataacatggtttctcatgaagagtttgattctattttgtcttttgagaaccaaaacaatgctgcttgggacaagtccacttgtgattccatgccagaaaagagttctgaagcttctgctgctgctgatcatcatcatcatcatcatcatgatatagctgctgctcatgagaggaacaatgtcaggcaaaaatctgagaatagtagtggtgctcctccattgtcatttcttgagaagtggctcttggatgaaaacgttggtcatcaagtggaggagatgatggagttgtctccgatgttctaaattaacatggaattgggtcaccaatttaatccctttaagtttgggatgtgacattcaaatgatcatatgatattagtcagatgaaagaagagatcaaaggaatgaaattcttttgaaatctgactagggtttaatccattacaatggtggagagattcacagaagctataagggatctctttcaacttgtaacttggaagtctatgaagaatggtttaattatttcaagtaatactatatgcttagtgcatgttgctctctttgtcttgtagaaaaattacaaattaatgttaacttcagctcaaataataatactacaataacagttatattttcaagaattgtc

SEQ ID NO: 28521 - DNA, 421 bp, Glycine max
  Clone ID: TF_jC-gmXLIB3563P045ah05a2
ctggaatgacgtgcatgcacagctcacaacacacaaacacaaacctttcgttgctgtgctcgtacccttcatccattcgatcaaacacaaaatagtactttcttattatgatggccgcggctcgaaaagaactggaccggatcaaagtcccgtggaacacggatgaagacgaggatcttcataaactcgaggagcggcatgggcccaaaaactggtccctcataatcatgtccattccatggcggtctgggaaatcgtgcaggctacactggtgcaaccagctgtatggacaggtagagcacagggccttcacaccgtgagaggacaagaccatcattaaggcgcatgctaagttcgtgttcaactgagccaccataacccgcctcctctaagacgcgcaccgataacgccatcaagaatg

SEQ ID NO: 28522 - DNA, 618 bp, Glycine max
  Clone ID: TF_uC-gmroLIB3258P126b12b1
caaaactcaaaactcaggcacaaatttttgcagctcttctaggagacacacaccaaacttgaagttcatccttgatcttgcttagtggaggctagaggcaccatagaagtttcacctcttgattgattgctctctatctcacgtgctacatcgaaagcatgcaagttggctaactcttggaaaggaaaggagcttcaagaagagagagataaaataaatggtgcaagatatgaagcagcaagacaatggagaatctaagaagaaggagcgtcacattgtgacttggactcaagaggaggatgatatactaagagaacagattggtattcatggaactgaaaattgggcaattattgcatcaaagttcaaagataaaacgacaagacagtgcagaagaagatggtacacttacttgaattctgatttcaagaaaggtggatggtcagctgaggaagacatgctcttatgtgaggctcaaaaggtatttggtaatagatggacagaaatagcaaaggtggtctcaggcagaacggataatgctgtgaaaaatcgtttctccacactctgcaggaagaaacagaaatatgcagctttagcaaaagagaacagcactttata

SEQ ID NO: 28523 - DNA, 1939 bp, Glycine max
  Clone ID: TF_GmC1812_1
cggctgcgagaagacgacagaagggggtggcaatgactatggaaggtgaatggaaggtgtcgtatggaatttagagcatgattttagagaagtattaaagtgtatagtattcactttgacttgatctcactccccaaaatgggatacagacatagtaatagtatattatacactatgcatcttgcgtaggccaatttgctttgtaactttagtttctcccttgaccccatttaagtcctgcatatatatgcgtagttttttttatagttttagtgagtgagaatagccatgtctacttcaaagagcgtcagcagttctagtgaagatgacaatgaacttagaagagggccttggactctggaagaggataacttgctctcccaatatatttttaatcatggggaagggcgatggaatttgctggctaaacgttcaggattaaagagaactgggaaaagttgcagattaaggtggctaaattatctaaagccagatgtaaaacggggaaatttaaccccacaagagcaacttataattcttgaactccactcaaagtggggaaacaggtggtcaaaaattgcacaacatttgccaggcagaacagacaatgaaatcaagaactattggagaactaggattcagaaacaagcaagacatttgaaaatttacactgacagcagagagtttcaagaacttgttaggcgtttctggatgcctagattgcttcagaaagcaaaagaatcatcttcttcaaacatgtcaattcaaaaccaggcaattcctatgccttttgattatgtttctcagcatttaactgttgggaccataccaccttggcagggaccttgtatgaatgaagctggtcccacttacatggaccaacatgagcagaactcagactctgaacacaacaatggttcatgcatctccttgtctgagtcagcaaattttccaaaagtgcctcagcattttggacgcaccaccatcacccaatatcatgccttgaataacaatgactttggcaccttcacatatgacggctacaatgtaagcaacaatgtctatgagatggacaacttcaaaacgcctactacaagggtggctgaggatgcgcaatacccaactggtgattgtcaaatggtaggaagcaattgggtaaacagcgattttgcatgtaacatgtggaacatggatgaattgtggcaatttagcaagttacaaaaataagattttagggtttggtttttttggagttaccaagactctatctttggtgatgttattattgttatcatgaactgttgattagctactaccaaattaattaatacagatggtgattgttttctgtacatctgttttgcattacactgttcagataagtacttttgcaatttgtattgattgagaaaagtcattaattagtctggtaggaagcaattgggtaaacagcgattttgcatgtaacatgtggaacatggatgaattgtggcaatttagcaagaaactttggtgcatttgtaggggaaatcggaatgccgaatgcagccactatgatatctaaatgaagagggcccgtgattgaatgaggatgcaattgaagccaataaagatagttcgtttttcagtgattgttttctgtacatctgttttgcattactctgttttgcaatttgtattgattgagaaaagtcattaattagtcactagttcataacacaaacagttggagattgagtgctaataaagatttcgtaaatatatagaagtaaccacttttggaaactttggtgtatttgtagtggaaatcgaattgcagccactatgatatataaatgaagagggcccatgatccaatgaggatttaattggagatgaaagtagaaagctgcaaaatgactcatagcgtgtttgcttatccattcacgacgtagatttc

SEQ ID NO: 28524 - DNA, 690 bp, Glycine max
  Clone ID: TF_uC-gmflLIB3275003f07a1
cccacgcgttcggaagaactatattgagaaggctaggagcatttctggtgtctccgttgatccaaagcttgccaaattacaagaaaaggatatcatagagatgatattctttcctgtggtgaatgaggcttgtcgggtccttgatgaaggtatcgcagtcaaagcagcagatcttgatatttctgctatcatgggccatggactgcagaggaggataagaaactcatcaatttcatcctcactaatggtcaatgttgctggagagctctccctaaactagcagggctgttaagatgtggaaaaagttgcaggctcaggtggacaaattacctgaggccagacctgaagagaggccttctatcagaatatgaagagaaaatggtcattgatcttcatgctcaacttggcaatagatggtctaagattgcttctcatctcccaggaagaaccgataatgagatcaagaatcactggaatacccacataaagaaaaagctcaagaaaatgggaattgatcctgttactcacaagccactttccaataaaactgaggaaactcaagcccaaccagatgaacaaacccatcaaccattgcaagaacaacaacaacaacaacatcaacatcaacaacaacctatcccagttgagaaagacctcaaatttgaacctgaaaaggagcaaaacagggag

SEQ ID NO: 28525 - DNA, 2362 bp, Glycine max
  Clone ID: TF_GmC344_4
tacggctgcgagaagacgacagaagggggtgtattaggtttttttgcttcttctcatttgctaatagagagggacatgaagaagtaagatagggcatggggtgttggtggcacatataaaacggccaaaagcaatgcttaatttctcttatgctcttcagagtcggcttcattctgtgattcctccctccttttctcttcgcttggttcaagttgttacagtgttaaatttgaggggagtcatatttcttggttctgaaggccaccgttatggctgtacatacagaattccctcttattacttactcacaagagattgtagatggacagcctatttttgtctcttcaaactgtcttcctatcaaggctttgaaatttgaacctgcaggtcattctttccattctgctgcacttaaacttcttggtgttcaggaagataacaatgatgctgatgataaaaaagtggttgatgataaggaacaaacatatctcccatctgattcttatagcagcaagagcaaaaagaaaactggcactggagacatgcaacaagatcactatgcattattgggtctgggtcatctaaggtatcttgctacggaggatcaaattcgtaaaagctatcgtgaaactgccttgaggtttcatcctgacaaacaggctgctcttcttcttgctgaggaaactgaagctgcaaaacaagcaaaaaaggatgaaatagaaagtcactttaaggcaatccaagaagcatatgaagtgttgattgatcctgtgaagagaagaatctatgattccacagatgagtttgatgatgagattcccactgattgtgctccacaagacttcttcaaggtgtttggtcctgcttttatgaggaatgggcggtggtcagttaatcaaccaattccatcactaggtgatgataatactccgttaaaagaagttgataatttctacaatttttggtactcctttaaaagttggagggagtttcctcatgctgatgagtttgatcttgagcaagctgaatctcgagaccacaagagatggatggaaaggcagaatgcaaaattgacagaaaaagctaggaaggaagactatgcacggatacgcactcttgttgataatgcttataagagagatcccagaagattgagaagaaaggaagaagaaaaagctgagaaacaaaggaaaaaggaggctaagttcctagcaaagaaggtgcaggaagaagaagcagccagaattgcagaagaggagaggcaacgaaaagaggaggaagagagacaagctgcaaaagctgctttacaacagaagaaggtgaaagagaaagagaaaaaactcttgcggaaggagcgagcacgtcttcggactctttcaggacctattttatcacagcatttacttgatatttctgatgatgatgtagaaaggctttgcatgtcacttgatattgagcagctgaggagtctctgtgagaacatggaaggcagacagatgttattagaacaagcaaaagttttgagatatgcactgagttctaagaaagaagaggtggttgatgagaaaactaatcaacaaaatgccaatggttccatcaaggctaatgggatttcttccctaagcaacattgagaagaaggagaaaccatggagtaaagaagagattgatctattgaggaaaggaatgcagaaatatcccaaaggaacctcgcggagatgggaggttatttcagaatacattggtactggaagatctgttgaagaaatcatgaaggcaactaaaactgtactccttcagaaacctgattcgtcaaaagcttttgacacatttcttgagaaaaggaaacctggtgcacaatcaattgagtctccattgacaaccagagaagaattaggagtgccagctcctgcctcaacaaataacgtagaagactctcagaataaaagtacagataatcagaactcccctgctaatggagtttcttccagttcagaacaggatgtgtggtctgcagtgcaggaacgagcgctggttcaagctttaaaagtctttccaaaggaaacaagccagagatgggagcgtgttgcaactgctgtacctgggaagactgtgaatcagtgtaagaaaaaatttgcattgatgaaggagagtttcaggaacaagaaaagtgcagtctaatgttctgttgtgatattttagatttcactactaattttttcttaagagtataggctagagtcgaatatccatacatttctagttttcttatcgcattgattgcttttgataccgtactttgaacttggaattaatacatttacttttattgcttgaaatagcaaatatcattattattgatt

SEQ ID NO: 28526 - DNA, 1227 bp, Glycine max
  Clone ID: TF_GmC503_1
aattcggctcgagctgatttgaagagaggaatgttctctcaacaagaggaggatcttataattagtcttcatgaagttctaggaaataggtgggctcaaattgcagctcaattaccagggagaacagataatgagattaagaacttttggaattcatgtttgaagaagaagctaatgaagcaagggattgaccctgcaacacacaagcctctcctcagtgctcaagaacacataattataaaggaagagaaggaaaccattttggagacaccaccacctatgttattaccaatgtctcaagggattttagcttcctcacaagagtcaccacttgtagtgaacaattcaagttactgtgatggtggattaaatgtaacagaagctgcttcaagggaagttttcatgagcaagaatgctgctttagaccctttgtcctactttgaattccaaatgggttacaacccaataagacaatttgatcagaaccatgtggggaccaactcaagctatggattctcctcattgccgtgtctgaatagttcttctgatcacgggaacgtgtcggtggcggcggagttttcagataacaactcagcttcaaaaatcagttctttgatgaaggaaagttccagcaatagctcaagtatgagtgtttatccagctgggggagggtgtcaaatgatggaaaatgcagggttctcatgggatggtgagaacaataatactaagatcgatcctttgttacagttccatgtcaatgtgctaaaatctgaagagttcaagacaagttcgtggcaagaagagcagattctgactcagaatttgatagatttcactaactatccgttaatgtcactgtctgaggatctaaccggagcaaattttgatgtgttccagcagatgtgagctgtaaaaaattctcattttcttcttcttattattctgagttgaattttttgaactcttttctttctttctcttgttgaaagttgaaacgaccaagatagaaaacaataggaagatgttgataacaggaaaaattgtagcaaaagatttgagaattgatgagatgatgatctccccccactcccctccggatatctttgtttttcctgttgatgtatctgttttcatcagcagaagtttggatgacgattattgctgattaatgagtgaagctaaattttttttgtgatcctgcacaaaaaaaaaataaaaaaaataaac

SEQ ID NO: 28527 - DNA, 400 bp, Glycine max
  Clone ID: TF_uC-gmrominsoy034e07b1
tcgattacgagtgggatcacgcttaaccgcactgcgtgcgctcactcggtcctccacgcatgcgtcaaaccacgccgagcactgagttaccttccacagcaactacgacatcatgaacctccacaagatgaagacattcgcgaactatgaagaatactcagttgaaaggtgattagacactcatcaacaaatataggacgaaagcgtagagaatggagaacttgaggatgcaccgaagctcacattacagacgactgatcaagaattggtgaatgattactggtgtaagaagtgcgctgtgcaaccaagctgggttccgataatcaactacgtcgatgtcaacaagaaagatccatggaagcgttcataaatgggttaatacagaaagatagaatggtac

SEQ ID NO: 28528 - DNA, 698 bp, Glycine max
  Clone ID: TF_GmC642_10
ccacgcgtccggtcattcttatgaattgttgatgacttcatagcttatgccaactgatatggttcctctaccgctaacatttttagacctttttgtagtttcttctagtatataagtttttgtttcctacaaacaaaaacttatattaactataagtaaatatgtatttaaaggtcttcatttatttttagtttgttagtcatagactggcaatatagagtatatttgctaattttctctacaggagctggcttattgacattggaggatttgcaaagaaagtgaaaagcactactctatcttcagctgatcaaatcaaagattgtggggcatatcgtgaatgtccaaactgttcttatcatattgataacagtgatgtttctactgagtggcctggctttcctcttggtgtaaagtttgatccttctgatgtagaactcttagaacatttagcagcaaaatgtggcattggaaacactcagcaacacatgtttatcaatgagttcatcccaacactggaaggagaccaaggaatttgctacacacatccggaaaatcttccaggtgctaagaaagatgggagttatgtccatttctttcacagaacaaccaatgcatatgctactggtcaacgaaagcgtcgaaagattcatcatcaacagggttttgactgaagagcatgtgcgctggcataagac

SEQ ID NO: 28529 - DNA, 544 bp, Glycine max
  Clone ID: TF_uC-gmroLIB3259P159h08a1
cagaaaataatattcaaataattacgaggacataattttttcgtttcacactgcagggcaaaaaaaactcaacatcaggactgtagtaaagacaagagtacttgtgctttagaggcttcttgatcatatctcataaattgaggaaaataaacaaagcatgcactgttctacacttctactcctaaatcctaatctaacttgctagaggagatttcactacagccttcacttagacatgcggaacaaggtgtgcgtcatgattaaaatccactagctttaacatcaacaagtctctgaagtttgctgctactagagggcttcttcccatgtgatcttcttgtcttcatcttgtttttctgaaatatgcgatacacagcaaaatctgccactggcatctgacatgggtaggaagctacaaggcgcaattcgtgcatgacccactggagtctttgctcatggggccctttgcaaaaaaacagtgtttccttcatcccaattacttgaatgctctctgaatggatgatttggttttctttggctacag

SEQ ID NO: 28530 - DNA, 271 bp, Glycine max
  unsure (1)..(271): unsure at all n locations
  Clone ID: TF_LIB3242-770-P1-J1-D1
tcggaattcngctctagcggctcgagctcttctaaaacttaccaacacaacaaaatcgagtttccaataaagagttttgttgaaatggaaaacgttcctgctgtntntaaggagagagtatcanattgatttgcctgccnnatttctattccacccnacttatgaagagctcataatccattacctctacaagaaggtcatttacaccaanttcttctccaaggcttatttataagttaccttatcatttcctatctctttgattttctca

SEQ ID NO: 28531 - DNA, 418 bp, Glycine max
  unsure (1)..(418): unsure at all n locations
  Clone ID: TF_uC-gmropic072f11b1
ttgcgaccgnttagtgtcggcccaaacaaagagccaggtttagggaacgtcaccggggaagccctcacngaccgcataaatcaacggaagcatacaccgcagtagacgctccttttgctgcatggtctgcaacacggggcgcgaaactatgtgactatcaaccacagcaacaaccactgtgaacacaacagcgaacccagcgccggcaccgcctacagcactagctacatgttttgcgccacgctcaagggtccacgaaactgatgaggagctcgttaagcactacgttaagcgcaagggctgtggaaaaagcgccctatctgatgccgtctcagacggggacatacacaggagcgaaccctgcgagctaagggacaagactagggagcagaagagggaccaggaaagggcattgttc

SEQ ID NO: 28532 - DNA, 384 bp, Glycine max
  unsure (1)..(384): unsure at all n locations
  Clone ID: TF_LIB3092-021-Q1-K1-B7
gaaaaaccggccgaccgacgcgtacggacacgcntacaattttcatcatcttcttcttttttgacatcaatcatcaccacttccgccgctttttttgacaagatcgaattgccttttacaaaaattgaacctccaaagaaagaccctctttcccaactgactctacctccttgttaacccttttaccccaccgacaacgaacttctcgttcaacatctgtgccccaaagtcgctagccaccatttctctcttacaatcattacccaaattgacttgtacaaattcaacccaccaaatcttacaattaaaaccaatttcaatgaaaaaaaatagtacttttttagccccaaacacatgaaattccccaaccgtttttcacccaac

SEQ ID NO: 28533 - DNA, 153 bp, Glycine max
  Clone ID: TF_jC-gmXLIB3563P084ad08a1
tttgtctgatccgtggggattggccaccgtaattgcgatctacaagacaggcactttttcatcccgaaggaagcaaaatatcgaaatggtaatcgcatgaaccgaacacagagtgtggatattgaaaggcaacaggctcagacaaaaaaatat

SEQ ID NO: 28534 - DNA, 265 bp, Glycine max
  Clone ID: TF_uC-gmrominsoy306c04b1
tctttttgcaacttttttctacaagctagtgcagccagttgagtttctggattaacaaggatggccactaccacaacaggaagctgatcctgtgggtggaaatcacgtgcagcctatgaaaaacttgttgtctgctgggtttgtttaaaaggctcttatgagcacatagaggttaacataatcaacgacatggatttgtacaacgctcgaaccttgggaccttccaggaatggttttgtacggagagaaagagtggttttttttt

SEQ ID NO: 28535 - DNA, 238 bp, Glycine max
  Clone ID: TF_700874479H1
agaaaagaaaaaatttgtcttataactttgcaacttatggttcacttcttcttcttcgacttctgcattatcgtggtgctttgatattattctattgagtcaaaaaatgggagttccatagagggaccctctcgcactattgagcttgcctcctgggcttagggtctaccccacagatgaggagcttctggtgcagtaccgtttctgtatagtatcttgccatcattgctctcttcca

SEQ ID NO: 28536 - DNA, 280 bp, Glycine max
  Clone ID: TF_9901760
ggagaaggggagccttgtgtctaatggagaactttgatggcctgcggggtttatgtcccacccgactgataatgagctggtatggcagttcttgaggcgcaaagtcgtctgctgtcctttgacaatctttatcattcctgaggttgatgtatgtaagtttgatccttgggatatatcaggcgatattgagtccgaataattctcgatttgcaccgaagatgccggatatattatcggaaatcgttctaacatagctccatattattggcagacgattgcg

SEQ ID NO: 28537 - DNA, 641 bp, Glycine max
  Clone ID: TF_uC-gmroLIB3259P208f01a1
gaataataaacagttgcttcttattagaaaatttatgagcccatacacaaaacaaacttccatatacacagatcatgactagaaggatatataaagatttttttttactgcctacggggcttcacaattaatttcttacactattgaaggttttgagcaacttgtaatctaactaattaggaagcttcactggtagcaggagagggaggaccagtcacagtgccattctccattgtgaaatcaatgacaatgggtgtctcatccatagcttcttcctcactgctgctgctgctagaggtctccccttcagacctttttgccttctttccctttcttcctttttcgtcttgaatatgcgatacacagccatagctgacaccatggaaggatgcgatttcgagacgagacgaaattcatgcatcacccaattcgatttggcaaaaccattgcccttggcttcccagaaagccaaaacgttctttcttgcaacaacctgttctttagagagctcaaaatcttgagctttctctattgctctccattgaccgatcccggcttctctcttgttgaggttttcgaacacacgggtcctcaaatcatggaagaaaaacctctgccaattcaaattcttactaccacct

SEQ ID NO: 28538 - DNA, 2842 bp, Glycine max
  unsure (1)..(2842): unsure at all n locations
  Clone ID: TF_GmC207_1
ccacgcgtccgtatttcctctctctctctctctctctctctctgaacaagagccagcagccgttagggaaatcaagcacagctcaatcattgaatcttagcataaacacatacagaagaaggaaaagtggcaccctgggaggagctgatattgtaggagggtttggaagaaaaagaattttgttttgagatatatatacatatatgtgcaagtgcataggaaattaacacaaaaagatgacatggtgcaatgactctgatgaggatagggttattgaatcaacgacgccaacaataactattactcctaacactgatggcataaagctcaccgaagaaattagaaccataacatgcccctcgtgcggccataacattgaattcgcggtgaaagataagggtggaatccatgacttgccggggttaccagctggagtgaagtttgacccaaatgaccaagaaatattagaacatttggaggcaaaagtggcgtctgatgcatgcaagcttcatccccttattgacgagttcataccaacgcttgaaggcgaaaatgggatctgttatacacacccagaaaagctaccaggtgcttcatgttttacttaatttattttattttaattattttttgtctaattaattagtatagtttcgtgttttagaatacttattgcatatacacatcattgaattctcatttattgggagacacgtcttgatgtgcacgataccgcatgcatgaaattaattgttttagcaatgaaatgattttttttttctttgaaaaggatctctaatcataaggcggttcaaatttgaaaatgacagcagaacattttatgcactctataaaatgagatctcaaaaattaacttatgagaaaatgtttttggtttaaaattaaattttcttcatatttttagagatactaaagattttaatatgagctctcacttctaattattatgaaaattggtgataaatatgaacgctcatcttgacgcttaaaaatggttgcatcaaacacaagatcagtaagtaacacggggtacagattctaggcagagagcaaagaaaactttccggcaaataatccttgtctgtgttattcttaatatatgttcaaaggtagatacaaatagttgaatcatggatttgatttatataattaacttcttggtaaactaaatatggtgcaagtatgttcttaagtttgcaatgactaccaaactcatcaaaatcgcatcttatcttccattaaccatgtaggaagagaaatgtaagtgtcatcccttaattttcagcaatatttttttatattttatgtcatatttcaacatgataccaaatagaggattgtcgtcggctaattgtatcaacaaaagaaaaatgaggttgctgcctttttactcttaatggggagctttctcaatttcttactcgattcaacttttacaaatatacattcattttctcttatatttcatttgcatcacattttctttaattttatctctttttttactaaaatatctttttttttattttttttgttctccttctcttttcttatatatatatatatatatatatatatatatatatatatatatatatatatatatatatatatatatatatatatatatattagcaaagatggacagatccgccacttctttcacaggccctcaaaagcatacacgactggaacaaggaaaagaagaaaggttcacactgatgatgaaggaattgaaacaagatggcacaaaacgggaaaaactagagcagtttttgcagcagcggtggtgcagtaaaaggttttaagaaaatactagtactctacaccaactatggaaggcaaaagaagcctgagaaaacttattgggtgatgcatcaataccatcttggcagtactgaagaagagaaagatggagaattagttgtttcaaaggtcttctatcagacacaacctagacaatgtggcaatcccattataataaaggattcatacgaaaaaatgttgaatgatggaagtggccaagacaacattaatatatcattaatacctaaaactactgcaactcttttggattgctacactgctccttacatagattatgatcacgtccatgtgagtcataacagggaaagttcctcacaactaattattcccagctcggttgttcaagttgatggctcttatattcgcttaacaatggatgcaaagaaagcaagatttgaaagtaacactgggaagagattctaggcagagcagcaatgacaaagacttgcatataaatgttctccatattgtttcctttactaattgatcagtacgtaacattatttatatgtgggattagaatgaaggaatttcaagggttggaaaaataagttggcttccttattaagatcaatatggtgcaggcatggtggacttaatttcccataattgaccctggttgaagttgagagacaagcaagttaggtatatatatttgcggtactgtagtttgattttaattttagggtacatgtatattcgtaaaatgtgcttatagatattacaatagtagcagggatatcgtttattgactactcttcagaactatagtcagtctatatactgtattttgtctagaattgaattttgcaccccctcaatcctgaaaaaaatgctgagatgtttcattattattatattatgcgtgtcagctacttaatttgctgggaagtttgtcccttgtagttttcccccctgttttctttgaaaggtcgattgtaaaataaggtgaagaacagtagattttttttannnatggttctaaattgcggtt

SEQ ID NO: 28539 - DNA, 375 bp, Glycine max
  unsure (1)..(375): unsure at all n locations
  Clone ID: TF_LIB3242-524-P1-J1-A6
gggctcgangggccaaatcggctctagcttgcttttttttctatccacctaccacgtagtgctgacatcgaaataatgaggggaagcattcaccaaaacaaacactcgattatgataccttaggactcgattttcgtacaacataacttgagcttgttaacttttacctcaaacacaagttcctcggcgatgatcctattgaccacgacatccctgacattgatcttttacatgattaaccttggaatgtaccagattggtttaatttcttccatggcgattccaagaacttgacaagcaaatggttaatcaggacaaccaattgtaaatactggaacgtcactgcgaaagaccgtgacattattacagttgaca

SEQ ID NO: 28540 - DNA, 402 bp, Glycine max
  Clone ID: TF_jC-gmfl02220081f01a1
ggctcgagaatagattaaccgtatatgtttttatctctagatattgcgaaccttgccctttggctataaaatcagcaaagacatgggttttagagacattggcgcttaactgcccccagggtttcagttctacaactgagacgagggagggatgcttttttgcctttacagaaagatcactattgatgaagttgtagagtggcacctttatggatattgacatacacacgtgcgagcaatggagactccctgtggtggcttaacttaatgcaaacgagaggagcttcttctgctgacgcgatcgtaaatatgctactggattggggaccaatacagctacgacatgtggttattgataagcaacagtgtaggatcgtccagtgcttgctccttacactcttg

SEQ ID NO: 28541 - DNA, 709 bp, Glycine max
  unsure (1)..(709): unsure at all n locations
  Clone ID: TF_GmC432953_1
actctctctctctctctctccttctcaggggggacagtttagaaaaccaagttgatctagttcaatcatacatagagaatacagtgtaaagaatagattttctcccctaccaaaaacaagagggagctgagatattgtaaggtggtgtgaaaggaattaacaaggatctgttttgggatatatgggcataagagaaagagatgacatggtgcaatgactcagatgaggagaggggaattgatcaactggttgcactaacaattactcctacttcaactaataacactactgttcttactgatcatcacacaaaagcaagcgaaattcgcaccttaacttgcccctcatgtggtcataacattgaattccaagaccagactggaatcaatgacttgccggggttaccagctggggtgaagtttgatccgaatgaccaggagatattagagcatttggaagcaaaggtattctctgacgtgccaaagcttcatccacttattgatgagttcataccaacgcttgaaggagagaatgggatctgttatactcatccagaaaagcttccaggtgtttgatattttatttttgctttcaatttnttttattgnnaatttcgtcatgcttttggtatttttggaaacggggttttagattacaggttatgataataattggaaactttatcatctatctcacttccatcatattt

SEQ ID NO: 28542 - DNA, 363 bp, Glycine max
  Clone ID: TF_LIB3138-042-Q1-N1-C2
gagttgttccattaggcactgtgcatggagacttcaagccttacttcagtggaaccatatcaaaaagacccctaactcatcttttcatctcgcttgccgatggatttgtcaggcccattgcggcttgcccatattccaagttggcaccttgtgataggttccacagaaacgatgaggagctgattcttgactagcggattgctacggtagcctccgtacgcttgtccgcacacattattgctgaggctgatatctacatgttagatccatgggactatccagctaacgccacctatgtggagcaagaatggtatttgctcagtcctagagacggaaagcacccaaatggtgcagggccataca

SEQ ID NO: 28543 - DNA, 725 bp, Glycine max
  unsure (1)..(725): unsure at all n locations
  Clone ID: TF_LIB4128-056-Q6-K1-H2
cttctgcttttttttataaactatgaccaggggttgttttccttggtgagaggatggaatagtgatgtgcatagacggtatactcactagaaacagactcctatgttccaccgagtgatgcctactggatttcggatttaccccaccgacagaggaacttctcatggagtatcatgagcccaaaggtcgctgggcaccattatgtgtgttgcatatattggcgaatatggctgggaccggtgcgacccatggggtcttccaggtagctctattttcggagaaaaagagtgttgctttttcagacccggagtacaggagatacccgaacgggtctcgacccaacacaggatctgggtcggggtattggtaagcctaccgaaaccaacgagatcatgaccacacgcatgtcctaacgattacataagaaaagtcctagtgctctactttggcaaaaacctcaagggcaccataaccatttgtgatcatgcacgagtatcgtctactcgactcttcccgaaagaacactgtcccaagctgagatgactgtgttctgtgtcgnatatacaacatgaactgctgtgctcagaagactgcgcagaacggcgtggatccgagcgacgagctcactctatacagcaacggttactctctctcttcttcgacccagctggaggactatctggaatctctgccatcgattgatgaacggtgtttcacgatgccac

SEQ ID NO: 28544 - DNA, 382 bp, Glycine max
  unsure (1)..(382): unsure at all n locations
  Clone ID: TF_21994330
aagnatggtagagggaaagttggnannaggattnaggtttnatntaagagatgaagagnttgggggggattattttttttttttggngnaananaatgatntaattgtnttgatagatgttgattttaanaagtgggaggggggggaggttngtgaaaaagtatgggttggagggaaggagtggtatttttaaatgaaaagaagggggaaggatggaagagggttaggganaagtnggggtagtggggtaaggnattggaagggtanagggaagggaaggggatgatgtgggaagggtaaanaggtagggatggggaagagtggggtgttataatgaggaagggaganggaagggagaaaaaatgaaggggggatggatgag

SEQ ID NO: 28545 - DNA, 277 bp, Glycine max
  Clone ID: TF_LIB3170-055-Q1-K1-C1
aataactacattttccctatgtctttcgcccctactctacacaaaaatatattattagcgtggagaaggtgaatactgcgaagaatggagagcttatattgcctccggagttacgtttccacccgactgatgaagagctggttatgcaatacttggagcgcaaggatttctcctgacctgtgccagcctgtattattcctgagcttcatgtacgccagtgtgatccttgggatttgccacgtgatttggagcaagagagatacttatttagcaccaa

SEQ ID NO: 28546 - DNA, 380 bp, Glycine max
  Clone ID: TF_jC-gmle01810023f12a1
tgggtagtgaagctcgaggggagacgaaaattaagcagcgagaaacgttgacttttggtgtataacttttaaacttattggccactgcttcttcttcttcttcttaagaactcatggctactatgatattattctagtgcacaaaaggatgggagttccagagagagaccctgctgcacaagcgagtcaggctaccgggtgtaggtcttaccccacagatgatgagcgtttggttcaggtcctttgccgcaaggctgctggccatcatttatctgttgcagtcgttgctgacgatgacctgtacaagtatgatccatgggctctttcaggataggcagtgtttggagagaaggagtggttctttcttagaccaggagaca

SEQ ID NO: 28547 - DNA, 421 bp, Glycine max
  Clone ID: TF_uC-gmflminsoy023h05b1
caccccacagacgaggagctcgtggttcattacctcaagaagaaagtagattctgttcctctccctgtttcaatcatcgctgatgttgatctctacaagtttgatccatgggaattaccagctggatgattgggtgttgtgccgaatctacaagaagggcaacacacaaaggtcacatgagagggacgattccattgatgacatgattggagaagtacctccttccatcaacgtgggccacatgagtgcgaggtttcacctttcaaggatgtccacgagctacagtggtgcattgttggaaaatgacagaaacacgttagaaggggtggttataggcaatggtagtgtgaatgggatcagcaatactaataatattacaagtgtcatatcatcatctcaataggtttgcaccctcaaactc

SEQ ID NO: 28548 - DNA, 633 bp, Glycine max
  Clone ID: TF_GmC126188_1
gctctttccacttcttcttcttcttagaaattgattcttcattcctcttttcaatctcttcttagttataatagctttcttcttttgctagcttgaaagggttttgtgatacatataatatttttgaattcttcaaacttatatatatatatatatatatttgatttcatggaagagcctattgtggtgaacaaaggtgaggagcctctagatttgcctccaggtttcaggttccaccctacagatgaagagataatcacttattatctcactgagaaggtgaggaatagcagtttcagtgcaattgcttggagaggctgatttgaacaagtgtgaaccttgggatttaccaaagaaagccaagataggggagaaagagtggtacttcttctgccaaaaggataggaagtacccaactgggatgaggaccaatagagcaacagaatctgggtactggaaggccacagaaaagattaggagatttacaaagggaaagggaaccttgtggggatgaagaggacccctcggttctatgaaaggagagctcccaagggtgagaagggctattgggtcattgatgagatacgatcggaagggcaatgggatgcgaccaacctgcctagggcgcgaagg

SEQ ID NO: 28549 - DNA, 1788 bp, Glycine max
  Clone ID: TF_GmC642_6
cacgcgtccggtgggtgggtgcttccagattcggactcagctttgtttcttttcttccgcgcttcctctatggctaggagctggcttattgacattggaggatttgcaaagaaagtgaaaaatactactctgtcaacagatgatcaaatgaaggactgtggaacatatcgtgaatgcccgaaatgtcattatcatattgataacagtgatgtttctcatgagtggcctggctttcctgttggtgtaaagtttgatccttctgatgttgagcttttagagcatttagcagcaaagtgttgtattggaaacagagagccacacatgtttattcatgagttcatcccaactctagaaggagagcaaggtatttgctacacacatccggaaaatcttccaggtgctaagaaagatgggagttatgtccatttctttcacagaacaaccaatgcatatgctactggtcaacgaaagcgtcgaaagattcatcatcaacagggtttgactgaagagcatgtgcgctggcataagactggcaagacgaaagctataatagaagatggagcacataagggctttaagaagatcatggttctctacgtaagatccagtgagaatgggtccaggtcttataaatccaactgggtaatgcatcagtaccatctagggactgtagaagaagaaaaggaaggtgaatatgtggtttcaaaaattttctgtcaacagcaaaagcagactgagaaaaatgagggcaatccaatggctgaagatcctgacaatataatatcacgaacaggtcctagaactccgaaaccaaatccccccaatccacctcgtgcgggaaaatctgttgattgtgatgataacattgatgaaactgtacttctgtcttctgccctggataccaagacaatccctggagaatcacatgctccacaatcagatattcaggatcaagactttactggcaatgctgcatggctagctggcgaatcgcaggctgaggaaagcaccaaatatgatggctgtgacgacatcttattgtgcaaggagatcttagattcttctgctatattaaatgaccctggattggactccaccaatcttgaagacattgcaggctatgctacccaaagggctagaaatgataatgaatcttgcggaatttctgttctggattcactggaattggatactcctgattttgatctttctagtttgtatttttgttctcaagacagtatccttgattggatggacaggttatgaggtgctctatgtatgatgccctttttggtaccaaatccagaagttgttccattcaattgccggggtagtgcatcctttttctccctttcatgcttcaattgctgtggtttttcttcttctggatgcagcaaatatagtgcatgaagttttggtcgtcatcatctgatgtttcatgctagtaagcggaaataatactactttctttggttcctcaactcttgcaacttttgtcatattatgaagttaagctcttatctagctagagctggagttttgccttcttcattggaggttatttgtgtgagaaattgtttttggaggctatttgtttcttcatggccaatttaaacttgtgctttggctcattatgtcagccgtgaaagtgaatactactttggtgatgaaatccgaaatggtgtagttgactttatgtactagatttcaagatggtgagtgttctatgtgaatattgataacataattattgcgtccaattattttcaaggcaaaatattctctccc

SEQ ID NO: 28550 - DNA, 597 bp, Glycine max
  Clone ID: TF_18730400
actcttttcaaacagcacctcatagtacacttcttttagggttaattacttcaaagccttagaccagacatctctttgaaaaccaccttccactcttgtttattttcttttcttttcactggtttttgttaaatcttgaggaggcaaaacaagggtctctctctttttctcttttctttcattgaacagaagattaggctttgttctagaagaaattaaacagtttaagacatggaagagagaaatcatgatggtgagaaactagatgaggttatgctaccgggttttaggtttcatccaactgatgaggagcttgttggattctacctgaagagaaagattcagcagaggccactctctattgagctcatcaagcagctagatatctacaagtacgatccttgggatctttcaaaaatggccaccactggggagaaagagtggtatttcttctgccccagagacagaaagtacaggaacagtgcaaggccaaatagggtaacaggagctgggttctggaaagctacagggactgatcgccctatctattcctcggagggctctaagtgtattggcctcaagaaatctctagtattt

SEQ ID NO: 28551 - DNA, 1221 bp, Glycine max
  Clone ID: TF_GmC1124_1
ctgttccgaattaatattgtagtaaagaaattttatatggcaaagtctcttatgatcctaactatatatataagccataccaacctttctgccataataccttaatatttcaaatatccccagcagagagtaacctctcaatcctagcttcaattatattgattttttcacatttctaaatccacctctaccatatatatctccctctaattaaacctctctatccatatctaaaatttcaaaaagatctcaattaattagatttccctctctctttctctctctaactatattgcaaacctttccctctgctttcaaaatcagcaaattcatgggtcttagagacattggtgcttcactgcccccagggtttcggttttacccgagtgatgaggagttggtccttcattacctttacaaaaagatcactaatgaggaagttctgaagggtaccttgatggaaattgacttgcacacgtgcgagccatggcaactcccagaggtggctaagctcaatgcaaacgaatggtacttcttcagcttccgtgaccgtaaatatgcaaccggctttcgaaccaatcgcgcgacgacatctggctactggaaagcaacggggaaggatcgtacggtgtttgaccctgccacgcgtgaggttgtagggatgaggaagacattggtgttctacaggaacagggctccaaatggcatcaaaacgggttggatcatgcatgagtttcgcttggagacgccacatttgccacctaaggaggactgggttttgtgtagagtgtttcacaagggcaaagcagacaacagtgccaaactcatcatgtacgagagcacagttccatccctaactttggcttcgtcatctccaaccaaccaaaacaccacaccatcaattgggtataaccaatttcttgccccattctcttcctcaatggcaacccatcatcacaatcacaatcatcatattccaaaccaaagccaaaacaacaacaacaactccttgatgggtctccttcagttctctagggaaacaaacaccaacaactctagcaccgttactcaaattagtcccaaatgtgatgataataatggatatgggttcttatgggacatggacctcgaagaaaatagcttcaatgatggcgtggcatcaaacttggatggaatgagattcttcgagcttgataataataatagtgtggtcttgttatg

SEQ ID NO: 28552 - DNA, 2563 bp, Glycine max
  Clone ID: TF_GmC580_1
gcacgcccctgataaaaaaaaaagcaaacttttctctttctctcttcttcatgctcgagtgcttggtctcgctcctttacaaaaaaagctatggaccacaacatctaatctaatctaaacaaacaaacaaacactcctcttaattattcttttgattctcaaattcttcttcggtttttttccctttctttttggtttcattgagtatgggttcggtggactgttatccttctcgtacggacgatgctgccgtggtgtctttggattcgctgcctttagggttccgattccgacccaccgacgaggaactcgtcaattactacctgcgacagaagatcaatggtaatggtcgctaggtttgggttatccgagaaattgatttctgcaaatgagagacttgggatatgctcggtttgtcggtggtacagaccaaggatccggaatggttctttttctgtccacaggaccggaagtatccaaatgggcatcgattgaacagagcgacaaataatgggtattggaaggcaacggggaaggatcgtagaatcaagtctgggaaggatttaattggaatgaagaagactttggtgttctacactggtcgtgcacccaaagggaataggaccaattgggttatgcacgagtatcgtcccactttgaaggagcttgatggtactaatcctggacagaatccatatgtcctttgtcgtttgtttaagaaacatgatgagagccttgaagtttcacactgtgatgaagcagagcagactgcttccactcctgtggcttactccacagaggaaatacaatctgatctggctgttgttgcaggatccccctcacaagttaccgaagatgataagcaccaggcaatgatccctgcacactctgaggaagcaatatccaatgttgtaaccccggttgtttgccgtagtgacagatatgatgcttgtcatgcaccaaatcaaattgtattaccaactgcggaggagtttcaaccattgaactattatgacccaagaaacgagctattggatgataaattattctcccctgtacttgcacatattcaaccagaatttcattatcaagcaaacatcgaatcagatgattggtatgggcttcaatatggtacaaatgagacaaacatgtcagactttttgaattcagttgtgaattgggatcaagtatcctttgaggatctcaattgtcaacagcagagctaccccttgtttaatgttaaggatagcatattaagcagcgatctagattctgaacttgccaatatgacatgtatgcaagctggttatgcggagggggcaattgacggaaggaaacctttggtgataacttcagaattttgcagcaccactggcatccccgttgactgtgttggtgacgagcagaaaagcaatgttgggttatttcaaaacaattcccagagagcttttactgatgttaatataggtcaagtatacaatgtagtcgatgattatgagcaacgaggaatctgcagtgcagttgctagtggcaatactggaatcataaggaggcatcgtgaggtacaaaatgaacagctaagctcaaactcaacacaaggtactgcacagagaagaattcgtttgtcaatggctacacatggctcaaataagatggtgaaaagtggaagttgtgcacaagaagagcttaatttaaaatccgtcattgctatggtaagaattttgtttttttagcttctgtccaagagaagagattgtctttgcatgcgaaatgaggtttgtttttcttttgtaggaggagaaagcttcagaaagccatatttctgatgaaagttctactcttactaatgacgggaatgaactgccgaagacatccaaatcatccggcaaaagaaagatttctcgacaagctacaaaagcaggctcaaccttggggttgaaagactttttattgctcagaagggtgccttacatttcgaaggcttcctcaaatcgtgccaagtgctcttctgtttttgtagtttctgcctttgtaatggtcaccttagtggtctttactgacatctggggatatcttaaattttaaactgctaggagatcattcctttgttgttttttttgcctccatttcttttttgggccatgagtggaggtatgtagggtcttcttagatttgttgatagttcaatttataggtgagtgcacttgtagttggtatatgtatgctcacctggttggcttgtctgtttctgttgctgtacatcatgtatacatttttttttccaactttttatcacctccttttaagtttgtggcttctctatttcaaaaaacaaagggtgatagaaagacaaaaataatggctggaaattttgaattacatgcgagtgttttgaattatgtagccttcaatggtaaatttagcgatgctaatgaaatcacttaaaataatggccgggaatactataccatcttgggaatattaactgctaagtgggcgtgcacatttatcgcagctcgctaaaatcacgagcagcgctgccatttggctaatctgtatgtgt

SEQ ID NO: 28553 - DNA, 715 bp, Glycine max
  Clone ID: TF_GmC451863_1
agagagagtctggaatttgagctttagtcagaaaattaaaaaccaaccggattttctttttctatcctgtttctttgcttctcttttttcctctctctctctctttctctttctctctcataaaccgctacatacatgcactttttaaattagcaaaaacgtaaaggtactatatgtgtgtttgaagcagctcctatagccaccttttcctttattatttctttttctcactgccttcagttaaagtagcgagctagataggaaattctggtgtttttccatggttaaagaaggtttatagctcaatcctattagaacaacctcggacatgctcagttgtggactgttccataaaaagggagttgaaatagtatttgaaggcatctggtttcatcaagagagatagcacacgcgcgcgcacgcttcagagatgagtaagatcagcaactggagttctgtaagcagttctgatctcatagatgccaagcttgaagagcatcagttgtgtggatccaagcagtgccccggttgcggacacaagtttgaagggaagccggattggctaggcttgcccgcagaggtgaagtttgatcccacagaccaagaactaatagaacatcttgaagccaaagtggaggcaaagaacatgaaatcacaccctttgatagatgagttcattcccactattgaaggagaagatggaatttgttatacc

SEQ ID NO: 28554 - DNA, 1217 bp, Glycine max
  Clone ID: TF_GmC416_2
cttagcctataatataacttagccaacatggagtttctcccacctggttttcgattctacccaacagaggaagaattagttgtcttctatctacacaaccagctagaaggccaaatacacgacacaagcagagtcattccagtcactgacatcaatggcgtagagccatggaaccttccaagtactaccaccactttaattttgttactattcattctttgctgctaaaatatatagtttggtttgtgttgttgtaatcagcacttgcaggggagttttgtcgtggagacacggagcaatggtttttcttttcacctagacaagagagagaggccagaggaggcagacccaacagaaccacggcaagtgggtattggaaggccacgggttcccctggccatgtttactcttctgacaacaaagtcattgggatgaagaaaaccatggtgttttacaaagggaaagctcccaccggaaggaaaaccaaatggaagatgcatcaatacaaagccattgaacactctcaccaatccaacactgcccctcccaagttgaggcacgaattcagcttgtgtcgtgtgtacgtgatatcgggaagctttcgatcgtttgatcgacgcccactggagatgccaagaattgagctacgagttgatggggacagaggtgctgcttcaacaagtactcaacagagagcagcagtggtggatggattaagttcttctgatacttcttcccactctggaggaggaagagggggttctcatatctcagaggctggagcagggtcaagtggaaccaattggaatgcaagtaatagtagggttgaggaaccactttgggaatgggaacaacttaattggccatgacccaaaagtcaagaacatgcttcaacctagcaagactttattaattgagaaacatatcgtttacatcaatttaatctaagttggaaaaagcagggcgagaaattgattaattaatcatctaaattgtaggcgtagttgggtataacttccttcacctttaaggggcaagcaatgtaatgtaacataatctttactatttgttgtttagcataggattgatttttcccaggaaaataagttgggaataagatccaaacataaaaaggaaggtggcgtggatcttgtaattttgttttagtgacttgttgtcttgtaacgataatcaatcaatctccttttcaccccttg

SEQ ID NO: 28555 - DNA, 1893 bp, Glycine max
  Clone ID: TF_GmC625_16
ttttcttttgggcggacgcgtgggcaaagtaacactagaactcacaaaggacagaagaaacgcgaatgccaggagaactccaattaccacccgggttcagattccaccccactgacgatgagcttgtgaatcactacttgtgtagaaagtgtgctgcacaaaccattgctgttcccatcatcaaagaaatcgatttgtacaagtttgatccatggcagcttccaggtacctttttttcttttctcactctagtctctgtattcttttgccttttttaatttcattagggtcttaattctactacattttttttctctccaccttaaagtcctattatttatgtttttatgtacagagatggctctttacggtgagaaagagtggtactttttctctcctcgagaccgaaaatacccaaacggttcgagaccgaaccgggctgccggaagcgggtactggaaggctaccggagctgacaaaccgatcggaaaaccgaaagcccttggaatcaagaaggccctcgtgttctacgcgggcaaagccccaaagggagtgaagaccaattggatcatgcacgaatatcgcttagccaacgtcgacagatccgcctcaaaaaaaaaacaccaccaccaacaacttgagggtatgtcccgataacaatcttattaataataattataagattcttgctaatcaatatcgttaggtgttagttgaggaataaaaagaatatttaatgtgagatagcgttaaaaagtcattaatacataattttatgtattttaataaatacataaacaaaattctttttttaattttttaactaagattaagaacagggattaataatgtttcaaagtttggttaggtagaaataatatgtgatttggacaatttttttaactgttgtgcttattggaatggcagcttgatgattgggttttgtgccgaatttacaacaagaaagggaagattgagaagtacaatggtgttgcggtggtggatcagaaagtggccaagttatcagaagaggaggttcagttccagcacgagaccaagcctcagatcaagatgtacggccacgatgatttcaggaacgaccaattgtacatggacacgtcggattcggggcccaggttgcacacggactccagctgctccgagcacgtggtttcgcccgatggcacgtgcgagaaggaggtgcagagcgagcccaagtggaatgatcttgagttgggccccgacccagccttgggcttcgattttaatttcatggacctgacctcagatgacgcttttgcccctcaggttcaataccaaatcaaccatctctcaccgtggcaagaaatgttcacgtacctaccaaagacattttgatttttttagggtcaatgggaccccaagaaggaaatacgggtctcacatttatttttaaaattcgttaaaaaaaaaaacaacaaaaaaatcacattcaagcgtacctactatactactgtacctaactactactcatgccggctttggtctgcacgtgtggtgactattatctgttcttgggattgttgaatttgactgccattgatcactaggaaaaaatgagatcataggtacctaaaaataagaaaaatgatctcaactgggtgaagaatgaagatccattagctatgttaggaattgtgtcgacatgtaaggactaaggacccctagtagaaaattcttgtttcattgctattgtagtaggatttttttgtatgtctgtgaaatattatattatattatattatatatatatatatatatatttttttttaattttcaaagtaagcagcaattgaaatgaaaatgtaagggtttcatttttgtgaaaaaaaaaaaaaaaaaaaaaaaaaaaaa

SEQ ID NO: 28556 - DNA, 475 bp, Glycine max
  Clone ID: TF_GmC525_5
gacccttttgctttctttatccaataataataataaccccctttttccctctccatacccttttgctttctttatccaataataagaacttcccacgagtggctttaactggtctggtctggtctggtcggacacacaaaaatattagtatggagaaggtgagttttgtgaagaatggagagcttagattgcctccggggtttcgtttccacccgactgatgaggagctggttttgcagtacttgaagcgcaaggtcttctcctgccctctgccagcctctatcattcctgaggttgatgtttgcaagtctgatccttgggatttgccaggtgatttggagcaagagagatacttctttagcaccaaagaggccaaatatcccaacggaaatcgctctaacagagccacaaattcgggttattggaaggcaactggcttggacaaacaaattgttacttcaaaagggaaccaagt

SEQ ID NO: 28557 - DNA, 1619 bp, Glycine max
  Clone ID: TF_GmC424_2
tgagaagaaaaaaaaaacattttcatcatcttcttcttctttttcatcaatcatcaccagtggttcttttccttctgagaagatcgaattgtgttttgcaaaaatgggagttccagagaaagaccctctttcccaattgagtttgcctcctggttttcggttttaccccaccgacgaggagcttctcgttcagtatctgtgccgcaaggtcgctggccaccatttctctcttccaatcattgccgaaattgacttgtacaagttcgacccatgggttcttccaagtaaagcgattttcggtgaaaaagaaggggattttttttctgaattgaataaatttgattgattaatttttgcaggtaaggcgattttcggtgagaaagagtggtactttttcagccctagagacaggaaataccctaacgggtcccgacccaacagagtagccgggtcgggttattggaaagccaccggaaccgacaagatcatcaccaccgaaggtagaaaagttggcataaaaaaagccctcgttttctacattggcaaagcccccaaaggcaccaaaaccaattggatcatgcacgagtatcgcctcctcgactcttcccgaaaaaacaccggcaccaagcttgatgactgggttctgtgtcgtatctacaagaagaactcgagtgcacagaaggcggtgcaaaacggcgtcgttccgagcaacgagcacactcaatacagcaacggttcctcttcctcttcttcgtcacaactcgacgacgttctggaatcgctgccagcgattgatgaacggtgtttcccgatgccacgtgtcaacacgctgcagcaacagcagcacgaggagaaggtcaatgttcagaacttgggtgaaggggggttactggattggaccaacccttcggttctgaattcggtcgttgatttcgtatcggggaataataatcataatcaattggtgcaggaccagacgcaaggcatggtgaactacaacgcgtgcaatgacctctatgtccctacgttatgccatgtgggcacgtcagttccgcaaaagatggaggaagaggtgcaaagcggcgtgagaaaccaacgggtccagaacaattcctggtttcttcagaatgatttcacacaggggtttcagaattcggttgacacgtctgggtttaagtacccggttcaaccggtggggttcgggttcaggaattgaaccctgttatcgattaataatagtagtaatcttttaaatcggtaaataggtgggggattctttgggcttaactcgtgggggttttagattaatcctttagaaaagggaagaagaagaagaagaagaaggtgaaaattttggtcctcattttcagctaaagatgtagggtatacaaacgttcaatgaaccaatccacgagataaagcaatgacgggaccattttaatttgttacgacgtagttttcggcccacacaagcccttactcagccacatgaatcacatttgtacttcaaatgaacagcaagaattttttttactatatgttaggtttcgttaaataattccaatcttgatattactttgttaaccaactaaagtacctaaagaaatgcaactcattag

SEQ ID NO: 28558 - DNA, 519 bp, Glycine max
  Clone ID: TF_GmC625_8
gcggttcccatcatcaaagaggtcgatttgtacaagtttgatccatggcagcttccagaaattggctactacggcgagaaagaatggtacttcttttctcctcgggatcggaaatacccgaacggttcacggccgaaccgtgccgccggaagcggctattggaaagccaccggcgccgataaggcgatcggaaaaccgaaagcgctagggatcaagaaagctctggttttttacgccggaaaagcccccaaaggagtgaaaaccaattggatcatgcacgaatatcgcctcgccaatgttgaccgatctgcctccaagaaaaacaacaacaacttgagggtatgtcccaaattgtaatttcactagtttttcttttatgggcaaatattaattttgttagaatgttagttttcttgcaatcttttttctgtttcccttattcaattcaccttatatctccaatttgactaaaattttgattagaaaaggattagaattgcataagttttgatctttcag

SEQ ID NO: 28559 - DNA, 1093 bp, Glycine max
  Clone ID: TF_GmC625_19
ttttcggattttataaaggacagaagaaacgcgaatgccaggagaactccaattaccacccgggttcagattccaccccactgacgatgagcttgtgaatcactacttgtgtagaaagtgtgctgcgcaaaccattgctgttcccatcatcaaagaaatcgatttgtacaagtttgatccatggcagcttccagagatggctctttacggtgagaaagagtggtactttttctctcctcgagaccgaaaatacccaaacggttcgagaccgaaccgggctgccggaagcgggtactggaaggctaccggagctgacaaaccgatcggaaaaccgaaagcccttggaatcaagaaggccctcgtgttctacgcgggcaaagccccaaagggagtgaagaccaattggatcatgcacgaatatcgcttagccaacgtcgacagatccgcctcaaaaaaaaacaccaccaccaacaacttgaggcttgatgattgggttttgtgccgaatttacaacaagaaagggaagattgagaagtacaatggtgttgcggtggtggatcagaaagtggccaagttatcagaagaggaggttcagttccagcacgagaccaagcctcagatcaagatgtacggccacgatgatttcaggaacgaccaattgtacatggacacgtcggattcggggcccaggttgcacacggactccagctgctccgagcacgtggtttcgcccgatggcacgtgcgagaaggaggtgcagagcgagcccaagtggaatgatcttgagttgggccccgacccagccttgggcttcgattttaatttcatggacctgacctcagatgacgcttttgcccctcaggttcaataccaaatcaaccatctctcaccgtggcaagaaatgttcacgtacctaccaaagacattttgatttttttagggtcaatgggaccccaagaaggaaatacgggtctcacatttatttttaaaattcgtaaaaaaaaaaaaaaaaaaaaaaaaaaaaaggcggccgttttaaaggatccaacctaccttccccttccttccaacgtattactttttttttagggca

SEQ ID NO: 28560 - DNA, 413 bp, Glycine max
  unsure (1)..(413): unsure at all n locations
  Clone ID: TF_GmC54821_5
gcggccacgcgtactgacaatcccaaattcttccttccttctccacatcatttcaaaaacacaaaaaaccctaacccccaattcatctctcttgaatcgaatcgatggcacgcatgggtccagggttccgattccaccccaccgacgaagagctggtggtgttctacctcaagcgcaagatgactggaaacctctcccgctacgaccacatcgccgtcgttgacgtctacaagctcgagccctgggaccttccctctctgtcgaagctgaagacgaaggacttggagtggtacttcttcagcgcgctggatcgcaagtacggaaacggctccaggaccaaccgcgccaccgagaggggctactggaagaccaccggaaaagaccgtcncgtcacccacggcgaacgcaccgtc

SEQ ID NO: 28561 - DNA, 2367 bp, Glycine max
  unsure (1)..(2367): unsure at all n locations
  Clone ID: TF_GmC195_2
tcgtccacgcgttcgcccacgcgtncggattcttaatttttatttattaattgttactgtgttgactttacaggattggctacttatggagagaaagagtggtacttcttttcaccacgggaccggaaatacccaaacggttcgaggccgaaccgggcggctggcaccggttactggaaggcaaccggggcggatatgcccattggtcagcccaaaccgcttgggattaaaaaagctttggtgttttacgcagggaaagctcctaaaggggacaaacccacgctggctcctcggcacgtgtggcggtatcggctataaataaaggggtctctcttatgttctaagtttgaagcggctcgagcatagttggtgtagctagcgagggagggatatagggggaagcgtttattcattcattaagatggcatcggagcttcaattgcccccaggcttcagattccatccaacggaccaggagctggtgttgcactatctctgccgtaaatgcgcgtcgcagcctatcgccgttcccatcatcgccgaaatcgacctctacaaatacgacccctgggacctacccggtaacattatcttcaacttctgatatattcttattcttaattcttaattcattcattttttgaattgttattgtacaggattggcttcctacggagagaaagagtggtacttcttttcaccacgggaccggaaatacccgaacggttccaggccgaaccgggcggcgggaaccggttactggaaggcaaccggggcggataagcccattggccaccccaaaccggttgggataaaaaaagctttggtgttttacgcagggaaagctccgaaaggggacaagagcaattggatcatgcacgagtatcgtctcgccgatgtagatcgctccgttcgcaaaaagaacagcctaagggtacatacatacatgaatgatgatgcatgccctttctagttcaagattattaggataggataattgcatgaaattacgactttgccctcaagttgaagctgaggatgataatcatttcccatgcaaattgcaaaatctatggccgtaatatcttaaatgttatctcaccgcgcagaaccttcaccagttgaagacttagccatcgcattaaaaacaataattgatgtggaaagagaaaaaattaaaaatataaaatcttctgccaaatcgcaattatcactttctatttttagaaattattccttcttatcactctcacctgccaccgcctgcgagattaaattaatcttacgttggtttccgattatgcagttagatgattgggtgctttgccgtatttacaacaagaagggcacgatcgagaagttccaaccaagcagcgatgttgttgttagccgaaaaatggaatcatcggagatcgaagacaggaagccggagattctgaaaagcggaggaggttgtcttctgccgccggttccgccgccgcaagcgaaggcggcggtgaagacggattacatgtacttcgacccgtcggattcaatcccgaagctgcacacggactcgagctgttcggagcacgtggtatcgccggaattcgcgagcgaggtgcagagcgagccaaagtggaaggagtgggagaaaagcctcgagtttccgtttaattacgtggatgccactctgaacaacagcaacagcttcacgacgcaattccagggcaataatcagatgatgtcgccgctgcaggacatgttcatgtactggcccaacaagcccttctgaacaaaccgatccacgccgcccattcgcatttgcacggtagcacgagactcaaggtctatgagtgtgcctgtgcgaccacacacagacgattatttatcaagttagcttagctagggcaaagaaagataaaaacattgaagctggaaacgcatgtgtttgttgggtccaccgtctgcaccggttctttttggtgttttgctatgtgacgacgacgacgacgatgacgatccaacggtgcatgtttgttgacctgtccctagtagtagtagcatgtgtacagctattgtatgtagaatgtagataggtacactactacacgttgttgtcatgtgatcatagaaagctctctcaccgtacaaaaaaaaaaaaaaaagtgatagaaggtctatttgatgaccttctaattaatatatgttgaattattattagcatgtgttacatctaatttattaggcgtgcctttgtcttttctcatttttttaggtctttttaaattgagtatcgtgatatcctactgtgtttactttttcatttcaatatcttttgttttttatgtactactataatataattaatataaaacaattttagtt

SEQ ID NO: 28562 - DNA, 1567 bp, Glycine max
  Clone ID: TF_GmC424_3
ttcttcttctttttcatcaatcatcaccagtggttcttttccttctgagaagatcgaattgtgttttgcaaaaatgggagttccagagaaagaccctctttcccaattgagtttgcctcctggttttcggttttaccccaccgacgaggagcttctcgttcagtatctgtgccgcaaggtcgctggccaccatttctctcttccaatcattgccgaaattgacttgtacaagttcgacccatgggttcttccaagtaattatcaaatcgctcacccatctccatttttttttaagttaattactttgttctaaattgaatagatttgattgattaattttgcaggtaaagcgattttcggtgaaaaagagtggtactttttcagccccagagacaggaaatacccgaacgggtctcgacccaacagagtagctgggtcgggttattggaaagccaccggaaccgacaagatcatcaccaccgaaggtagaaaagttggcataaaaaaagccctcgttttctacgttggcaaagcccccaagggcaccaaaaccaattggatcatgcacgagtatcgcctcctcgactcttcccgaaagaacactggcaccaagcttgatgattgggttctgtgtcgtatatacaagaagaactcgagtgcacagaagacggcgcaaaacggcgtggttccgagcaacgagcacactcaatacagcaacggttcctcttcttcttcttcgtcccagctggaggacgttctggaatctctgccatcgattgatgaaaggtgtttcgcgatgccacgcgtcaacacgctgcaacaacaacagcaccacgaggagaaggtcaatgttcagaacttgggtgcagggggtttaatggattggaccaacccttcggttctgaattcggtcgccgatttcgcttcggggaataatcaagtggtacaggaccagactcaggggatggtgaactacaactgcaatgacctttatgtccctacgttatgccacttggactcatcggttccgttaaagatggaggaagaggtgcaaagcggcgtgagaaaccaacgggtcgggaataataattcgtggtttcttcagaatgatttcacacaggggtttcagaattcggttgacacgtgtgggtttaaatacccggttcagccggtcgggttcgggttcagaaattgaaccggctgatggattaataatagtaatgtttaaatcgggtttatttggtgtaaataggtggggattctttgggcttaactcgtgggggttttagattcctttttagaaaagggaagaagaaggtgcaaattttggtcctcattttcggctaaagatggagggtatactacaaacgttcaatgaatcaatccacgagataaagcaatgatggaaccatttaatttgttaggacgtagttttcggccatacaagcccttacttagccacatgaatcacatttgtacttaaaatgaagaactagaaaattgtttgctatatgttaggtttcgttaattaattaattccaatctggttattatgttgttataaaaa

SEQ ID NO: 28563 - DNA, 1798 bp, Glycine max
  Clone ID: TF_GmC834_1
attgaaggtacccttcttttgttgcttgatcctcaatcaaagacccatcttttccgtttggcttagggaacttcagcactgaagccctaatcccaccgtatccatccaccgcagcacacacccccttttgctgcttcttctcttccaacatgggtcgcgaaactatgtgccttccaaccccaccaaccactgccaccaccacagtgaacccagtgccgccaccagcaccagcaccacctacctctcttgctcctggcttcaggttccacccaactgatgaggaactcgttatctattacctcaagcgcaaggtttctggcaaaagcttccgatttgatgccatatccgaggttgacatatacaggagcgaaccctgggacctagcagataagtcaaggttgaagactagggaccaggagtggtattttttcagtgcactggacaagaaatatgggaatggtgggaggatgaacagggctaccagcaaagggtactggaaagccactgggaatgatcgaccagtgaggcatgaccaaaggaccgtggggctgaagaaaacgttggtgtttcatagtggcagagctcctgatgggaaaaggactaactgggtcatgcatgagtacaggcttgttgaagaggagcttgagagggctgggtctggatcctctcagcctcaggatgcgtatgttttgtgtagagtgtttcacaaaaataacataggacccccaaatgggcaacggtatgcgcccttcattgaagaagagtgggatgacgcatcgggaatggttccaggggcagaccctggggataaccgctcttttgcccaccaaccacatgttgaaggcaaaggtggtgttttatgcgccgaagggagaaatggtgctgtgcaggacactcaatctttcaacaaagctccatttgatgtgaacaagcttcctatagaaactcaaaatcttctagctgtgtgcaagagggaaagcatggctgagtatccatcacccgaaaaggatgataataattgtaagcacatggatgactacccttcacctcaaacagataatccaaagcctttctctcaaatatacaaacgaaggcggcataacttgaactccaacaactctcatgtttctggagattcaatccgaaccagccaggatccgtgctcctctacaataactactgctgcaactgcactcccaaccactaatgctgctgctggcacagccaccaacactgcaccgaaaaaacattttctttccgcactggtggagttttcgctgctagagtcccttgaatcaaaggacagccttgcttcaattaagacaccggattttgacgtggaaaatcttgagtcatccatgcctccaagctgcgcaaagttcatcaaggaaatgaagagtgagatgcagaagctttcagttgaaaaggagacgatgaggtttgagatgatgagcacacaagcaatgattaacattctccagtctcgcgtcgacgttctcagcaaagaaaatgaggatttgaagaggatggtggcccaaaatccttaggaatcggcaatgccaatcccttgtatcagtgtaagttagttaaaactgagtaatgaagctcggtcttccggatattttcttatttttctgagtaagaattgtagttcgtttctttggctaaacttgtcaagttatcatttaaaacttgtcatcgtgtatcatatgactttcagtttcccagtgttgtgaaaatggccatgttagttcttgcttctctgaatgaatagattagcatctcaatttgatagctg

SEQ ID NO: 28564 - DNA, 1419 bp, Glycine max
  Clone ID: TF_GmC1311_2
gacagaattcaaatccttgtcatgcgatcatcctttcctcctctcaactttatttcgattgaaatgattcaatcatagtgcctaatcttcatccacccataataaaaagaaagatagagcaaagaaacaagagaatctacagaaaaaagccaggcacaaaaagttgtacataatattgtatgcatgagaattgaaggagggggttgaagactctttatcatcatcgatcgtgtacagcatggattcatcatcttcaggatctcagttatctcagcacccacaactcccaccgggttttcgattctaccccacagatgaggaactagtggttcactacctcaagagaaaagcagactctgttcctcttcctgtttccatcatcgccgaggttgatctctacaagttcgacccatgggaactcccaagtaaagcaacttttggtgatcaagagtggtactttttcagcccaagggataggaaatacccaaatgggtcaaggcctaacagagctgcttcttctgggtattggaaagcaaccggaactgacaagcccatacttgcatctcatggccaccaccacaaagttggagtcaagaaatcacttgttttctatggtggaaagcctccaaaaggggttaaaaccaattggatcatgcacgagtacaggcttgcagatagcaactcaaattctagctcaaaaccaccttctatggcttcagatcatgcacagagttgcaagaaaaattccttgaggcttgatgattgggttttgtgccgaatatacaagaaaagcaacagtaccaacctgccaaggttacctttggtggagcagaataaggagctttctatgctaccaatgaggtccactttgtcaatggctaataataacacctctcaggattccaaacccacgtcttctattagcacaagttatgggccccttggagtagaaaatgatgataacttatttgatggaatcttaggagttgatcatcagagcatgtagcatgatgtttctgattcccaacaagtgtcttcaaagggaaacttccctatgaaaagagaactttcgtcacagtacttttggaatgacacagggtcatcctcttcaagcaggagattccactgtgatcttaattatgctggaagcagcactgttgaggaagacaattccttcgtttctctgcttagccacctttcacagaacacaacatcgtttcacccaaatgcgcttcttggccctattggtaatggagtattgaggcaacagtttcaacttccaagcatgaattggaatacttagggtggttaatttggcttagggtatatactgggttggataataatgtagcggctattgtaggtttatattataagttaatttaacttgagttttatgagccatataaaacaaactag

SEQ ID NO: 28565 - DNA, 628 bp, Glycine max
  Clone ID: TF_GmC7703_4
ctcgagctcgtttttctctagggaattcgcggtaaacaatgatgcggaaggtggctatgctgtttgatttgcttctttttttttttttaatttgcttgttgggtttggggtgtgcttgttgtagatttgtcagtggtacggaacaaggatccagagtggttcttcttctgtccgcaggaccggaagtatccaaacgggcacaggttgaaccgagctacgaatcatggctattggaaggcgacggggaaggatcgtaaaatcaagtctgggacgattttgattggaatgaagaagactttggtgttctacactggtcgagcacccaaggggaataggaccaattgggttatgcatgagtatcgccccactttgaaggagcttgatggtaccaatcctggacagaatccatatgtcctttgtcgcttgtttaagaaacatgatgagagccttgaagtttcacactgtgatgaagcagagccgactgcttccactcctgtggctgcctattactccacagaggaaatacaatctgatctggctgttgttgcaggatcgccgtcacaagttacagaagatgataagcatcagtcaatgatccctgcacactctgaggaagcaatatccaatg

SEQ ID NO: 28566 - DNA, 929 bp, Glycine max
  Clone ID: TF_700736976_FLI
caataataataactccattttccctctgtcttccccccctcctctacacaaaaatatattattagcatggagaaggtgaattttgtgaagaatggagagcttagattgcctccggggttccgtttccacccgactgatgaggagctggttctgcaatacttgaagcgcaaggtcttctcctgccctttgccagcctctatcattcctgagcttcatgtttgcaagtgatttggagcaagagagatacttctttagcaccaaagtggccaaatatcccaacggaaatcgctccaacagagccacaaattcgggttattggaaggcaactggcttggacaaacaaattgttacttcaaaaggcaacaaccaagttgtcggaatgaagaagacacttgttttctacagaggcaagcctcctaatggatccagaactgattggatcatgcacgagtatcgcctcatccttaacgcctctcagtctcagagccatgttgttcccatggaaaattgggttctgtgtcgcatatttttgaagaggagaattggtgctaaaaatggggaggagagcaactctaaggtggttttctatgacttcctagcgcagaacaagaccgattcctcctcatcggtcgccagtggaattacacatgaatcagatgaacatgaagagagcagtagctccaacaccttcccttatactattagaagaaaaccttaacaaccttccttaaaaatttaagttcattatctagttgttgtttttaattgtctttccctttccctgtaattatcatcaatcacttgttgaaaggaagcatcctcttcccaaatgagaccggcattaagggtagtctggagagtatggtactaatactagtagtagtgtgtaatacacttctcatttcccttcaatttaaccccttttttct

SEQ ID NO: 28567 - DNA, 1662 bp, Glycine max
  Clone ID: TF_GmC416_1
tctttccacgcgtccgcccacgcgtccgcccacgcgtccgcccacgcgtccggaaaaacatggatgatctcccaccaggttttcgattctacccaacagaagaagaattagttttcttctatctacacaaccagctagaaggccaaatacacgacacaagcagagtcattccagtcattgacatcaatggcgtagagccatggaaccttccatgtactactacatgcataccactttaattctttaattttgttagttgttaccactcattctttagtatgtttcaaacccaaatgagttttgctaaaatggtttggtttgttttgttgtaatcagcacttgcaggggagctttgtcgtggagacacggagcaatggtttttcttttcaccgagacaagagagagaggccagaggaggcagacccaacagaaccacagcaagtggttattggaaggccactggttcccctggccatgtttactcttctgacaacaaagtcattgggatgaagaaaaccatggtcttttacaaagggaaagctcccaccggaaggaaaaccaaatggaagatgcatgagtataaagccattgaacactctgatcaatccaacactgcccctccaaaggtatactcatcattattatagtaaaacttcattccattttttcttttcaatttcgcgaatttggtcctttcatgttatttttgtcaatttgaacttcactattttaattacgtaattttagcctacgtgttaagttaatatttgatattttgacaggaaatgctgacatgacgatctaacaatactgtcacgttagcaatacaatgtgacattatgctatattatcacgtcaacgtttttgttgtatattatatgttaagttagctgatagactaaaatggagagtagaggtttgcaaaattgagaattatgaaagtaataagattaaaaaaaaaatgcatatccaacgtgccaatctggtagtatagtggtagttgctgctgttggttgcatatttcacacaaattctggtgctaatatagtttgtgtttttgttatgtataacagttgaggcacgaattcagcttgtgtcgtgtttatgtgatatcgggaagctttcgatcgtttgatcgacgcccactggatatgccaagagttgagctacgagttgttgatggggacagaggtgctgcttcaacaagtgctcaagctcaacagagaagttcttctcatacttcccactctggtggtgatgctcatgtcacagatgctggagcagggtcaagtggaacaaattggaatgcaagtaatagggttgaggaaccactttgggaatgggaacaacttgattggccatgacccaaaagtcaagaacatgctcaaacctagcaagactttcttaattgaataacgtcgtttcaattaaattaatcatataagttgtaggcgtagtttggttcgatttccttcacctcgaagggccatgtaatgtaacataatcattagtatttgttgtttaacataggattggttttccccgggaaaataagttgggaataagatccaagcataaaaaggaaggtggtgtggatcttgtaattttgtttttgtgacttgttgtcttgtaacgataatcaatctccttttcaaccctaga

SEQ ID NO: 28568 - DNA, 1572 bp, Glycine max
  Clone ID: TF_GmC525_1
tacggctggagaagacgacagaaggggacccttttgcgttctttatccaatgataatacactttttccctctccatacccttttccttcctttatccaataataataactccattttccctctgtcttccccccctcctctacacaaaaatatattattagcatggagaaggtgaattttgtgaagaatggagagcttagattgcctccggggttccgtttccacccgactgatgaggagctggttctgcaatacttgaagcgcaaggtcttctcctgccctttgccagcctctatcattcctgagcttcatgtttgcaagtctgatccttgggatttgccaggtgatttggagcaagagagatacttctttagcaccaaagtggccaaatatcccaacggaaatcgctccaacagagccacaaattcgggttattggaaggcaactggcttggacaaacaaattgttacttcaaaaggcaacaaccaagttgtcggatgaagaagacacttgttttctacagaggcaagcctcctaatggatccagaactgattggatcatgcacgagtatcgcctcatcttatgcctctcggcaactggcttggacaaacaaattgttacttcaaaaggcaacaaccaagttgtcggaatgaagaagacacttgttttctacagaggcaagcctcctaatggatccagaactgattggatcatgcacgagtatcgcctcatccttaacgcctctcagtctcagagccatgttgttcccatggaaaattgggttctgtgtcgcatatttttgaagaggagaattggtgctaaaaatggggaggagagcaactctaaggtggttttctatgacttcctagcgcagaacaagaccgattcctcctcatcggtcgccagtggaattacacatgaatcagatgaacatgaagagagcagtagctccaacaccttcccttatactattagaagaaaaccttaacaaccttccttaaaaatttaagttcattatctagttgttgtttttaattgtctttccctttccctgtaattatcatcaatcacttgttgaaaggaagcatcctcttcccaaatgagaccggcattaagggtagtctggagagtatggtactaatactagtagtagtgtgtaatacacttctcatttcccttcaatttaacccctttttttctaaaggtgatagagtgtgtaatggactccccattttccttcaatttaacctttttttctaatgcccatgcttcttcttttagcaaaaagctactcattttcagtttcaaaggagatgctttgacagaggaaaagtagaaagcataagaaaagaagatcaaaatatatattgtcaaaaattaaaacaccgttttcaggagaataagaacataatctatgcgacatcagcgacgcactagttacttgctcttcttcctttagggaaagaagaagggtgcccagctcctcaatgtttattcttgccggatcgaattttcaatatattttttttgggcttatacacaactgttatttatgtatcttaatcaactgc

SEQ ID NO: 28569 - DNA, 513 bp, Glycine max
  Clone ID: TF_uC-gmropic111g01b1
accactcgttcgagcgattatcggggaaaagagtggggctttttcagccccagagacaggaaatacccggacgggtctaagacccaacagagtagctgggtcgggttattggaatgtcactggatcgcgcgggatcatcaccaccgaaggtagaaatgttggcataaaaaaagccttcgttttctacggtggcaaagcccccaaaggcaccaaaaccaattggatcatgcacgagtatcgcctactcaactgttcccgaaagaacactggcaccaaggtatacagctacacatacacacatgcacatactctgttgcttaatggtcttacaccttcaattaattagaatgtctaattgcagcatgatgattgggtctctgtgtgcgtatatacatgaagaactcgagtgcacagaagacggcgcataacggcgtggttccgagcaacgagcacactcaatacagtaacggttcctattcttcttcttcgtcctagctggaggacgttctggaa

SEQ ID NO: 28570 - DNA, 507 bp, Glycine max
  Clone ID: TF_GmC580_6
cactttctctcttcatgcgtgagtgcttgatcgcgctactttaccagagaaaattagaagtgagaaaaagctatgggccacaacatctaaacaaaacaaacaaacacatctgaattattcctttgattttcaaattctgcttcggtttatttctttataattgatagcgggtgctttggagattttatttttccctttctttttggttgagtatgggttcggtggactgttatccgtctcgtgtggacgatgcggccgtggtgtctctagattcgctgccgttagggttccgattccgacctaccgacgaggaactcgtcaattactacctgcgacagaagatcaacggtaatggtcgcgaggattgggttatccgagaaattgatgtctgcaaatgggagccttgggacatgcccggtttgtcggtggtacagactaaggatccggagtggttcttcttctgtccacaggaccgaaagtatccaaatgggcatcgaatgaacagag

SEQ ID NO: 28571 - DNA, 1286 bp, Glycine max
  Clone ID: TF_700954809_FLI
gggaattaccagccatggcatcgtttggggcggaagagtggtactttttcagcccgagagaaaggaagtacccgaatggcgcaaggccaaacagggctgcaacttcagggtattggaaggccacaggtacagataagcctatatgtagtggaactcaaaaggttggggtgaagaaatctttggttttctatggagggaagccaccaaaaggggtcaaaactgattggatcatgcatgagtaccgtgttgctgaaaacaagcctaacaataggcctcctgggtgtgacttgggccacaagaaaaactccctaaggctggatgattgggtgttatgccggatctacaagaagggtaacacacaaaggtcacatgagagggatgattccatggacgacatgattggagaagtacctccttccatcaacgtgggccacatgaatgcgaggtttcacctttcaaagatgtccacgagctacagtggtgcattgttggaaaatgacagaaacacgttagaaggtgtggttataggcaatggtaatgtcaatggaatcaacactaattcaataaatgccatatcatcatcatcatctcatcatcagtttgcctcctcaaactccaaggcagagcttcttccttttgccccttcaaacaacaacacttctaattcagcctccaaaagaacactctcatcactctattggaatgttgatgatgataatgatgatgatgatcacaaacacttcaatttggacagtaatgggaatgtgagtgttttgaggactgaagagaataataataatactaatggtacttctggctcctttgccactctgcttaaccaacttccacaaacaccttcattgccccaaatagatgggttacttcgaacaccatatcaaatacaagggaccaattggtatggttaactccattttgggggatacgtacgatatgatatgataatttcataattataatgcacaaggagatccaattgaactaaggtgtggcaaggaatatcttcaacttgtgctagatcgcaaagatttcaaaagggtcattgagattgtggtttaattgttaggagaatggaagcacgttagagtactctaatcaatgctttcctccaaccatttgcaggtagctcatggcaattaataccacatgaggtgagggtgtaaggccttggtacttttagtttaattttaatttatatagattgatatagaaacatagatatagatagatataaagggatatttaatttgcttgttttattagtgtgt

SEQ ID NO: 28572 - DNA, 1235 bp, Glycine max
  Clone ID: TF_22597157
cgggtgaaaattgaaatcgcaaccgcaatttaaaaccttggtgtatgttcttatattgaaattgaaattcttggctagggaagcaaaagggtagtaattggttttagagtaagtgagaatggaaaacgtttcggttcttttgtgtaataaggaaaaggatcagatggatttgcctcctgggtttaggtttcacccaacagatgaagagcttattagtcattacctttacagaaaggtcactgacaccaacttctcagctagagccattggagaggtggacttgaacaggtctgagccttgggatttgccatggaaggccaaaatgggagagaaagagtggtactttttctgtgtgagggacagaaaatacccaactggtttgaggactaatagagccactgaatcaggatactggaaggctacagggaaagacaaagagattttcagagggaaatctcttgtgggtatgaagaaaactttggttttctacaaaggaagggctcccaagggagagaaaactgattgggtcatgcatgagtataggcttgatggtaaattctcttttcacaccctccccaaaactgcaaagaatgagtgggtgatttgcagggtttttcagaagagttcaggtgtgaaaaggactcatatttctgggatgatgatgttggactcttatggaaacgaaatggtttattcttcttctgctttgccacctctcactgattcctcaccttccattggcaacaacaccaaagcactgagtgtgactgattctgcttacgtgccctgcttctccaatccaattgatgttcctagaggaatctttgattccttgaacaacatcaatatcagcatcaacagcaacaccctttatggagtttcttcaaaccattcattttacaatactcagggggttcaacttcaggctccaccaactttgccattacctagttcttcaaaccattaccttagagcctttcttgaaaaccaaggaaatggatcgaacatgagcaacaatggttttgagccagagagggaaatggtcagtgtctcacagaaaacaagtctttctactgatgtgaaggctgaaatctcttcattgggtaaaaggcactttgagaatcaaaacaacccaattgcttcagcagctgcagttgcaccaatggaccttgctaccttgtggaactactgatctcaaataaagaattgccattggaaaaaaaaaaaaaaaaaaa

SEQ ID NO: 28573 - DNA, 760 bp, Glycine max
  Clone ID: TF_GmC119269_1
cgtccttgtgttaatttgtctctcccactttctgactttggatcttcttcttccctaaggttgtttagataaccataagaggaagaaggaggcccaaagtatataaatatatacacatggcacctgttttgcctcccggtttcagattccaccctacagacgaagaacttgttgcttactaccttaaaagaaagattaatggacgaaagattgagttggagatcatacctgaagttgatctctataagtgtgaaccgtgggacttgccagggaaatcattgttgccgggaaaggatttggagtggtatttctttagccctcgagacaggaagtacccaaatggatcaagaacaaaccgtgcaactaaatctggatactggaaggccacagggaaggatagaaaagtaaattcccaggctcgagctgtaggtatgaagaaaaccctagtttattatcgaggaagagcaccccatggctctcgtacaaattgggttatgcatgaatatcgtcttgatgagagagaatgcgaaaccaattcaggcttgcaggatgcatatgctctttgccgtgtggtcaagaagactgcagtgattcctccaaaagttggggggcactatgttaatgttcccaatgcgaacaagattacaagcgatcaatcatcaagcattgaactatactctgaaggaaggcacgaagatttagatagctcaaactatttgatgtccatggatatttgctcaccctgcaacatggggaatga

SEQ ID NO: 28574 - DNA, 1805 bp, Glycine max
  Clone ID: TF_GmC500_1
aattcggctcgagaccaccaccacaattttcagttccatgtcttcccatgattttcaccctttttctctctctcactttctgtggacttttctgtggtttccttttcagtgaaataaaaaaaaaaccactctggcttattactgtctatatagattcttctgaatccagttctttctaaaccaaaccaaaaaaacattccctctccaaccaagttttgtttttttttttttttcatgtgaaaattgaaatcgcaaccgcaatttaaaaccttggtgtatgttcttatattgaaattgaaattcttggctagggaagcaaaagggtagtaattggttttagagtaagtgagaatggaaaacgtttcggttcttttgtgtaataaggaaaaggatcagatggatttgcctcctgggtttaggtttcacccaacagatgaagagcttattagtcattacctttacagaaaggtcactgacaccaacttctcagctagagccattggagaggtggacttgaacaggtctgagccttgggatttgccatggaaggccaaaatgggagagaaagagtggtactttttctgtgtgagggacagaaaatacccaactggtttgaggactaatagagccactgaatcaggatactggaaggctacagggaaagacaaagagattttcagagggaaatctcttgtgggtatgaagaaaactttggttttctacaaaggaagggctcccaagggagagaaaactgattgggtcatgcatgagtataggcttgatggtaaattctcttttcacaacctccccaaaactgcaaaggtaataataataataactaataacaactttgattttggcttgatcatgttgcttcctatgttccactttttattctcttattagtattagtactttgtttgctttgtttgattttcagtgctgtgtttattattgtgttgcagaatgagtgggtgatttgcagggtttttcagaagagttcaggtgtgaaaaggactcatatttctgggatgatgatgttggactcttatggaaacgaaatggtttattcttcttctgctttgccacctctcactgattcctcaccttccattggcaacaacaccaaagcactgagtgtgactgattctgcttacgtgccctgcttctccaatccaattgatgttcctagaggaatctttgattccttgaacaacatcaatatcagcatcaacagcaacaccctttatggagtttcttcaaaccattcattttacaatactcagggggttcaacttcaggctccaccaactttgccattacctagttcttcaaaccattaccttagagcctttcttgaaaaccaaggaaatggatcgaacatgagcaacaatggttttgagccagagagggaaatggtcagtgtctcacagaaaacaagtctttctactgatgtgaaggctgaaatctcttcattgggtaaaaggcactttgagaatcaaaacaacccaattgcttcagcagctgcagttgcaccaatggaccttgctaccttgtggaactactgatctcaaataaagaattgccattggaaaaaaaaaaaaaaaaggccaactttttcagctgaaaaagtatagcctcataatttaccatatttactgtctggttttgatttttatgttgtccttcttgttgttattgttgtttgtttgtttgtctgtatagattttaactaaaagatttgctgaataatagtgaagcatgtattttgtactgttaagtgttaagttatgctgttttggtcc

SEQ ID NO: 28575 - DNA, 474 bp, Glycine max
  Clone ID: TF_uC-gmflpic081d07b1
tttcgaagctacaagagaagaaaaaaaaaaagagagaaaagaaaaaatttgttttataactttttaacttattgttcacttcttcttcttcttcttcttcaatatcttggttctttgatattattctattgagcaaaaaatgggagttccagagagagaccctcttgcacaattgagtttgcctcctgggtttaggttttaccccacagatgaggagcttttggttcagtacctttgccgcaaggttgctggccatcatttctctcttccaatcattgctgaagttgatttgtacaagtttgatccatgggttcttccaggtaattaatttcattatttatcatcaaagctttattaaaaatcatcatttaccacgattttagtgacaacatcaaagcttctagagtttacgatcataattgggactgcctcaatcatatttgcccttaatttcttttaaatatttaagaattg

SEQ ID NO: 28576 - DNA, 2028 bp, Glycine max
  unsure (1)..(2028): unsure at all n locations
  Clone ID: TF_GmC44609_1
gtccgctgggacccacgcccccccaaaatcgccaaagcttgaaatctgattgcggcgtctcgcgcttccttcttccaccttccccgggtttcactgtgccgatgacttttcttctgagaaagagatcgtcatccatcgcgtgccttcgttttcccttcatgaaccggggcaggctttggcgttcttggaacttcttcttccgccactggacttgaccctacccccccccaattagggttatctatttcttccatttttttttccttagaaaaaaaaaacccgtttcttcttctctcgctgccgacgagtcttctttctcttcgaatctttctggctgctacattctgaagcacttcatatttcggtttttcattttcatttttattttttttttattatctggatggccaaaccaaaaatgccagggtttcggtttcaacccactgacgttgagctgattgagtattttctgaagaggaaggttcggggtaagaaattcccttccgaaatgattgctgaacttgacttgtactagtttgctccgttggacctcccagatatgtctttgctcaagaatggggatttgaattgagacttcgtttgccctcggggaaagaagtattcgactggtggagtatcggggttatgcatgaatttagacttgatgacaaggtgctggctgatgaaggcgtattgcagggtgtaccaaaaggagggtcctggtcctaggaatggtgcacaatatggtaaaccatatgaggagaaagagtgggaaacagatgaggaaattgattctgtacaatctgcccctgttgctgctgtttgtgcacctgttcctatacaacctagtgaaagccatatttcagttgctaattacatccatccctctacaagtggatgtgctggattgacctctgtatcatgtgtatcagaattgatgccatcttgctcgacacatccttcagcacctagcaatccagttggcactgtatcatgtgtatcagaattgattccctcttgctcggaaccacatcatttgccatcaaacaatcaagttggctctgtttcatgtgtttcagaattcatgccctcttgctcggcacatcctttggcaccaaacaatcaagttgactctgttccatgtgtttcagaattcatgccctcttgctcagcacatccttcagcaccaaacagtcaagttggctctgtatcaggattgataccctctttcttggcacattcttcagcatcaaacaatcaagttggctctgtaccatgtgtaccagaattggtgccctcttgcttggcacatccttcagctccaaataatcaagctgacgttggcattctaccttttcttgattgttccatagaagatgatgacacattggctgtgaatgaaaacaacagcattgagaacgttgatgatcctgatcaggcaaacaatgcagaacgtggaccatgttcagatccaaatgctatttttgaggagttaggagaccttaacagcttggttggattgggtgaaggcagtttttcctgtggccagaaaaatgaatatactacaagcgaaatgctttatacagttgatatatttgggtcttgtgaccatgactttttggagttgattgacctagagacgccgcacgctctggcagaataaacatggaagtggtagccaagataagtaaggttaaaaaattgagggaagtatcccagaaaattgattgaactatagccccaagtacctaacgtggattagaataaacaaaggattctcttcctgtcttcatttaaaaaccatcatggcaccagttttctatttgacattaatttctggaattacttgacaatgatatcaactgacaagaatgttgattaaaatctagtgatgttctttgattgtgttatgtttgattaaaatctaattatgctggaagttgttccagacattttttgccgtgaagatttattnnnnnnnnnnnnnnnnnnnnnnnnnnnnnnnnnnnnnnnnnnnnnnnnnnnnnn

SEQ ID NO: 28577 - DNA, 610 bp, Glycine max
  Clone ID: TF_GmC518857_1
atgatttatcttctgaagtgatgcatggtcccacgcgtccgcccttgtgtccgctttcctatggcaggaccatcgtggttggtggacaaaagtagaattgcaaccaaaataaagagtgcctctggaacatgtggtaaagttatatggaaaagcaatccttccagagcttgcccaagctgtcaccatgttattgacaacagtgatgtagcacaagaatggcctggactacctattggtgttaaatttgatccatctgatcaagagataatttggcacttgcttgcaaaagttggtgctggaaattcaaaaccccaccctttcattgatgaatttattactactcttgaagtggatgatgggatttgttatactcatcctcaacatttaccaggtgtcaagcaagatggaagttcttctcactttttccatcgagtaatcaatgcgtataatactgacagtcgaaagcgtcgaacaatatgtggtcaggatcttggtgatgtccgctgtcacaagactggaaggactaaacctgtcatcttgaatgcgatccagaaaggctgtaaaaagattatggccctgtatataagcccagtgagagggagaaaatctg

SEQ ID NO: 28578 - DNA, 1192 bp, Glycine max
  Clone ID: TF_GmC1902_1
cacaaccaaggccactccacaagccagtaataatacttagctttgaatctccctgttgacatacatgggtttgcttctctgattacaaaaatcacttttggggagatggggaggttcgaaaaccatgttgtcaaaggaggcatcaagttgccaattgggttcaggttttgtcccaccgatgaagagcttctccttcactacctcaagaagaaggcgtttgctcaacaattacccgcttcagtcatttcagagtttgacgtgtttcagactgagccatggaaacttccaggtgaattgagggaaaataggtacttttttagcaatagatcaaatggaaacatcaagagacctgctggttctgggtgctggaaatctgtaggcaaagaaaaacaaatcatccattcagagagcaatcaagtaattgggatgaaggaaacactgtttttttgcaaagggtcccatgagacaagaactcagtgggtcatgcacgaattgcgccttgtagcttcctacccatgtcagatgccagtggcagattttgctgtgtatcgcatatttcagaaaaacaagatgaagacaagaagatcacatgggaagaagccctctagtagcagcaaacttcagagacttgttgatgttaaagctagtttctttgacttcactgtggattttaatcatgacgatatagggcctcccacacctttctttcctacagctgcttcatttgttttttcttggttgttacttagtttggatttcagccattgaaaagtcttaaaaaatttagtttaggtcttatttaatctcaaaaccagctcatatgcattagtttgaaaacggtctaataaaacaatagttgacagaagtggtaatcacttatatcttttgatcaagaaatcaggactggcatctgattgactcttagacataaaatgaatcttcttgtgagaagaatatttatattttatgtgctcacgattttcatgaaaattaatcatcaatttcacagaaatgttttatatcaatattatgatcatttgatcaacaaaataaaaatatcaatctaataatgggtgaagaaaaaaaaagtttcaataataatgatcaagggtgtgtatgattaacataatagaaataaaaaagataaaaataaaataaaaattaaaataaaacataaaaaatgtaaattata

SEQ ID NO: 28579 - DNA, 1078 bp, Glycine max
  Clone ID: TF_GmC407_1
gtttgatcctactgatcaggagattcttgaacatttggaagcgaaggtgcgctctgatattcataagcttcatcctttaattgatgagttcatccctactcttgaaggcgagaatggaatctgctgtacccatccagagaagttgccaggagttagcaaagatgggttgatccgacatttctttcacaggccttccaaagcatacacgaccggaacaaggaaaaggagaaaggtgcacacagatgcagatggcagtgagacacggtggcacaaaacaggtaaaactaggccagtcttcataagtggcaagttgaaagggtacaagaaaattcttgtgctttacactaactacagaaaacaaaggaagcccgagaaaacaaactgggtcatgcaccagtaccaccttggcaacaatgaagaggagaaggaaggggagttggtggtctccaaagttttctatcaaacacagcctagacaatgtggctcactcatgaaagactcatatcctgcaaaactaaagggtgaaggcgtgcatgaggtaactaatcataagaacactggctatgttgagtactacaataattcttttgtatcctttgatcaaggggaccagcataggtccagcactgcacaattagtctcccatttcccagtccatggtggtgctactttcattccttgaaagtagcggtggagggtatgaggaaaggtgatatatgtcatgcatggaattggaacattgcaattgtattctgcaatgaagaaataagttaataaccaactagaaatagttaggagggaaaaaggtggcacagaataaggagaaactgcttcatctgaaagctagtggtcagatacttcaactgaggaaaaaaaaggagggggtgaggggggcaacgtaaagaaaaaaacaaaatgatttggcttgtaactttgttttctttcttttattcttttgaaatttttgaatggtagctgttatcatgctttgtacagtgacacgaaaacatatctcaattgtccttacttgggtaaatactaaccatcaatctgtgccaacatgactttcatctaaaaa

SEQ ID NO: 28580 - DNA, 2187 bp, Glycine max
  unsure (1)..(2187): unsure at all n locations
  Clone ID: TF_GmC195_1
ggagtggcacattgtttgtctcggaaaagcaaagaaacatggtattctgggatgaaggaaaaatttgtacaaatgatgaagagcatctatgaaacagaagttacagattggccagtaccactgaaaatcatttctggaaccattcttgcaacaattttgggaacaaccttctggaaactcttttcctttcttagagatgctggtaatgggggagtttttgttgtnnntgtttnttntttttttacatctttntgtgttnttaaatttctgattcttaatttttatttattaattgttactgtgttactttacaggcgtgagcgggggcggacgcgtgggtggtgccaccatagttggtgtagctagcgagggagggatatagggggaagcgtttattcattcattaagatggcatcggagcttcaattgcccccaggcttcagattccatccaacggaccaggagctggtgttgcactatctctgccgtaaatgcgcgtcgcagcctatcgccgttcccatcatcgccgaaatcgacctctacaaatacgacccctgggacttacccggattggcttcctacggagagaaagagtggtacttcttttcaccacgggaccggaaatacccgaacggttccagcgccgaaccgggcggcgggaaccgggacttatggaaggcaaccggggcggataagcccattggtcaccccaaaccggttgggataaaaaaagctttggtgttttacgcagggaaagctccgaaaggggacaagagcaattggatcatgcacgagtatcgtcttcgcagatgtagatcgctccgttcgcaaaaagaacaccctaaggggttggatgattggggttgctttgccgtatttacaacaagaagggcacgatcgagaaacatggctccaaccgtcgaagcacgttgtatagccgaaatatgagatcgagcgcgagcgagccaaatggaagggtgggagaaaagcctcgagtttcgtttaattcctgcatgccacccaacaccagaacagcttcacgacgcagttccagggcaataatcagatgatgacgccgctgaaggacacgtcatgtactggcccaacaagcccttctgagcaaaccgatccacgccgcccattcgcataggcacggaagcccgagattctgaaaagcggtggaggttgtctttgcagccacacacaatcaattatttaccaagttagcttacctagggctggcccaattccagggcaataatctgatgttgcggctgctgcgcggcatgcgcatgtgccggtgcaaccggtttacatgtacttcgacccgtcggattcaatcccgaagctgcacacggactcgagctgttcggagcacgtggtatcgccggaattcgcgagcgaggtgcagagcgagccaaagtggaaggagtgggagaaaagcctcgagtttccgtttaattacgtggatgccactctgaacaacagcaacagcttcacgacgcaattccagggcaataatcagatgatgtcgccgctgcaggacatgttcatgtactggcccaacaagcccttctgaacaaaccgatccacgccgcccattcgcatttgcacggtagcacgagactcaaggtctatgagtgtgcctgtgcgaccacacacagacgattatttatcaagttagcttagctagggcaaagaaagataaaaacattgaagctggaaacgcatgtgtttgttgggtccaccgtctgcaccggttctttttggtgttttgctatgtgacgacgacgacgacgatgacgatccaacggtgcatgtttgttgacctgtccctagtagtagtagcatgtgtacagctattgtatgtagaatgtagataggtacactactacacgttgttgtcatgtgatcatagaagctctcttaccgggaaaaataaaaattgatagaaggatggaaggtgtatttggaccttccctaattaatatttgttgaattattatcattagtatgtgttacatctaatttagtaggtgctcctttctcttgttttttaggtcctttttaatcgagtatcgtgatatcctactgtgtgtttacttttttattttctatctttagtttaatttattatgtaataatgtaattaatagtctaaaacaagtttagcttttttttttcttt

SEQ ID NO: 28581 - DNA, 1146 bp, Glycine max
  Clone ID: TF_GmC7703_2
ctcgagccgacgcggccgcacacgcacccaccacccaaccttcagtttctcagcaacttcgctttaacccgtgacggaaaaactcaaaaagcagcgtaaatcaaaatccttggaatccctttgattcccccacttcggttttcaccttattcatctcaaagatttctcctttctctccttttttctctctttgcccttctgggtgtttttgaaacgtgcttaaaccgtgatgggtgctgttgtggagtgctacccgccgcctcgcacggcggtgctgtccctcaacacgctgccgttagggttccgtttccgtcccaccgatgaggagcttattgactactacctgcgctcgaagatcaacggaaatagtgacgatgtttgggttattcgtgagattgatgtctgcaaatgggagccttgggacttgcctgatttgtcagtggtacggaacaaggatccagagtggttcttcttctgtccgcaggaccggaagtatccaaacgggcacaggttgaaccgagctacgaatcatggctattggaaggcgacggggaaggatcgaaagattaagtctggctccaccttgattggaatgaagaagactcttgttttctataccggtcgtgctcccaaggggaagaggaccaattgggttatgcatgagtacaggcctaccttgaaggagcttgaaggaaccaatcctggacagaatccatatgtcctttgtcgattatttaagaaacaagatgagagtcttgaagcttcaaacggtgatgatgtggagcggactgcttcaactcctacaactgccaattactgtcccgacgaaatacaatctgattcagctctggttccagcatcttcctcacaggttactgaagatgataagcctctaccagttatttccgagaactccgaggaagcaatatccaacattataacccctggtgatattcatagtgacgaatgtgatgcttctgatgcacaatatcaaattgttgaaccaattgcaaaggaggatcaactgccgaacgtggacatattttatgacccaacaaatcagcaattagacgacaaattgttctcccctgtccatgcacatttcccagcagatttttattatcaagctaacaatcaatcagaact

SEQ ID NO: 28582 - DNA, 700 bp, Glycine max
  Clone ID: TF_GmC195_4
cacgcgtccgcatagttggtgttagtcttggtgtagtgtagctagggagggatatatatctgagtaagatggcatcagagcttgaattgcccccaggcttcagattccatccaacggacgaggagctggtgttgcactatctctgccgcaaatgcgcgtcgcagccaatcgccgttcccatcatcgccgaaatcgacctctacaaatacgacccctgggacttacccggattggctacttatggagagaaagagtggtacttcttttcaccacgggaccggaaatacccaaacggttcgaggccgaaccgggcggctggcaccggttactggaaggcaaccggggcggataagcccattggtcagcccaaaccggttgggattaaaaaagctttggtgttttacgcagggaaagctcctaaaggggacaaaagcaattggatcatgcacgagtatcgtctcgcagacgtagatcgctccgttcgcaaaaagaacaccctaaggttggatgattgggtgctttgccgtatttacaacaagaagggcacgatcgagaaactgcaaccaagcaagcgatgttgctcatagccgaaatatcgaatcctcgggagatcgaagacagggaagccggagattctgaaaagcgaaggaaggttgtctttccgccgcctgtgccccggtgcctggcgccgccgcaaggc

SEQ ID NO: 28583 - DNA, 739 bp, Glycine max
  Clone ID: TF_GmC14820_2
cccacgcgtccgtctctgtaagccttgctttcaattttctccttacaaaaaaatcctttcccttctctagtccccataactagcaaaagaagccaatagaaaactgttccatatagtttcccattcaaacttgttttgattttcattttaactcaatggagaatagaacaagctctgtactcccacctggcttcaggtttcaccccactgatgaggaactaattgtgtactacctttgcaaccaagcctcatcaaggccatgccctgcatcaatcattccagaagtggatatctataagtttgatccatgggaattacctgataaaacagactttggagaaaaggagtggtacttctttagcccacgagagaggaagtatccaaatggggtgaggcctaatagagcaaccgtgtctgggtattggaaggccactggcacagataaagcaatctatagtgggtctaagcatgtaggggtgaagaaggctttggttttttataagggtaagccaccaaagggtctcaagacagattggattatgcatgagtatagattaattggatcaagaagacaagccaatagacaagttggatccatgagggtaagcctttgccttacttgttagtatatattttttggtacaaaacaacatattttttatcagaagtaattctcttcaaatcaggtaagattattaaaacaacaaaattctttttttttaatcagataggactgttg

SEQ ID NO: 28584 - DNA, 1715 bp, Glycine max
  Clone ID: TF_GmC473_1
ggaattccctttcacttacgcgcccgagtcacgtagctaagcggctcgagaaagctacaagagaagaaaaaaaaaaagagagaaaagaaaaaatttgttttataactttttaacttattgttcacttcttcttcttcttcttcttcaatatcttggttctttgatattattctattgagcaaaaaatgggagttccagagagagaccctcttgcacaattgagtttgcctcctgggtttaggttttaccccacagatgaggagcttttggttcagtacctttgccgcaaggttgctggccatcatttctctcttccaatcattgctgaagttgatttgtacaagtttgatccatgggttcttccaggtaaggcagtgtttggagagaaggagtggtacttttttagcccaagagacaggaagtacccgaatggttcacgaccaaacagagtcgcgggttctgggtattggaaagcaactggaacagacaagatcatcaccactgaaggtagaaaagttggcataaaaaaagcacttgttttctacattggcaaagcacccaaaggctccaaaaccaattggatcatgcacgagtatcgccttctcgattcttcccgcaaacacaacctcggaaccgcaaagcttgatgattgggttctatgtcgtatctataagaagaactcaagttcacaaaaggttgaggctaattttttggctatggaatgcagcaatgggtcatcaccttcttcatcgtcccacgtggatgacatgctgggatcgttgccggagataaatgaccggtgcttcaccctgccacgagtgaactcactcagaacaatgcaccagcaggatgagaaattcgggtctccgaacatgggatccgggtttttctcggattgggttaactcgaccgatctcgattcgatttccgaattcgagtcgggttgccaaacccaaagaatggtgaattatgattgcaatgacttttttgttccttctctgccgcccttgggccatgtggactacatggtggatgcacctttggaggaggaggttcaaagtggtgtgagaacccgacgggtcgacgggccggggcattttcaaccgaatccagatacccgattgttaccgggctcaggtgacccattcgggtttgggtttattatgggtcagcaagttgggttcggggttagggagtgaagtgaaggatcagaaagtgtaattgtgtaaataattggggattttagtttaatttgaattctatgaccattgttatggtttgtgttattgattcccgcttggaaaggaaaaattgcaattttggtcatacttttcggctagaacaagatgaaggacggttgacacattatgaaactgagaaaggacgcaatggtgattgcaccacaaccacaacaatgcatgctgaaaagtaattgctttgtaagacattattgcctaaacatgaatcacgttgtacttcaaagcattaatacatagcaactattttccaaagtttagtttagaactttagatattggtatttttatttggctagtgtcccatgcatccttgtagacaacctgattaacatgtaatgaagatatgtccaccatttgctataaagttgtcttgcctcgctgattgtgaaaaaagtgagatcaacgtgtgaaatgaaccctccattttatgtatgaaacaaatggatttggattgatt

SEQ ID NO: 28585 - DNA, 1888 bp, Glycine max
  Clone ID: TF_GmC499_1
gcccacgcgtccgcccacgcgtccgacggctgcgagaagacgacagaaggggggggaaacaaaaacaaaacatttcgtccgaaactaatataacgtgttcctccttggaagaagccatagccataacatagccaccagaaaacaaaacccaccttagttattaaaagaaaagaaaactacataaaattaagctttgttcggtggtgaccatggggagcaccgactcatcaagcggttcacaacaaccgaacctgccacctgggtttcggttccaccccaccgatgaagagcttgtagttcactacctcaagaaaaaaacagcttctgctcctcttccggtagccataatcgccgaggttgatctctacaagttcgatccatgggagctacccgctaaggccgcgtttggggagcaggagtggtatttctttacaccgagggacaggaagtatccgaacggcgcgaggccaaacagggcggcgacatctgggtattggaaggctactgggactgataagcctgtgttgacctctggtgggacccaaaaggttggggtgaagaaggctttggttttctatggagggaagcccccaagagggatcaaaaccaattggatcatgcatgaatataggctaactgataacaagcctaacaataggcctcctcctggttgtgacttgggcaacaagaaaaacactctaaggcttgatgattgggtgctgtgccgaatctacaagaagagcaacacgcataggtcacccatggagcatgacagggaagattcaatggatgacatgattggagggattcctccatccatcaacgtgggccacatgagtgcgaggtttcatcatctttcaaagatgacgacagcctacaacaacggtgcattgttggaaaatgatcaccacaacttgttggaagggatgatgataggtaacagcaacggagggatgaacacaactactactactacacctggtcccatgtcatctcacttagggggatccaaggaagagctttcttttgttccaaccatgactcactcttcaaacacttctaagagaacactttcatcactgtattggaacgatgaggatgtggcgggtacctcatcttcgaacaaaaggttcaatttggaattaagtggggacaataataaccatggaagtgttgtgagggatgatcaagagaatggcactgcttcctctattgccactctgcttaatcaactccctcaaaccccttcattgcaccaacaatcaatattggggtcaataggtgatggacttcttagaacaacataccaaataccaggaatgaattggtatgcttagaacaatttcaggtttgttttaattattgatgaacaaggagatattgaattactataaagaaggatatatgatatgatcctcgatcagctggtggaaaccctacactattagattgtaatgattttaatgggatattgagattttggttgttaggaatttggaagcagttgttagagtttgatcatttagatgggcctcattatcatccaatgaagttcttcaaccattggagttagctgcaagcaataacaacaccaaaggtcaggccatgggatacttttagttaaactttaatatagctttatacgtatatatagatatttgctttttttattggtatgtaaataaaaaaatggtggtgtgctcttaattaatgtatacaaatattcaaatgagaaaagagatttcaactcctatttcgactcagctgttatatgcataccttgatcaattaggatacaaatgagctttgtgtggatcatatactgtagaagaacgatctattgatattttaattaaagccaaattggtgactatggtttgtcacgtgt

SEQ ID NO: 28586 - DNA, 529 bp, Glycine max
  Clone ID: TF_GmC424_7
ttcgatcttcttcttctttttcatcaatcatcaccagtggttcttttccttctgagaagatcgaattgtgttttgcaaaaatgggagttccagagaaagaccctctttcccaattgagtttgcctcctggttttcggttttaccccaccgacgaggagcttctcgttcagtatctgtgccgcaaggtcgctggccaccatttctctcttccaatcattgccgaaattgacttgtacaagttcgacccatgggttcttccaataaagcgattttcggtgaaaaagagtggtactttttcagccccagagacaggaaatacccgaacgggtctcgacccaacagagtagctgggtcgggttattggaaagccaccggaaccgacaagatcatcaccaccgaaggtagaaaagttggcataaaaaaagccctcgtcttctacgtggccaatgccccaagggcaccaataccatttggaccatgcacgagtatcgcctcccgtctcttcccaaagaaccctggccccaaactt

SEQ ID NO: 28587 - DNA, 589 bp, Glycine max
  Clone ID: TF_GmC79805_1
aaatccttatactatttttctcgggggctggagtatttctcttgaagcctctccaatttgccttcacttcttaataataataatatcctcttttcttgtaccaaaccaaattgatattttgaactcaatggaaggtagcacaacaagctctgaactccctcctggctttaggtttcacccaacggacgaggaactgattgtgtattacctttgtaaccaagccacctcaaagccatgccctgcatctatcatcccagaagtggatctctataagtttgatccttgggaattgccagataaacagaatttggagaaaatgaatggtatttctttagtccaagagacaggaagtacccaaatggggtgaggcctaaccgagcaactgtgtctgggtattggaaggctactggcacagacaaggcaatctacagtggatctaagcatgttggggtgaagaaatctttagtcttttacaagggtaggccaccaaagggtgccaagacagattggatcatgcatgagtatcgattggctgaatcaaaaataccatctagcaggaaaattggatccatgaggcatcaatactggg

SEQ ID NO: 28588 - DNA, 2344 bp, Glycine max
  unsure (1)..(2344): unsure at all n locations
  Clone ID: TF_GmC54821_1
ccacgcgtccgcatcatccaaaccaaatctctcccattcacaatcccaaattcccaattctctcttccttctccacaccaattgacaaaaccctaacccccaaattctccttcagcgattcatctctcttgaatcgaatcgatggcacggatgggcccagggttccgattccaccccaccgacgaagagctggtggtgttctacctgaagcgcaagatgaccggaaacctctcccgctacgaccacatcgccgtcgtcgacgtctacaagctcgagccctgggaccttccccctctgtcgaagctgaagacgaaggacttggaatggtacttcttcagcgcgctggaccgcaagtacggaaacgggtcgaggacgaaccgcgccaccgataggggctactggaagaccaccggaaaagaccgtcccgtcacccacggcgaccgcaccgtcggaatgaagaagacgcttgtttaccacagcggccgggccccacagggccgtcgcaccaactgggtcatgcacgagtataagatgctcgacgatgaattggcacgttccggcacagtgctggatgtgtttgtggtgtgtaggattttcgagaagagtggttctgggccgaagaatggggcaaagtatggtgctcccttagatgagaaggagtgggatgttgaggatgggacgaggatgaagaggatgagcagaaggaggtggctcccttgctcgttccttataatgcggtggctcctcctcctcccttgtcggcggttgctgataatgtggtggctcatcctcctttgctggcggcgactgctgataataattatctggtggctcctcctcctcctcccttgcaggctattgttgatggggcctatgtttcaaccgacgaccttgacatggaacttgattggagtggtataattgacagtgatactttgccatcattgaactttcattacggggagtgtagtagccatgctgagtattccaaagtattcatcaaggatcaggagccattggcagacacttttgaaatttcttgtcctgaaaatgtctggcctcttgatatgactgggcaacatggcgtgggtacaaattcaggggaagatggagacagtggtgagctgagcaatattggcaattttgatctttcatcgaataatatgaatctggatctttactgggatgccaacgagaatcttccgatggatgatgatggatttttggaatacaatgatattgcaattgggaatggggataatcctaccgaggctgatctttctgcaaatgccatgctagatgagtatgctgcactcgctgatgatgatatttacaagtatatatcttttgattctcctcagattcaagagagtgaaaactttattcccaaccaaggatcacctttcacccagcagaatgtggagggagaaaccgctgatagagctgtggttagtaatgagggttcttcagtgcagaatacacaggaggcaatgcttgcatcaggaagtacaaatccacttgttaagcaggcatatggatggttagccagcatacctgctgcgcctgcacatgctatggagtttcctgctaaggagattgctcttggacttcatcctgtagctcagtcttcccatccagctcatataactactacaggtatgatcagcataacagacattacttttagagacaatgcaatggattggacgatgggcaaaaatggagggtttagcactatcatatccactgggttttcgcaatccgatgttaattcggctgctttgatgcctgtttctggcaagactgcatttgtgttgtcacatggctggattttcctgactggtttctcagttcttattctttcactgagttgcaagatcggaagcatcatgtatactggtaaatgactacctgtggttggcggctactagagaataagcagcagtcagttaagtataatttagtgtttggtggtactcattgaatgactaggatcccgtgactttgtagattttttatatggtaccttagtcaaactgatctatacattcttcatcgtaacttatacaacatttttagagtgcctacagatagagtaatagtaatactgtcttcgataagattcgtaatatatattattagttcatactttcaatagtaatactagatgcaaagttctgactgatagaggctgtccattatttattattattaggttccatatgtaatttgattcacttggtaagaacaagtcatcgggtttttgtctgattgaggctgtctattatttattagttctctcgtttaatttgattcactnngtataggagcaagtcatcgggtt

SEQ ID NO: 28589 - DNA, 1452 bp, Glycine max
  Clone ID: TF_GmC625_21
ggctcgagagcaaagcaaagcagagccaacaacaagaagaacaaaaccaacatcaacaaccacaagaagaagaagcttgcaaattagaagaatcttcagttgaaagggaagaacacacaagaacaaagagaggaagaaacgcgaatgaagggagaattagagttgccaccagggttcagatttcaccccactgatgaagaattggtgaatcactacttgtgtaggaagtgcgcgggtcaaccaatcgcggttcccatcatcaaagaggtcgatttgtacaagtttgatccatggcagcttccagaaattggctactacggcgagaaagaatggtacttcttttctcctcgggatcggaaatacccgaacggttcacggccgaaccgtgccgccggaagcggctattggaaagccaccggcgccgataaggcgatcggaaaaccgaaagcgctagggatcaagaaagctctggttttttacgccggaaaagcccccaaaggagtgaaaaccaattggatcatgcacgaatatcgcctcgccaatgttgaccgatctgcctccaagaaaaacaacaacaacttgaggcttgatgattgggtgttgtgtcgaatctacaacaagaaagggaagattgagaaatacaacacgaccgcaccgaagatgaatcttgaaatgattcatagttttgagcacgagaacgagacgaagcctgagattcataagcttggaaatgagcaattgttgtacacggagacttcagattcggtgccaaggttgcacacggactcgagcagctcggagcacgtggtttcgcccgatgtgaggtgcgagagggaagtgcagagcgaccccaagtggaataacgatgattatgatctgggcctacagctagaaaacgcgtttgattttcagtttaattacttggacgataataacctttccgtcgacgatgacccctttggcactgttcagtaccaaatgggtcagctctcgcccttgcaggacatgttcatgtacctacagaagatgtgaaaacgatacgttttttttggacaagatgatgggacccgcaaatatctttattatttttttgtagtaaaagtcagcatttgtgtgcaattgcattgcacctaacattttgtggactaggccaagcttagtaaactattcttattctttgttctagagagatcagggaatgtggaattcggttgaaatgagctagtatttggattggatcttggtgtaaagagaacaaaaaaaaaaaaggagaaaaggagttaggtgttgcagtaagtaaaaagtaagccgaatgatggatgataggatattggagggttaatgagtaggtgtaaggaaaattcttgttccattgctattccagtatgattttttcatatattttgtaatataccaacttctgcttttcaattcaaaggaaacaattgaatg

SEQ ID NO: 28590 - DNA, 1473 bp, Glycine max
  Clone ID: TF_GmC625_20
ggctcgagcgcagagcaaagcagagccaagaagaagaagaagaaaaccaacataatcaacaacaacaacaacaaaaagcttgcaaattagaagaatcttcagttaaaagggaagaagaacacacaagaagaaagagaagaagaaacgcgcgcgaatgaagggagaattagagttgccacctgggttcagatttcaccccactgatgaagaattggtgaatcactacttgtgtaggaagtgcgctggtcaaccaatcgcggttcccgtcatcaaagaggtcgatttgtacaagtttgatccatggcagcttccagaaattggtttttacggcgagaaagaatggtacttcttttctcctcgggaccggaaatacccgaacggttcacggccgaaccgcgccgccggaagcggctattggaaagccaccggcgctgataaaccgatcggaaaaccgaaagcgcttgggatcaagaaagctctggttttttacgccggaaaagcccccaaaggtgtgaaaaccaattggattatgcacgaatatcgcctcgccaatgttgaccgatctgcctccaagaaaaaaaacaacaacttgaggcttgatgattgggtgttgtgtcgaatctacaacaagaaagggaagattgagaaatacaacacaggcgcagcgaagatgaatgttgagatggttcatagttttgagcacgagaacgagacgaagccagagattcataagctaggaaatgagcaattgtacatggagacttcggattcggtgccaaggttgaacacggactcgagcagttcggagcacgtggtttcgcccgatgtcacgtgcgagagggaggtgcagagcgaccccaagtggaacgatgatctggacctaaagctagaaaacgcgtttgattttcagtttaattacttggacgataataacctttccgtggatgattacctttttggcactgttcagtatcaaatgggccagctctcgcccttgcaggacatgttcatgtacctacagaagatgtgaaaactgaaaacgaaacgttttgagcaacatgggacccgcaaatatctttgttttattatttttttaaaaggaaaagtcagcatttgtatgcaattgcattgcacctaacatgtgatgtgggctaggccaagcttagcaactattcttattctttgttctagagagatgagggaatgttgaattcggctgaaatgggctatttggattggttcttggtgtaaagaaaaaatgagagaaggagattaggtgctgcagtaagtaaaaagtaagtgagcaaattgatgataggttattggagggttaatgtgtgggtgtaaggactcacttaggaaaattcttgttccattgctattccagcatatgattttttcatatattttgtaatatacaactttctacttttccattcaaaggaaacaactgaatgaaaaatcttgctttcc

SEQ ID NO: 28591 - DNA, 706 bp, Glycine max
  Clone ID: TF_GmC705867_1
gaaactaattgacacttgagttttgatttatatttattccacaaataacacccggatcacctcgagatagaggttagtacaaaaatgtataaaatcaatgctataatatgaccctaattaacaagcccaccaaaccaaaacaaaccaaaccatcctcaccaattaagtataataataatcagaaaaacaaaagttaaatctcttaataacagttatatggcaaaggtataaatattttattatatgatgaaatgtatgtatatatatatatatatatccagctcccaagttattcaccaccaatctggcctgccattagatcttcaaaatatattagtttgtaaatgtaacatgtgacacttcttcactaccaaccattgctgcattagaagaataccatgcatcttctgtaatgaactgcatccatgaatcatctttgtcctcctcttccaagcatgatgatgatgcccctggtatgtcaggtgacatggtttcacactcattaattatggtttgggagctttcaattagtgatatattacattgtccttgctcttcaatatcagaacagattccatttttcttgaacacacgacacaatgcataagtatcctgtaatccagtggtgtcttcacactctttgtcatcaaggcgatactcatgcattacccagtcagttctgatcccttgaggagctcggacgcgt

SEQ ID NO: 28592 - DNA, 990 bp, Glycine max
  Clone ID: TF_GmC2540_9
gaataataaacagttgcttcttattagaaaatttatgagcccatacacaaaacaaacttccatatacacagatcatgactagaaggatatataaagatttttttttttactgcctacggggcttcacaattaatttcttacactattgaaggttttgagcaacttgtagtctaactaattaggaagcttcactggtagcaggagagggaggaccagtcacagtgccattctccattgtgaaatcaatgacaatgggtgtctcatccatagcttcttcctcactgctgctgctgctagaggtctccccttcagacctttttgccttctttccctttcttccttccttcttcgtcttgaatatgcgatacacagccatagctgacaccatggaaggatgcgatttcgagacgaggcgaaattcatgcatcacccaattcgatttggcaaaaccattgcccttggcttcccagaaagccaaaacgttctttcttgcaacaacctgttctttagagagctcaaaatcttgagctttctctattgttctccattgaccgttcccggcttctctcttgttgaggttttcgaacacacgggtcctcaaatcatggaagaaaaacctctgccaattcaaattcttactaccacctcctggcagctcccaaggcactgtttggtaaacatcacagtcttgaatgaggtcattaggggatggttgggccatgatcctcttcctgagatagtaaccagcaagaatttcatcacttggatcaaatctgtatccaactgggagcttgtaggtcttgccttcaatcgggtttaagacttccatctcaaagacctttgcctttggagaagaagaagaagagaagggaagggacttgttgtctcagctcttagagtgaatcactgtggcaaggcatgatgtaaggaatttaatttatagatacaacaagacatgcagagtgatggatgtgtctgataagagagagc

SEQ ID NO: 28593 - DNA, 1641 bp, Glycine max
  unsure (1)..(1641): unsure at all n locations
  Clone ID: TF_GmC5673_1
ggctcgagaagaaattctaattaaaaagcaaagtccgatatctttctaactatatatatatatataggcgacaccaacctttctacggctgcgagaagacgacagaaggggataccttaatatttcaaatacccagagggagtaacctctccaagcttcaattatctacattatccacattccttgctagctttatccacatctacaaaatagtccttagatttccctctctctttctctttataactgtgccatatcttataggatctcctttcacttccttcaaaaacaacaaaatcatgggtctgagagacattggtgcttcactgcctcctgggtttcggttttatccgagtgatgaggaattggtctgccattacctctacaaaaagatcgcaaatgaggaagttctgaagggtaccttggtcgaaattgaccttgcatgcgcaataatattaatgcacgcagaggtggctaagctcaatgcgaatgagtggtacttcttcagtttccgggaccgcaaatatgctactgggtttcggaccaaccgggcaactacatcagggtattggaaagctacggggaaggatcgtaaggtggaggatccagccacgcaagaggttgtagggatgaggaaaacactggtgttctacaggaacagagctccaaatggcatcaaaacgggatggatcatgcatgagttccgcttggagaccccacatatgcctccaaaggaggactgggtgttgtgtagagtcttccacaaaagcaaagaagatgacaacagttccaaactcctacagtatgagacgacaccatcatccctaactttgttggcttcgtcatctcccaccaaccaagccatgcctcatggtgttgggtataataaccgacttgccacctctttctctaattcattcatgccaacccaccaatatcatcatcacttcaaccctacccaaaacgctaattctttgatggatctccttcacttctctcgcgaaaccaacaccaacaatactggctttcttactcaaattggtgccaaaggtgatgacgaatatggtttcttatgggacatggatctagaagaaaatagcctagatgatggcgtggcttcaaacttggacgcaataagattcgaggttgataataataatactaataacaacaatatggtattgctataattaaatgtgtaagatgtgttatgtgtgtacatatatacacatatatgttattcatagctcgtaaattgtcgtaagattcgtttatttgtggtgtatttatggtgcttcgctatgaggggcatgtcacatgatagattgggtttagttgttacaagtttgtgtggtatattgttcaagtagtagggtaatactattgtggtccattaggcttttcgtaatcaattactattatttacccattattattgggaactattcctttgtatacagtttgtatatgtaattagaattggctataaaaaaaaaaaaaaaaaaaacccaaacaaaaaaaaaaaaaacccccccacatataagaaaaaaaaaaannggccccccccataaaaaaaaaaaaggggggggcccctttaaaaaaacaaaatttttttcccgggggttggaaattttttttttt

SEQ ID NO: 28594 - DNA, 804 bp, Glycine max
  Clone ID: TF_LIB5119-023-A1-PF1-B5
cataagtacaatccttccgaaagaatcaatatgcatgccaaaaggttgtgcctatataaagaacataagcccttgcaaattagtagtcatgcaaccatgacaacaaattaagaaccaaagctttgtatatagctagattttttaaggagagctagatgaacagtaataaagtatatttataagaggagaaatagtgttgaagaaagtgctctcaaactacctgggaggtcccaaggttcacacttgttgagatcaacaactgctatagctttggatgtgaagctagaatcataaaccttccttgtaagataacatgtgatgagctcttcatctgtagggtggaacctaaatccgggaggcagattttcctccatcagattgatgaaaccaaccagcagattttgatacccccttgaattgaagaagtttagtttaccaaaaactgaagagggagcaccacaaatatatgagaagtaccaatgagttgtcctcacagtaagctcaatacatcaccaataagagcttttaaaggcctctttactttatggttttataactcacccttcaacaagaagcatttcatagatagccttcttcatgtttttgttaaatatacagctaaccctttgacaaacatggtatcatatcttaattaaactttttttttcctttttaaatattactatgtagcttcagctataaagggtatagatttcccaaattgatgcttggatttacttatatttactggacaaaccaagaattaggttgcgaccttgactctactggaaaaaaaaaacaaaa

SEQ ID NO: 28595 - DNA, 772 bp, Glycine max
  Clone ID: TF_LIB4392-037-R1-K1-F9
gttttcttctaccaagctagcctagcttcttcatctccttcaatttgtcttctcttcattaattccaattgtctttaaaccgctatctcatcagtaccagtaattgctatcatggagtcgatggagtcatgtgtcccaccagggtttcggttccacccaacagatgaagagcttgttggttattatctgaggaagaaagtttttttttagaaaattgaccttgatgttatcagagagatcgatctatatcgtattgaaccatgggatctccaagagagatgcaggatagggtatgaagagcagaatgagtggtatttcttcagccacaaagataaaaagtatccaacagggacaagaactaatagagctaccatggctgggttttggaaggcgacaggaagagacaaagcagtgtatgaaagagcaaaacttattgggatgaggaagacccttgttttctacaaaggaagagcccctaatggacagaaaagtgattggatcatgcacgagtataggcttgaatctgatgagaatggacctccacaggaggaaggttgggttgtgtgcagagccttcaagaagaaaaccactgggcaaacgaagactataaatattgaaggatgggagtcaagctacttctatgacgaagcaagtggggcaacaagcactctggtcgatccaattgaactcatttcaaggcaatctcagagctttctggctcataatttcatgtgcaagcaagagctagaagcagataacttgacttgcatgc

SEQ ID NO: 28596 - DNA, 1397 bp, Glycine max
  Clone ID: TF_GmC1208_1
cacccctttctttctttcttcacttcattccccttatcctctcttcagttacacacattctcagcaaaactttgtgagcattgtctattgctacatgcttatctaatcttgttacagggcttaaaagtgtgtgatgcaagcaatggagaacattcatcagagggaaatattggaagagcaaaggtttgaattgccaccaggattcaggtttcatccaacagatgaagaactcatcactcactacctctcacagaaggttcttgatagctgcttctgtgccagagccattggagaggctgatttgaacaagtgtgaaccatgggatttgccttggatggccaaaatgggtgaaaaggagtggtattttttctgtgtgagggacagaaaatacccaactggtcaaaggactaatagggccactggtgttggctactggaaggcaacaggcaaggacagagagatatataaggcaaaggcactgattggaatgaagaaaactcttgttttctacaaaggaagagctccaagtggtgaaaaaactagctgggtcatgcatgaatacagattagaagatgaacattctgtgcacaatccacccaaaaaggccatgaatgattgggccatctgcaggatttttcagaagagtaatggtgggaagaaaatgccaatttctgggttggtgagattcagcaattttgcaaaggacatgccttcattgatggattcttctccatacaacgacagtgaatcaaaacctgttttgggggagtcatcacagccaacatgcttctctgatccaaaccaaagtgaggaccaaaggacacaagatgaaaacatagcggatagctatgaaactctcatgttggcatcttcatattcttcaaacccctctgatatttcccctgcctcatggactttttctaaatctgcccctaccgtgtcccaccaatcactccaagttgggaattcacacagctcagattacttcatgcttcatcaggaacagtccatgttggggatgttgattgaaaaccatggagcaagtgctggccaaagaactcagaaagctcaggatagtaaaggctctgatgctgacatgtcctctgtgatgtacaacaactatgaaatgttccaaagatcatttgggaaccaggaatattcatcaccttccgtaggacatgtgtattctagtggcctatggggattttaaagaaggttgaaggatacactatatgcagattaaaattagagaaactttagggattaaatgctattatacatgtaaataaattgctcttaagctaatgttatcctacaaagtacaggaaatggatgttacggttttccaaagttgtatggcttgacagttttatattatattagtaaatttttatagt

SEQ ID NO: 28597 - DNA, 287 bp, Glycine max
  Clone ID: TF_LIB3242-501-P1-J1-E5
gagctggttccgctgattgtttcagccagatgatgtcgtcgatgccgggtttttgcttccatcccacggatgaggagttggtgatgtactatctgaagcggaagatttgtgggaagaggctgaagctcgacgtgattcatgaaaccgatgtgtataagtgggatcccgaggatctgcctggttagggtaccaatcgttgacttgggtttgcttcaataaaggcaatctatattgaaaacgggagataggcaatggttcttttctttgacctataaataggaaatatc

SEQ ID NO: 28598 - DNA, 362 bp, Glycine max
  Clone ID: TF_uC-gmropic088h01b1
aacggacggaatctgaagcctgggggcaattcaagctctgatgccatcttactcagatatatatccctccctagctacagattccatccaacggacgaggagctggtgttgcactatctctgccgcaaatgcgcgtcgcagccaatcgccgttcccatcatcgccgaaatcgacctctacaaatacgacccctgggacttacccggattggctacttacggagagaaagagtggtacttcttttcaccacgggaccggaaatacccaaacggttcgaggccgaaccgggcggctggcaccggttactggaaggcaacccgggcggatagcccattggtcaagccaaccggttgggataaaaa

SEQ ID NO: 28599 - DNA, 1085 bp, Glycine max
  Clone ID: TF_701123582_FLI
gatctcccaccaggttttcgattctacccaacagaagaagaattagttttcttctatctacacaaccagctagaaggccaaatacacgacacaagcagagtcattccagtcattgacatcaatggcgtagagccatggaaccttccatcacttgcaggggagctttgtcgtggagacacggagcaatggtttttcttttcaccgagacaagagagagaggccagaggaggcagacccaacagaaccacagcaagtggttattggaaggccactggttcccctggccatgtttactcttctgacaacaaagtcattgggatgaagaaaaccatggtcttttacaaagggaaagctcccaccggaaggaaaaccaaatggaagatgcatgagtataaagccattgaacactctgatcaatccaacactgcccctccaaagttgaggcacgaattcagcttgtgtcgtgtttatgtgatatcgggaagctttcgatcgtttgatcgacgcccactggatatgccaagagttgagctacgagttgttgatggggacagaggtgctgcttcaacaagtgctcaagctcaacagagaagttcttctcatacttcccactctggtggtgatgctcatgtcacagatgctggagcagggtcaagtggaacaaattggaatgcaagtaatagggttgaggaaccactttgggaatgggaacaacttgattggccatgacccaaaagtcaagaacatgctcaaacctagcaagactttcttaattgaataacgtcgtttcaattaaattaatcatataagttgtaggcgtagtttggttcgatttccttcacctcgaagggccatgtaatgtaacataatcattagtatttgttgtttaacataggattggttttccccgggaaaataagttgggaataagatccaagcataaaaaggaaggtggtgtggatcttgtaattttgtttttgtgacttgttgtcttgtaacgataatcaatctccttttcaaccctagaaattttctttcttgtttaggaattcaaatgaaattaatcaatctactatttgcttatg

SEQ ID NO: 28600 - DNA, 1228 bp, Glycine max
  Clone ID: TF_GmC5683_1
aattcgccacgcgtcccatcggttttaaaaagtactttggcgtgtggttggaaacaaataatagagaaaataaaaaaatgaatgttaaggtgcatagctctgatgataccaagaaggatgaagaggttgtgcttcctggctttagattccaccccacggatgaagagcttgttgggttttatctgcagagaaaggtggacaaaaagcctctaaaaattgaactcatcaaacaggttgatatctacaaatatgatccatgggatcttccaaaggtgaattcttttggggacaaagagtggtattttttctgcataagagggaggaagtacagaaacagcgtgaggccaaacagggtaactaggtcagggttctggaaggccacagggattgacaagtccatatattgcgtgaaagaaccccatgaatgcattggcctgaagaagtcattggtctattaccgtggaagtgctggcaaaggcaccaaaactgattggatgatgcatgagtttcgccttccacccaatgcaaaatccagccccaatgatgttcaagaagcagaggtgtggacactctgcaggatattcaaacgcatcccatctttcaagaagtacgctccaaacttgaaagactcaacaccagccaccaaaccaaaccctgtgaattccaacgcatccaccttagattctgacaattgctgcaagccatatttgatttgcagagaccctatgatgatgcaacaaatagaaagaaaaccagttattggacaagttgatgaaaagaaacacttgtttttgggccaatttggcccactatcccatcttcaggccccatcaaccaccccttacccaaatttttggaaccagaataatgttgaggaccacgcatttgccaatgagaattgggatgacctaagatctgtggttcagtttgcaatcgatccatccacggtgtttgattgtaccgaaacatatattccaccctacttttcttagggttggagtgagtaactttggtagatatgttatatatgatgtatgaacatatatagaggttataattgtcattattcttacagttttttaatttcttgtatgagaacacgtatatgttgaaatttgctggttttactagttttgttgtaaaacctaatattgacttgtatcttgtcatttttatcccttttccattgattgagtcaataaatacgtttataccttgatttatcaaa

SEQ ID NO: 28601 - DNA, 1691 bp, Glycine max
  Clone ID: TF_GmC389_1
aattcggctcgagacgacttaacccataatagttcttaaattcacatgtataatcgcttcatcgtcaaacagtcacttctcaccgtcactttagcagtctcttgcggtggcacaaactgtatcacgtttcaaaagactaacttggtgaccggtgaggtgttcctagttaccatacgaaagaggattttggtgtaggatgggatcgatagagaacgcttccaaaccaaggaaggaaaatccgaaatttgaattgccagcgggttttagatttcatccaacagatgaagaactcataaatcaatacctcacaaagaaggttgttgacaactgtttctgtgctatagccattggtgaggttgatttgaacaagtgtgagccatgggatttgcctgggttggctaaaatgggtgaaactgagtggtattttttctgtgtgagggacagaaaattcccaacaggtataaggactaatagggccactgatattggttattggaaagccacaggaaaagacaaggagataataatggagaatgcactcattgggatgaagaaaaccttggttttctacaagggaagagctcctaaaggtgaaaagacaaactgggttatgcatgaatataggttggaagggaaacataatcaacccccccctgcaaagagtgaatgggtgatttgtagagtctttgagaagagtcgttgtgggaagaaaatgcatgttccaaagtgtgggaggttcaacaacccctttggagaggaaccatcatcaggtgcttctctattgcctcctttgatggattcttctccatacaacagtgaaacaagaaccaccactgctggggagttgtctcaggtgacatgcttctctgatccaaatcaaactgaggatcagaacaacacacatgatgacattgttgatagcatggaaactcctattttgaacttctcacccttttcaaggcctgatgatgcatccactttggccaaagcaaccctttcttcagcctcaaaccaatcagcacagattgcacaccaaattggggactcacagttcccagattattgttatgcgcctcaagaaccgtccatgttgaggatgctgatggaaaaccatgaaccctgtgcgaagcaaactcagaaagaagagtttcctgagggaagagactttgatggagatatctcatctatgatatacagcagtgacatgataaacagaatgtttgggaatcaagaacattcttcatcagcttctgcagggcctgtggacactgatttcctatggaattactgaaggttaaggaatattatttagtgttaagacagaaaatatgttaattatatttatattcatatgatacatacaggttggttacctgcaacttcatgaacttattgtaggaattatgggaaatgcatgaaattgaatttcccccctctggttgataactttgataaaaactagtgctgaatagtccatatgttatatatgatctgttaatctttattttcatcattgcagcccaattacaggttgttaccaccaccttttcttaggacttgtttgtgcaacttttgggttaccatctgctttagataatgtggtcatattcatagccagtttactcaagataatgttaggggtgatttattttaaatcaatttaaagttaaatatataatttgctctttttg

SEQ ID NO: 28602 - DNA, 402 bp, Glycine max
  Clone ID: TF_LIB3242-161-Q1-J1-A7
ggcttgtggtcaatctgagctacaacaacgccgaaaccaacgtactctcatattacaccttaaacgacatcgacggaatcacgctcattatgactctgggccggcttttctccttcgtcgtgctcaaactaatgactgtgggcatcatctacattcatagattcttgcgtgcatacttgacccaaactacatatctcacatgactagcttgcggcgcattacctacttacgacgataaactcgctgaggaacgatctacatgttattgttgagatggatctgtacaaaacgtatccatgtgacatacatgatacgagcgagctatgctatgatctgaagaacgaatggtacttttttatccataaagacacgatttgtgctacgcggacacgaactaacaag

SEQ ID NO: 28603 - DNA, 356 bp, Glycine max
  Clone ID: TF_LIB3092-046-Q1-K1-D7
cccacgcgttcgcgcgaatgtttgtagaattttagacgccaccagggttcaggttttatttgactgattaagaattggtcaatcactacttgagaaggaagtgcgcggatcaaccaatctcggttcccatcatcaaataggtcgatttgtacaagatatattcatggcatcttccacaaattgactactactgctagaaagaatggtacttcttttcttctcgggatcagaaatactcgaacggttcacggcctaaaccgtgccatcttaagcggatattggtaagctcacccgcgctgataagccatcggaaataccaaagcgctagggatccaataatgctttggttttttacg

SEQ ID NO: 28604 - DNA, 1614 bp, Glycine max
  Clone ID: TF_GmC388_1
ccgggctagacacgaatctctgtgcatgtattttctcactacaaaagcacactcactctcctcctctcgcctctttccttctttctttctcccattctcctaaattcctccaaaaaccctaacactctctcattctcagtttttctcaatcttatgattaatggaagaccacgcgcatgctgcactacctcccggttaccggttctacccttccgaagaggttctcgtcggttactacttaaccaagaagaacgagaaccgggaggagggtttctacggttctgatttgatcagagaacttgacctctacgatcacgatcccttcgaattaccggacgctgctgcttgcttttcgtacggttacaaagggaggaagaagcattggttctgttacgctaaagagaccaaacgcagaaacagaagaaaggtgaaaagcgggttctggctccggaagggaaaggttcgggatatttccgaccacaacggcgacgacgtcgttttgggcacgaggacgcgtttcgttttctacgtcggcaattccctgaaaaacgctgccagaaccgattggattttgtacgaatacgcattggttgatcgctttctggcttcgtttgtgctttgtcgtgtggtgaataagcctcctcataagaatagtccgtcggagatcggtctgagttgttgtgctgaggagagtgttgtggcggtggtgcgtcacgttggtgttcagtgtgatggatgtgccgaaagtgatgttgttgaagctaaggtgtgtgatgaaggctttgttaatagagagaatgagattgctgagaatccaattagtggtgaacatggtgatccagctgcacctgtttcagttgctcagggaagtcatcaggttcaggaaaggctttctaaacttcccagtggcagtgcattgttcgtaggagctatgacatctcagcaacttatgctttccattctagaggaggatttcatagaattggatgatattgcatgaattgattggttttaagagattttgtgaattctaatactgctctgaggagtaattatcacctgaaacaattgtattcagaatggattattgacccagctaaaggggagaaagatttatgataatgagtagctattattccactcaaacgaagaaacatactgtcgaatggggttgaggcaaatgtcatgaaatgatcacttcgcatgttaagattttctcctgtgcctactgcagggcaattggctccagagggatagagttagagttagatattggtattggtaattggaatatgcgatttactctagtatgctatgagcaacttcaccgtacttcatgctttcattgttcccttgatcgacctgttcctatttaaatttaattagcattcctgggatcatcagaatttcctatctgcaccttagtagcaagacctatttgttactgtctgtgctactttctttttcctatattgttcaagaggagaatcagatgaattccaaattgtaagtgttacaacataatgatagtttatgaattgacttaacctttatacttttgaggttatgctgactaattttatgttcttcatggtatttttgtttggataaaaa

SEQ ID NO: 28605 - DNA, 748 bp, Glycine max
  Clone ID: TF_GmC572_1
ggctcgagaactaattcaataacatagaagaatatggaagatggaagcgtcaaccttcctcctgggtttttcttctctcctactgatgaagaacttgttcttcactttctctattgcaaggcttctctcattccatgccatcctaacatcatccccgatctccatccgtctcagcttgctccttgggaattaaatggtaaggcgttgttaagtggaaatcagtactatttctttaccaaagtgaatgaaaacagagccagagaaaatgggtattggaaggacacaggtgtcacggaacctatattgtcaacctttgataagaaagtgggaatgaagaagtacttggtgttccacataggtgaagctccacaaggtactgaaaccagttgggtaatgcaagaatattatatatgttcctctgggtttgacactgcctcatatcgaagtgctaggagaagaagaaaacatgatcaaagttggagcaagtgggttttgtgcaaagtctatgagaagatcaggtctcaacaaggtgtaaactgctatagcgatgatgatgacagtggatcagagctttcttggctagacgaagtttatctgtcgttggatgatgatctggaagaaattggcatgcctatttagattgaatgtatactacccaatgctaatatatatatatatatatatatatatatatatggacttgtatattaattactatgtctcaattaaatacgtgcattgtttgaac

SEQ ID NO: 28606 - DNA, 824 bp, Glycine max
  unsure (1)..(824): unsure at all n locations
  Clone ID: TF_GmC473_3
caactagagaattaaatttagagaaaaaaaaaaaacttggttttatcttctttgttattattatattcacttcttcaatatcttggttctttgatattattattcgattgagcaaaaaatgggagttccagagagagaccctcttgcacaattgagcttgcctcctggatttagattttatcccactgatgaggagcttttggttcagtacctttgccgcaaggttgctggccatcatttctctcttccaatcattgctgaagttgatttgtacaagtttgatccatgggttcttccaggtaatttatttcatcatttatcataaaaaaaaatctaaaaacgatctttaaccacgatttttgtcacaatatcaaagtttttagagttcgcaatcacaattgcgaccgcttagatcacatttgtcttcaatttcttgccatattaaagattgtaatataattgtagttgtgattacaacggtaatttaaaaaatttataaccttggttaatgtctatttgcacatgcacaaaaatgaggactactagtattattattattatgtttttaattgaatgtggttatggtggtgtaggtaaggcagcgtttggagagaaggagtggtacttcttcagtccaagagacaggaagtacccgaatggttcacgaccaaacagagttgcgggttctgggtattggaaagccactggaactgancaaatcatcaccactgaaggtagaaaagttggcataaaaaaagcacttgttttctacgttggcaaagcacccaaaggctccaaaacccattggatcatgcacgagtatc

SEQ ID NO: 28607 - DNA, 726 bp, Glycine max
  Clone ID: TF_GmC195_5
ggtcgaccacgcgtgcgccactcgttcgccacgcgttcggattctttatttttatttattaattgttactgtgttactgtacaggattggctacttatggagagaaagagtggtacttcttttcaccacgggaccggttttacccaaacggttcgaggccgaaccgggcggctggcaccggttacttggttgcaaccggcgcggattagcccattgtgtatcccaaaccggttgggattaaaaaagctttggtgttctcgagccagttggtgttagtcttggtgtagtgtagctagggagggatatatatctgagtaagatggcatcagagcttgaattgcccccaggcttcagattccatccaacggacgaggagctggtgttgcactatctctgccgcaaatgcgcgtcgcagccaatcgccgttcccatcatcgccgaaatcgacctctacaaatacgacccctgggacttacccggattggctacttatggagagaaagagtggtacttcttttcaccacgggaccggaaatacccaaacggttcgaggccgaaccgggcggctggcaccggttactggaaggcaaccggggcggataagcccattggtcagcccaaaccggttgggattaaaaaagctttggtgttttacgcagggaaagctcctaaaggggacaaaaaagcaattggatcatgcacgagtatcgtctcgcagacgtagat

SEQ ID NO: 28608 - DNA, 1902 bp, Glycine max
  Clone ID: TF_GmC160_1
gagccactggtcgtgcttggcggagatctgtgttgttctctccttctcgcgcggaccctcacaattcggcacgagggccttcaccttgactttggatgggtaaataaagctacatatcatacatagcgaagatgtgtgttgttctcttcttcttgtgtgaagccaaagccacaacaacaaccattggaacaacccaacaacatagtgaacaacaaccttggtaataataaccatggagagcaccgaagactcatccacgagttcacagcaacaaccgaacctgccacccgggtttcggttccaccccacagacgaggagctcgtggttcattacctcaagaagaaagtagattctgttcctctccctgtttcaatcatcgctgatgttgatctctacaagtttgatccatgggaattaccagccatggcatcgtttggggcggaagagtggtactttttcagcccgagagaaaggaagtacccgaatggcgcgaggccaaacagggctgcaacttcagggtattggaaagccacgggtacagataagcctatatgtagtggaactcaaaaggttggggtgaagaaatctttggttttctatggagggaagccaccaaaaggggtcaaaactgattggatcatgcatgagtaccgtgttactgaaaacaagcctaacaataggcctcctgggtgtgacttgggccacaagaaaaactccctaaggctggatgattgggtgttgtgccggatctacaagaagggcaacacacaaaggtcacatgagagggatgattccatggatgacatgattggagaagtacctccttccatcaacgtgggccacatgagtgcgaggtttcacctttcaaagatgtccacgagctacagtggtgcattgttggaaaatgacagaaacacgttagaaggggtggttataggcaatggtagtgtgaatgggatcagcaatactaataatattacaagtgtcatatcatcatctcatcagtttggcacctcaaactccaaggcagagcttcttccttttgtcccttcaaacaacacttctaattcggcctccaaaagaacactctcatcactctattggaatgttgatgatgataatgatgatgatgatcacaaacacttcaatttggacagtaatgggaatgtgagtgttttgaggactgaagagaataataataatactaatggtacttctggctcctttgccactctgcttaaccagcttccacaaacaccttcattgccccaaatagatgggttacttcgaacaccatatcaaatacaagggaccaattggtatggttaactccattttgggggatacgtacgatatgatatgataatttcataattataatgcacaaggagatccaattgaactaaggtgtggcaagggatatcttcaacttgtgctagatcgcaaggattttaaaagggtcattgagattgtggtttaattgttaggagaatggaagaatgttagagcacactaatcaatgttttctttcaaccatttgcaggtagctaagggcaattaataccacatgaggtgagggtgtaagaccttggaacttttagtttaattattatatagatcggtatagtaacatagataaagatagatatatagaagcatatttgcttgttttattagtgtgtaaagaaacaaaatgagggtaaaaactttcgagagaggataaaagaaagagttagccacagttctatatatatatactttgctttatgatacagaatgaagagtatagaaaatatacttcagaacgatataaattgatgcaagattttaaaatatgtatattgattgtatttatggtttgtctatctataacttgttcatgaagagcttgatattaatct

SEQ ID NO: 28609 - DNA, 476 bp, Glycine max
  Clone ID: TF_jC-gmfl02220079g06a1
ggctcgagctcctttcttagttgctacttctgcatctccccttcccttctttcattctttgtcacaaaactacaaagtcactgagtttagtgtttcgccaaaaccaatggatgatgatattgtaggactcggttttcgtccaacagaagaagaacttgtggacttttacctcaaacacatgttgctcggcaatgatccccgtgcccacgtcatccctgtcattgatctttgcgatgtggaaccttgggatgtaccagccctgttgatttcaagtattcaagaagtaaaaggtttaacaggacaaccaagtgtggcttctggaaagccactgggaaagaccgtgacattaggacaggggacactaacaccgtcattgggactaagaagactcttgtttactatcaaagccgtgtttcctgtggtgtcaagtccaactgggttattcacgaatatcatgctgttacctttcatgaaag

SEQ ID NO: 28610 - DNA, 2476 bp, Glycine max
  Clone ID: TF_GmC434_3
gaaacacagtgagttaagtgttcacaaaaaacaatggatgatattgtaggatacggttttcgtccaacagatgaagagcttgtgaagttctacctcaaacacaagttgctcgatgatgatccctgtgtccacttcatcctcgacgttgacctttgtgaagtggaaccttgggacttaccattgttattagcagattcagctgtgcgattcaatggccgtgaatggttcttcttcagtcctgtcgattacaagtattcaaatagtaaaagggttaacaggacaaccaagtgtggcttctggaaacccactggaaaagaccgtggcattaggagcaaggacaccaacaatgtcatcgggactaagaaaactctagtttactatcaaggccgtgtttctagtggtgtcaagtccaattgggttattcatgaatatcatgctgttacctttcatgaaagccagaggacttttgttttatgtcgcttgatgaagaaacctgggaaaacaactgaaggtggaactgatgcactgatctgtgatgaaggggggcccagtagaagcatggtttctgactatgaaaatcaggcaacaacacaaggaattccatctgtaagctgaagcatccttcatggacatattttacactctgccatgtgaaacatgctaaggagatataagggtggttggatgattaagatagaagggaatgggggaaaggtcgcgggttcgattccccagctaacaaattaacaactaacatttgccgataaaaaaaaatgtgaaacatgctaacaactgattcttgattgtgtgtatattttttttttttcagggaggtacttttacaggaatggaaacaacctttcagggaatgcatctggctgagaaatacttctccccaacacaacagtctcccactggtattgagcaggaagaaccatcctttacaaactatccatttaacaatgcctattttagaaatgaagacaactttatgcagactccatttgaaactaaggaggaagatgcgttcctgaattcaatttttgttgatgagaatttagttatcaatgaagaaagtatgcatgcttttgtcaatagctccacccaatcagagtcattgagaagggtatattgtgaaagcagtgatacagatgctgaagtagtctctgaaagggtaaagaaatattgtccaaagtccaaataatattggggagcagatctccatttgtttctgaaccgtcatattggtttattaagttaaaattgcaatgtgcattgtggcgatgtaaatttttgctacattttttcaatgtttagtgattttctactatatagtctgaaagggaactctagtgaaatatttggtttgagttggttttgatgctttgttgtgagtcatgattgattcacggaacattactgagttagtgaatgcttggacaaagggaatatttgggataggaaataaaatgtcgataaagcaatctctttctataccaatttttacccttccttgcatctcttccctaaaataaactttaggtcttcaaaactactcttttcttgggtttgtgatatttttttattttattttgagcacttcaagaattgaattcgtctgtttgtcttctgaaatgatcacaggatgataatattgttgatgtttcaacaatgtgcaacgaatatcctaattcagacggatactattcatcagaaaggtttgaatcatcacatggtgctgtccaagatagcttatgtcttctatctactaaccacgaagcaaaccaagagacaatggaaagtatactccaaaataatttctggggaatggagcaatcctattgtgactctactgcaaataaacctttggagatcaattatactgaaatttctagttctccttccactcggaggagatggataaatcagtatcatccaagaccagactacttcacatcccaaaagactgatgaagatctgagacacagaggaaggtttcaaacaatgcagtatcgcatgtagaggctcagaaggaattgctcattgtaaaatcagaaaaatgctcaaaatactagttcaagagagaacttagaagccagaagccatcatcctctgatgacaataggaaaggttctttcatctatgtgaagactgaagattacttcatcaagccagagcctatttccatgcttactatatcttgtcaatttaatggtagggattttgttgttaatagtcataagattggagtgggaagtattatcatgttacaacttcgaaatacaagtactatgcatgaagggcttgtgagtgtgtcaccatggttccttttcatgtagtgctactacatggcaagctctgttttaggaatttcatcattataagataggtgaggcttatagttcatatgtattttgcaatgagttatcctcattgcttctttcttatcataatgaaatatctctgcttaccattt

SEQ ID NO: 28611 - DNA, 1150 bp, Glycine max
  Clone ID: TF_GmC36703_1
aattcggctcgagtttcactccaaaccttccttccttccttgtttgctccaaaaaatgggagataacaatgtcaacctcccacccgggtttcgcttctaccccacagatgaagagcttgttgttcatttccttcaaagaaaggcaaatcttcttccttgccatccagatgtcatccctgatcttgaactctacccttatgatccttgggaacttcatggtagagctttggcagagggaaagcaatggtactactacagcagaaggacacaaaatagggtcactagcaatggctattggatgccaatgggaatggaagagccagtgatttcaaactctagcaacaagagagttggcatgaagaaatattatgtgttccatttgggagaagcccctgatggcaacacaaccaattggataatgcaagagtatcgtctattagattctgcttcctctagcatatcatccagaagaagatcacaacctaaaccggaccataataaatgggtgatatgtcgagtttatgaacaggataacgatgatgatggtgatggtacagagctctcttgtttggatgaagttttcttgtcattggatgatcttgaagaaataagtttgccaaattagatgattatgcaagtgatctagttagctgcattttatatccaaataggatattagtttaagctaattgttgttatcattattattaatattgttatttactggttgtagttaaatgcattagcagtttttagctgccattgtaatcagtgaagtcgctatagctagatttctatatagcagcctttcaagtggggcactaaatgaaattcgtggccaaacaatatgcagtgtgacgttatgctttcaaagatcccattcactactacaagcaaaggtcaatcttggaaaattctacgctctttagtcctttttccaacacgtggatattcccatatctagtatctattttcagccattaatataggagttttctttcccccaattcaagataaaatatgcaaaaggtcaatttcttgtttcttaatttaatttcccaggaatcaccaatttagcaaataatccctttacaactggtgcataaaagttttgtgcacttaaaaatattttcatagaagatcagccccc

SEQ ID NO: 28612 - DNA, 1445 bp, Glycine max
  Clone ID: TF_GmC560_1
gttatttttagagctagtataagcttgtaacctattatgactttgatgaagagcaacgcataaccaatggccactgaatttttttccttatcttccagtgctgcctttactcttaggccttggccaaaagaatgagagagatcatcatcaattgacatggaatcatgtgtgcctccaggatttagatttcatcccacagaagacgagcttgtggggtattacctcaagaggaagataaactcgctaaaaatcgatctagatgttattgttgagattgatctctacaaaatggaaccatgggacatacaagataggtgcaagctaggatatgagcagcagaatgagtggtactttttcagccataaagacaagaagtatccaacagggacaagaactaacagggcaactgctgctggattctggaaagcaacgggaagagacaaggctgttatgtccaaaaatagaatcataggaatgaggaagaccttggtgttctacaaaggacgtgctcctaatggaaggaaaacagactggattatgcatgaatataggcatcaaacttctgaacatggccctccacaggaagaaggatgggttgtgtgccgagcatttcgaaagcctagtccaagtcacaggccaggctttgaccacccatggtgcagtactagtagtcaacaacaacactttttcagagaccaaattcaaagctattcatcaagacccttatcaattgctgacattttggatgaaacaaataatgtgcctcaccctaatgctgaaggtacaagttttagtcaccccttcagctcggatcatcagcaacacctgaataatcttctatcaaaccaaactgtggctattatggacaaacaactcattgagcttccacagctagatagtcccactgcaagtttggcaatcaaagaatgtaaccaacaacaacataatggcttaacaaatgaggaatattgcagtgatgaaaggagtaacaatagcaatgcacaagggatcgattggaagagcttggacaacttgtttgggtctcaattgagtgataatgcagcttatttttcacatccaaacttgcccttgatgatgccccataaccatgatcaagctagtcatatccttggatgcttccctgattcttcataattaacttgtgtgtcacgtaccaaccataatccatagccaaattaataaataaagtctctaagtaagatatgatggatatataatattcattatatcatagttttccatttatcttaccataagctaatttagaagttgttgctgggagattgaatattaccaaaaagctttttaggtgatgatgatattatatatatttttacgtgataaaggagatttgcttgaagagtgaatctctgatcctttgtattagagttcagaagatcataagccttttctttttttctttt

SEQ ID NO: 28613 - DNA, 1632 bp, Glycine max
  Clone ID: TF_GmC473_2
gaaaaaaaaaaagagaagaaaaaaaaacttggttttatcttctttgttattattatattcacttcttcaatatcttggttctttgatattattattcgattgagcaaaaaatgggagttccagagagagaccctcttgcacaattgagcttgcctcctggatttagattttatcccactgatgaggagcttttggttcagtacctttgccgcaaggttgctggccatcatttctctcttccaatcattgctgaagttgatttgtacaagtttgatccatgggttcttccaggtaaggcagcgtttggagagaaggagtggtacttcttcagtccaagagacaggaagtacccgaatggttcacgaccaaacagagttgcgggttctgggtattggaaagccactggaactgacaaaatcatcaccactgaaggtagaaaagttggcataaaaaaagcacttgttttctacgttggcaaagcacccaaaggctccaaaaccaattggatcatgcacgagtatcgccttctcgactcttcccgcaaacacaacctcggaaccgcaaagcttgatgattgggttctgtgtcgtatctataagaagaactcaagtgcgcaaaaggttgaggcaaatcttttggctatggaatgtagcaatgggtcatcaccttcttcatcgtcccacgtggacgacatgctggaatcgttgccggagatcgatgatcggtgcttcaccctgccgcgagtgaactcagtcagaacaatgcagcagcaggacgagaaattcggatttcagaacatgggatccgggtttttcaccgattgggtcaacccgacggatcttgattcagtttccgaatttgggtcgggttgccaaacccaagggatggtgaattatgattgtaatgacttatttgtcccttctgtgccgcccttcggccacagccatgtaaactacatggtgggggcaccaccgtccgaggaggaggttcaaagcggtgtgaggactcaacaggccgatggggccgcatgttttcagcagaacccaaatgcccgattgttaccgggctcgggcgacccatttgggtttgggttcatcatgggtcagcaagttgagttcgggtttagggactgaaggatctgatagtgttgttctgtaaataattggggattttaatttaaattctatgctcattgttatggaaaattgcaattttggtcattcttttcggctagacacatacaatgaatcggtatgaaactgagcaaggatgacccaatggtgctttcaccacagcaccgcatgctgaaaaattaattgctttgcaagacattattgggctaaatatgaatcacgttgtacttcaaagcattacatagcaactattttccaaatttaagtttagtttagagcattagatattgatatttttatgtggttggtgtcccatgcatccttgtagacaacctgatcaacaagcaatgaaccagctgtaaaattgtctagccttgctgattgtgaaaaaagtgagatccacgtgtgaagtgaacccccgtttaatgtgttaaataaatgggtttggattgattagttgaaaaaagttttcaactataaaatcatctcgtttcactgc

SEQ ID NO: 28614 - DNA, 1067 bp, Glycine max
  Clone ID: TF_701130443_FLI
atcatcttctctctatctttgttgcaaacttaccaacacagtactgagtttaagtgttcaccaaaaaaaacaatggatgatgatattgtaggactcggttttcgtccaacagaacaagagcttgtcaacttttacctcaaacacaagttgctcggcgatgatccccgtgtccacgtcatccctgtcattgatctttgcgatgtggaaccttggaatgtaccagccctgttgatttcaagtacttgaaaagcaaaaggtttaacaggacaaccaagtgtggattctggaaagccactgggaaagaccgtgacattaggacaggggacactgataacactgtcattgggactaagaagactcttgtttactatcaaggccgtgtttcctgtggtgtcaagtccaactgggttattcacgaatatcatgctgttacctttcatgaaaaccagaggacttttgttttatgttgcttgatgaagaaacctgggaaaacaactgaaggcggaactgatcccctgatctgtgatgaaggggagcccagcagaagcatgatttctgactatgaaaatcagccaacagcagaaggaattgcatctgaaggtacttttacaggaatagaggcaatctttcaggcaaccccttgggcagagaattgcttctccccaatacaacagtctctgactcttattgagcaggaaggagcatcctttccaaactatgcatttaacaatgcctattttagaaatgaagacaacattatgcagactccatttgaaactacaaaggaagatgaattcctaaatttaatcttagccgatgaaagtatagtgatcaatgaagaaaataagcatgattttgtcaatagctctacccaatcagagtcattgaaaagggtatactgtgaaagcagtgatacagatgctgaagtcatctctaaactggtaaagatttatcaagttcaaataatactggggagagtatctccatttgtttctgaagtggcattggatctataggttaaaattgtagtgtgcattgtggttatgtgaatgttgccacatttttgc

SEQ ID NO: 28615 - DNA, 1321 bp, Glycine max
  Clone ID: TF_GmC1823_1
ctccgcagaaaaataaaaagtaggtaaagtgcatagtagcactagctaaacagtacgtagtgatcataagcaagcatactgatgattaatatggcaaccatggaagacatgagcaacatgagtggtgaaattacacttccagggttccgattccacccaactgaagaagagcttctggatttctatctcaaaaacatggttgttggcaagaaacttcgttacgatgttattggtttcctcaacatctatcagcatgatccatgggatttgcctggtttggcaaaggttggggaaagagagtggtacttcttcgtgccaagggacaaaaaacatggaagcggtggaaggccaaaccgcaccactgaaaaagggttctggaaagccaccggttcagaccggaaaatagttaccttatctgatccaaagcgcataattgggttaaggaagaccctggttttctatcagggaagagctcctaggggatgcaagaccgattgggtcatgaatgagtaccgtttacctgacaattgcaaactacccaaggaaatcgtgttatgcaagatatatcgaaaggcaacttcgttgaaagtgctggagcaaagggcagcactagaggaagagagagagaagaagcaaatggttgataattcccctgcttctcctccttcctccacggacaccatgtcctttagcagcccacaggaagagcaaaacgtgcccttgcccttgttgcagcatgttcttaagaaagagtctgaaacaactgaagacatggtagtgtcaaaacaagaaaaaacaacgaaccaattgaccttaaaagacaccaaaagcacttgtggcacatcacttcaaatgccctttgggaaagagaagctgccagaccttcagcttcctatgctctcggattggacccaagataccttttgggctcagttgaatagtccttggctccaaaactttactcccaccaatattctaaacttctactgactccactctatgtgcatcattactcaaatataatatatcaactgcaacttaattagtcaatattacctatttattttggaatgtatatgcagtgaattagtaattaataacgtttttattatattaactcaattaactagacatgttttcatgcacatatatgttttttcctatcaagttcagtctagctggaacttgttgtcaaccctttacccctgtcccttgaagatgtttcactctttcaatgaatgttcaagaagtaaaattcatcagcagattcacagcggaagcctctcggcgggggcaacaaaaaaaaaaaaaaaaaaaaaaa

SEQ ID NO: 28616 - DNA, 740 bp, Glycine max
  unsure (1)..(740): unsure at all n locations
  Clone ID: TF_GmC1823_2
tacgggggaattcggcgtgagctccgcagaaaaataaaaaaagagtagctagcactagctagctaaacacagtacgagtagtgatcataggcaagcaaaagcatattcataatatggcaaccatggaagacatgaacaacatgagtggtgaaattacacttccaggcttccgattccacccaactgaagaagagcttcttgatttctaccttaaaaacatggttgttggcaagaaacttcgttacgatgtcattggtttcctcaacatctatcagcatgatccatgggacttgcctggtttggcaaaggttggggaaagagagtggtacttcttcgtgccaagggacaaaaagcacggaagcggaggaaggccaaaccgcacaactgaaaaagggttctggaaagccaccggttcagaccggaaaatagtgaccttatctgatccaaagcgcataattgggttaaggaagacactggttttctatcagggaagagctcctaggggatgcaagaccgattgggtcatgaatgagtaccggttacctgacaattgcaaactacctaaggaaatcgtgttatgcaagatatatcgaaaggcaacttcgttgaaagggctggagcaaagggcagcactagaggaagagagagagatgaagcanatggttgggtcccctgcttctnctttctncacggacaccatgtnctttagcagcccacaggaagagcaaacatgcccttgc

SEQ ID NO: 28617 - DNA, 1830 bp, Glycine max
  Clone ID: TF_GmC1395_1
cctcgtgccgagcaaattcttcatcagatggaatcactaacaacatttcaggacaaaccttcttcaatgctgatcttattaatagtgttaacacaaacatgaacttgaccatgaattggccagttgcaagtgaggtaattcaggttcccactcttccatcacttccatggccttctgggttgttaaatccaagtatttctgtattttctttgcttctcaaggcattgcaacttagctgccatcaacgcatagaaacccataaagtaaagaggcctttaaaagctcttattggtgatgtattgagcttactttcccagcaactcattggtacttctcatatatttgtggtgctccctcttcagtttttggtaaactaaacttcttcaattcaagggggtatcaaaatctgctggttggtttcatcaatctgatggaggaaaatctgcctcccggatttaggttccaccctacagatgaagagctcatcacatgttatcttacaaggaaggtttctgattctagcttcacatccaaagctatagcagttgttgatctcaacaagtgtgaaccttgggacctcccaggtaaggcatcaatgggaaagaaagagtggtacttttttagcttaagagatcgaaagtatccaacgggacttcgaacaaaccgagccactgaatcagggtactggaaaaccacagggaaagacaaggaaatttttcgtgctggggttttggttggaatgaagaaaaccctagtcttttataggggtagagctccaaggggcgagaaaagcaattgggtcatgcacgaatatagactagaaaacaagcatcactttggaccttcgaaggacgaatgggtggtttgcagggttttccagaagagcttgcaagtgaaaagaccacagcaaacaccctcctcacaaccagagtccccatgtgacacagcctcaatggtcaatgaatttggtgatgttgagcttcctaatctaataaataacattgcaaattcatcaggtggactcactaacaacatttcaggacaaacctgcttcaatgctgatcttattaatagtgttaacacaaatatgaacttggccatgaattggccagttgcaagtgaggtaattcaggttcccactcttccatcactcccatggccttctgggttgttaaatccaagtatttctgtaaattctttgcttctcaaggcattgcaactcaggagttatcaacaaagagaagcagcaacagatcatttaatagcatcatatgtgcctcaaggagtgtcccatgttggaactgacctaagttcaaatctcactgcctcttcttctaaagttttagaatgtatgccacagcagcaacagctggagcaaccattcaacttggactccatttggtgaatctgtttagaacatgaagctaggcattgtgtaattacatcaacaaccctccagctcccataaataaaatggtaccatttccaaacttaacacaattgctgatgttgtaaacattgctcttcagatattattgtaagtaggtgttaaaataggcagcttttaaattactgttgaaagtcctttgatgtgcaatcattaggttcgttccaagtttcatgttctagtattaagtaaattcaaaggaataatttgtatatcttgcccaatctctttgctttgtatccaacccctcattcagcatgcagttatgcatggatgtaatcatgatgacaagtgatgactatcccagtatatgaaaacaaaggatatgcatggatcatataatatttagatccatgcatgcccgtatccaaatcgatcaaaaa

SEQ ID NO: 28618 - DNA, 599 bp, Glycine max
  Clone ID: TF_uC-gmflLIB3275P064b07b1
atcttcttcttctttttcatcaatcatcaccagtggttcttttccttctgagaagatcgaattgtgttttgcaaaaatgggagttccagagaaagaccctctttcccaattgagtttgcctcctggttttcggttttaccccaccgacgaggagcttctcgttcagtatctgtgccgcaaggtcgctggccaccatttctctcttccaatcattgccgaaattgacttgtacaagttcgacccatgggttcttccaaatttgattgattaattttgcaggtaaagcgattttcggtgaaaaagagtggtactttttcagccccagagacaggaaatacccgaacgggtctcgacccaacagagtagctgggtcgggttattggaaagccaccggaaccgacaagatcatcaccaccgaaggtagaaaagttggcataaaaaaagccctcgttttctacgttggcaaagcccccaagggcaccaaaaccaattggatcatgcacgagtatcgcctcctcgactcttcccgaaagaacactggcaccaagcttgatgattgggttctgtgtcgtatatacaagaagaactcgagtgcacag

SEQ ID NO: 28619 - DNA, 357 bp, Glycine max
  Clone ID: TF_LIB3242-526-P1-J1-E10
ttcgatttctgattcttaatttttatttattaattgttactgtgttactgtacaggattggctacttatggagagaaagagtggtacttcttttcaccacgggaccggaaatacccaaacggttcgaggccgaaccgggcggctggcaccggttactggaaggcaaccggggcggataagcccattggtcagcccaaaccggttgggattaaaaaagctttggtgttttacgcagggaaagctcctaaaggggacaaaagcaattggatcatgcacgagtatcgtctcgcagacgtagatcgctccgttcgcaaaaagaacaccctaaggttggatgattgggtgctttgccgtatt

SEQ ID NO: 28620 - DNA, 1227 bp, Glycine max
  Clone ID: TF_GmC250956_1
ccacgcgtccgctcatccatagtttcctcttgtttgagtgttagcacaaattaaaaagaaaagggtcatgttggcaatggaagagctactgtgtgaacttagtgatcatgaaaagagaaacgagcaaggtctgcccccgggtttcaggtttcaccccactgatgaagaacttataaccttttacttggcttctaaggtctttaatgacactttctctaacctcaagtttgctgaggttgacctcaatagatgcgagccttgggaacttccagatgtggcaaagatgggggagagagaatggtatctgttcagcttgagggacagaaaatacccaactggactaagaacaaacagagcaaccggagctgggtactggaaagccactgggaaggacaaggaagtgtacagtgcatccagtggaaccctacttggaatgaagaagacccttgttttctacaaaggcagggcccctcgtggtgaaaagaccaaatgggtcatgcccgagtaccgtttggacgctcacttttcccttccccatacttacccctctaaggaggagtgggtgatatgcaggatttttcataaatctggggaaaagagaactccagtgctccaagtccaaggacattcagatgctttcttcgtccccaataaaaagttctttacctccattacttgcaagctcatctcattctcagctgcgagacttccaaagcccggttctgattcaccaacaagaccaaaatggcctctctcaccctcatcttttcccattggaaatctccaacgccagaaaccacccatcggacctactcttcaagcccctccagcaaaattgcaccctgaagaccaaggaacaaactattattccaaaagtgatcaaaacggaggacgctacattctatcatcaattactagatgaccataataacatgcgctgtgtgaacaagttgaatcaaaatccaagtaatttcctcaacactttccctcttgaggtggacgctggcttgatggcattctcaggagctgcaaatgctcaagctagggaaatatccacagcttcaacaccctttaatagggtagccttgcagcagatgcttgattcttggcctctgacctagcatgtttaaaatatgtgtgtatgtatatatataattactgttcgatatacagaccccctagtaattaaggtgtttgaaccatgcataatatactacatgattaatt

SEQ ID NO: 28621 - DNA, 1324 bp, Glycine max
  Clone ID: TF_GmC169_1
cgcacgagaaaaattcgcacgtgcacgatttctcacttcaactttgaacttcttttctctattattattatctttctctttttcttcatctcttatcttccttcacctttttattgaaagaaaaaaaaaatgagcaacataagcatggtagaggcaaagctgccaccaggattcaggtttcatccaagagatgaagagcttgtgtgtgattacttgatgaagaaggtgcaacacaatgattcccttctcttgatagatgttgaccttaacaagtgtgagccatgggatattcctgaaacagcatgtgttggagggaaggagtggtatttctacacacaaagagaccgtaagtatgcaacagggttacgcacaaatcgtgccactgcctcagggtattggaaggccacagggaaggacaggcctatcctccgcaagggcacccatgtagggatgaggaagactttggtgttctatcaaggaagggcacccaaagggagaaaaactgagtgggtcatgcatgagtttcgtatcgaaggacctcatggacctcctaaaatttcttcttccaaggaagattgggttttgtgtagggtgttctacaaaaacagagaagtttcagccaaacctagaatgggtagctgctatgaggacacgggatcttcaactcttcctgcgttaatggactcttacataagttttgaccaaactcaaacccatgcagatgagtttgagcaagtgccctgcttctccattttctctcagaaccaaacaagccccattttcaaccacatgaccactatggagcctaagttccctctcaaccatgcaactacaacatatggaggagcaccaaatttgggttattgcttagaccctttatcttgtgacagaaaaatgttaaaagctgttttgaatcaaatcacaaagatggaaaggaatccacttaaccaaagtctaaaagggtcaccaagcttaggagaaggaagttcagagagttatttatctgaagtggggatgccccacgtgtggaattactgatgtgagactttagtacttaaaccctctcctccacctatgccaccatgaaatttttttttttaaaaaaaaaacaagaaaaaaaaaggtataagggggaagataaaatcaatccattgttttaagtcatggtgagtacttatgttttacctgtggtgttttagctattaatgtatacccatccatgatgtgtccctatatattaggaaaatgggacttgtaatttaaacttataaatatttgtagttaattttatttagtggatgatttttttttcttctttgttaaa

SEQ ID NO: 28622 - DNA, 408 bp, Glycine max
  Clone ID: TF_jC-gmfl02220085a06a1
ggctcgagatgtgtttgcctcttgttctatgctgtcgagtacggcacaaaggcaactaggggggagtgttcaagaatttgttcattgcaaccgtgagaaatcaaccccctacacatgtatggatctagctagccaatttattaataaggcacatattgggaagcccaaaatgcaatatgtcactcggatttaggttccacccaaccgatgaggagctgattcttcactaccttattgaagaggtagcattcatacccttgagcgataccattattggtgaggatgatatctacaacgttgatccatgggacttaccacctaaggccacctttggggagaaagaaaggtatcttttcagacctagagaccgacagtacccagatggtgcaaggatcaacagggcatttt

SEQ ID NO: 28623 - DNA, 1437 bp, Glycine max
  Clone ID: TF_GmC14820_1
gcgtggactatttctctgtaagccttgctttcaattttctccttacaaaaaaatcctttcccttctctagtccccataactagcaaaagaagccaatagaaaactgttccatatagtttcccattcaagttcgctctaagctttgctttcaatcttctccttacaaaaaaaaatcctttccctctcttgtcccaataattagcaaaagaagccaacagaaaactattccatatagttttcaattcaaacttgttttgattttcattttaactcaatggagaacagaacaagctctgtactcccacctggcttcaggtttcatcccactgatgaagaactaattgtttactatctttgcaaccaagccacatcaagaccatgccctgcatcaatcatcccagaagtggatatctataagtttgatccatgggaattacctgaaaaaacagactttggagaaaaggagtggtacttctttagtccacgagagaggaagtatccaaatggggtgaggcctaatagagcaaccgtgtctgggtattggaaggccactggcacagataaagcaatctatagtgggtctaagcatgtaggggtgaagaaggctttggttttttataagggtaagccaccaaagggtctcaagacagattggattatgcatgagtatagattaattggatcaagaagacaagccaatagacaagttggatccatgaggctagacgactgggtcttgtgtaggatctacaagaagaagaacattggaaagtcaatggaggcaaaagaggaatacccaatagcccaaatcaatcttacaccagcaaacaatgacagtgaacaagaaatggtgaaatttccaaggactagttcccttactcatcttttggaaatggattacttgggtccaatatcacatatattatctgatgccacatacaattcaacctttgattttcaaattaacactgccaatggtggaatagacccgttcgtaaaaccacagccggttgaaatcccttatgcagcagattcagggaagtaccaagtgaaacaaaatagcaccatcaaccccaccatatttgtgaaccaagtgtattatcaaagaggataatgccaaaaaaaatattaaaaaaaatgaaattggattatttggacatgacgataagcgtcaccaattaaataatcctgaagattctttgtaaatatatatatatatatatatatatatataaatataagaattttcagtgatatccaatcagatagctcccatagaaattgtatatatatatatactctttgtaagaaataccattcattaagtaacacttttctcaacacttttttttatattatttagtaaaattgcacatgagtcccattattaagagtaatcaggttattcaataaaaaatctaattattgtgaaaaaaa

SEQ ID NO: 28624 - DNA, 1819 bp, Glycine max
  unsure (1)..(1819): unsure at all n locations
  Clone ID: TF_GmC195_3
cgatttctgattcttaatttttatttatttgttactgtgttactttacaggattggctacttatggagagaaagagtggtacttcttttcaccacgggaccggaaatacccaaacggttcgaggccgaaccgggcggctggcaccggttactggaaggcaaccggggcggataagcccattggtcagcccaaaccggttgggattaaaaaagctttggtgttttacgcagggaaagctcctaaaggggacaaaagcaattggatcatgcacgagtatcgtctcgcagacgtagatcgctccgttcgcaaaaagaacaccctaagggtatatacactccgtacttctttctagttcaagattattgctcgaaattacgactttgtccctacgctctcatcggctgaggataagtccaggattttggtggaaaccatgcaaaatgtatggtcgtaatatgttatcatgtgaaaactaccgcgcggaaccttcactagttgaagacttgccagcatgtggtctgggcttgggcccaagaaacttagccatcacattagatccaataaaaaaacaataattgatgcggaaagaaataaatcttctgccaatcgcaattatcactttccatttttagaaaactattccttctttatctctctcacctgcctccgattgcaatacttataataataaatgaaaatgaagaaataatcttacggtggttgtgattttttttttttttttgtcgcagttggatgattgggtgctttgccgtatttacaacaagaagggcacgatcgagaaactgcaaccaagcagcgatgttgctcatagccgaaatatcgaatcctcggagatcgaagacaggaagccggagattctgaaaagcggaggaggttgtcttccgccgcctgtgccggtgcctgcgccgccgcaagcgacggcgaattcggctcgagcttcgacccgtcggattcaatcccgaagctgcacacggactcgagctgttcggagcaggtggtatcgccggaattcgcgagcgaggtgcaaagcgagcccaagtggaacgagtgggagaaaagcctcgaatttccatttaattacgtggatgccactctcaacaacagcttcatggcccaattccagggcaataatcagatgttgtcgccgctgcaggacatgttcatgtactggcccaacaagtccttttgagcacatcatgatggttttaaattacgatccgcaattgctcttaagattttctgactcaccatgcgaccacaatcgtaatttaaaaccatgtcacataaaatccacgcgcgccgcccattcgcatttgcacggtagcacgagactcaaggtccatgagtgtgcctgtgcgaccacacacatacgattattgatcaagttagcttagctaggccaaagtaagaaagaaagaaacattgaagctggaaacgcatgtgttggctccaccgtttgctttggtattttgctatgtgatgatgacgacgacgatccaacggtgcatgtgtgttgacctgttcctagtagtagtagtagcatgtgtacagctattgtagaatgtagataggtacactactacacgttgttgtcatgtgatcatagaaaggtctctcaccgtacaaaaaaaaaaaaaagtgatagaaggtctatttgatagaccttctaattaatatatgttgaattattattagcaaaaaaaaaaaacaacgccntaggcgtgccctttgcttttctaattttctaggtctttttaaattgagtatcgtgaaagtccactgtgttactttttcattc

SEQ ID NO: 28625 - DNA, 1101 bp, Glycine max
  Clone ID: TF_GmC1826_1
caagaactaaccgtgcaacacaagctggatactggaaagctacagggaaagataggccagtgcactctcaaaagaagcaagttggcatgaagaagacattggtgtactatagaggtagagcaccacatgggattagaaccaactgggttatgcatgaataccgtttaattgaatcagttcctggtactgctctctcatctttgaaggattcctattcgctgtgtcgcattttcaagaagacgattcaaattccagccaaacctaataataacgaagaagaacaacctgagattgcaaataagaaggaatcaatgtggatctcagaagaacaaatgttaggggaagactcaagtggcactgagatttctagagaaatggaaaatgtggatgaaaaaattctcaatcatgaacaccctaaatttccttgtgatgcttcttcctctgatctcactcaaggagcatgtacacccacagataccggcatagcagaagattttcaaccacaatttgcatgtgatgaagcaaacagtgcagctaattcatatacaatgggaataggatactccacaaatatatttcaggatgtagaaatgcctagctatgctgacatgcattatcaactcccatacacacctttggtgatggaagatttcccacaaataaatttaccagagacaaagacaacgaagccagaagtcaccgatgactgcatgttatatgacagatacagggactgcatgaatggaacactagaagagatcatctctttgtgttgcactcaagataattccgtcccttttcctatgctagaatgattacactaaccaagatgactcaaactatagcatcaaaatattcattagacacagagaaacttgtgttggctaaaataacgacacaaatgggggattgtttttccagccacatagaaaaggctacacatataatgtactaaacatatagtagaatatgctgagccaaggggggctcgcatacaattggttttcaatttttttttgttttatcttttttcattctgtgttcttcgttttttgtaggggttgttcttcctacttttataggagttcttccttcttttaa

SEQ ID NO: 28626 - DNA, 1732 bp, Glycine max
  Clone ID: TF_GmC434_2
gaaacacagtgagttaagtgttcacaaaaaacaatggatgatattgtaggatacggttttcgtccaacagatgaagagcttgtgaagttctacctcaaacacaagttgctcgatgatgatccctgtgtccacttcatcctcgacgttgacctttgtgaagtggaaccttgggacttaccattgttattagcagattcagctgtgcgattcaatgaccctgaatggttcttcttcagtcctgtcgattacaagtattcaaatagtaaaaggtttaacaggacaaccaagtgtggattctggaaacccactggaaaagaccgtggcattaggacaggggacactgataacactgtcattgggactaagaagactcttgtttactatcaaggccgtgtttcctgtggtgtcaagtccaactgggttattcacgaatatcatgctgttacctttcatgaaaaccagaggacttttgttttatgttgcttgatgaagaaacctgggaaaacaactgaaggcggaactgatcccctgatctgtgatgaaggggagcccagcagaagcatggtttctgactatgaaaatcagccaacagcagaaggaattgcatctgaaggtacttttacaggaatagaggcaatctttcaggcaaccccttgggcagagaattgcttctccccaatacaacagtctccgactcttattgagcaggaaggagcatcctttccaaactatgcatttaacaatgcctattttagaaatgaagacaacattatgcagactccatttgaaactacaaaggaagatgaattcctaaatttaatcttagccgatgaaagtatagtgatcaatgaagaaaataagcatgattttgtcaatagctctacccaatcagagtcattgaaaagggtatactgtgaaagcagtgatacagatgctgaagtcatctctaaactggatgacaatattgtggatatttcaacagcatgtaatgattatcctaattcagatgaatactattcatcaaaaaggtttaaatcatcacatgatgctgtccatggtggaatatgttttctaccttctaaccttgaagcaaaccaagagaaaaacgagagtatgtttcaagatagtttctggggagcagagacatcatcttgtgactcgacactagataaacctttggagatcaattatattgatatttctagttctcctttcactccatggagatgagaaaattaatatcattgaagaccagtcaatttcgtatgatgggaactaagatctaagttagctccattagattggtagtagctattttggagtatgtcataaaatatgactagttctacaatagcaaatttattagaaaacaattctgtattagaaattgcataatggtagttatgcataaaaaataactatgggcagttatgtattaagatttaggagcttatatcctaacagtaaatctattagaaagtattaaaaactgcatgatagcagttatgcatagaaaacagccactagtagttatgtattaagagcatatatgtgatggtattagtagattgtgtaattaggaagtatgtgtagttgtttgcagtttatggacagagaatactctatgtaggagacttttgtctctaggacaacaagtgtattttgtatcaatgtattttgtgtgattttagtatttcaataatatatttcattagtttttggagggtgaaaa

SEQ ID NO: 28627 - DNA, 2324 bp, Glycine max
  Clone ID: TF_GmC627_1
atgccaagaaccaccttattaaggcccacgaaattagccaccgcccaacccttaaatcttgccaattttccatcaaggtttaatcctagacaatcctaagtcaacctttgtgcaatgaatgttcatatcatgaatggtaagttgagcttagcgcagaaactaaaaggtgcttttaagaatgacgtagttctaagaggttcaagttgttcacaactttgtgggcatcaacactctcatgtattacagcctaaccattgttcagtttgctggaattgcctccaactccacaggtcttgcactctctcttattacatctggtctaaatgcgcttggcactatcttgagtatggttttcattgatagatatggaaggagaagactcatactggtttccatggttgggatcattgttttcctcgttgtttcaagtgctatatttttacctggcagtgcaaaatgctccttggaatagtaaccatgacaccttggcttttggtcgaaactctacttgcgaggcttacccaactgcccttattctctcttcatggaacttcatgcaatgcttacaggaagattgtgccttctatgccaacagtgataatcaagtatataataagttaacttcttccaacctcctcttatcatttccttaacccgctctcatcatcactaattaacttacataaatatgtcctcatgcatgtaccagaaattattatatggttcacaagtaccatgatatgactaatttccatataatatataattgagtttttttttaaaaacgaaaactagaattgagaaactcactatatattatatagagattagtcgcgaccataaacacgtaatgatttgagactatctaatatagtaatttctcttactaagaatttgtatagattatgtatttctcctaccatctaccatgcttacagcaaagtatccatgaaggaatatatcaaaaacattacatatttcttttatttgctcttcctgtccagttttttgtatcatgcactttctagtttttagatgtttgctaccagttcttttattgcttttcttgttactaattaatggcttatactttattgcaatttcccctaaggcatttaaacataaacatttggcaggttcgtcggttccattttctccattagagaagcaaacccctcgttcttggtcaataattgagccaagtcccttcagagtcagaggcaaaaactactttaggtaggcaccaacttcgtattttgtactaaacatttatgggtcgatgattgaacctgttgttagggatgtccctcatatacaagtcattcgttatgttaacaatgaagcactgttccatttttgatgattccataatttatttgttgcatggttgtcagggataagaagaaagattttgcaccgggcaatgctgctttttatcctcttggtgctgacctatttttgtctttgcaagaaattgatcatattgctagctttgtacaaattcagtaggaagccaacatagctatgccacatagctatatataaaattaagatatatactccctgcaatgattttgatgtaaaattaacatacttatttttttctttcaatcttgacaacaaatagttcaattaaaatcagcttggtttctggaaatcatgcaactacagaatatgatgcacgagtcatttcagttttatatatgattactttccttcgtatttatgtaaaattaaacacacaagcacatctttgcagtgttggtgcaatattatttgatcttcttacaagaacaaccccaacaaatggaaataatcaaatacatgtatagaatttatattagtgcctttttctttgtagtgtattgagtattctttcaatggtaacaaagtagttctttcaaccaaaatgaagggtcatgtgttgtttcttttacttgttatgctttgattttattgaagattgaaatttcacacataaatgaagggtcaatctataagccaatttaacatattcaacaccatcatgaaagagtgtgtaccctggaataggccaatctttagctaattgtggggtattctgaatcaaagtaggtttactcatttgtaattgctagctattatttcaattcaaaataaaatggggtaattgtgggggtattcttccataagctctcataagtcataaacaactttttattattaagtattacctcaatgaaccagtatcttgagcctgcagccttgtttggcctcaatccatttggatttttcctgtctcttgggctaaagaaataccattgagccttaatgacttatttgcc

SEQ ID NO: 28628 - DNA, 831 bp, Glycine max
  Clone ID: TF_GmC217080_1
accagaaaaaacggctgatccatccgtccgctacaccttctcaggaatcacataaccacttcaatcatcataaactccacatgcccttcttccacgcttctcttcttcttgttcaaaacttttaaggtcatatatctctttgaaagcagcttccacttttttctagttgtgttgttggttgaaatttcttttagggggaaaggatctctcactttctctctctttctttttccatattaataattaagagggttatattagaacaagatatatagctaggtttagatatgatggaagagagaaataataatgatgctgctgagaaactggatgaagttatgctaccagggtttaggtttcatccaactgatgaggagcttgtagggttttacctcaagagaaagattcaacaacgccctttgactattgagctcatcaagcagcttgatatctacaaatttgacccttgggatcttccaaagttggccaccacaggagaaaaagagtggtatttctactgtcccagggacagaaaatacagaaacagtgcaaggcctaatagggtaactggagctgggttctggaaagctacagggactgataggcctatctactcctcagaaggttcaaagtgcattggcctcaagaaatccctagtcttttacaaaggtagagctgccaaaggagtcaaaactgattggatgatgcatgagttcaggctaccttctctcactgactcactatctccaaagtacatagaccagatcaccattcctgctaatgaatcttgggctatctgcaggatattcaagaaaccaatgctacagctca

SEQ ID NO: 28629 - DNA, 1455 bp, Glycine max
  Clone ID: TF_GmC415_1
aggagccaaattggtattatcgcacttattgattcccttggtctctccttttgtcaagaacaaagtattttctttgatggagggagatcaacatggctctaattactcttttccacctggctttagattccacccttccgatgaagaactcatagttcattacttggaaaacaaagtcagttcacgtccacttccagcttgcattattgctgaaattgatctctataagtataacccgtgggagctaccgaataagtccttgtttggagaggaagaatggtatttctttagcccgagagacaggaagtacccgaatggattgaggccaaacagggctgcagcctcaggatactggaaggcaactggaactgacaagccaattctttcttcttgcggatcgaggcgcataggtgtgaagaaagctctggtgttttattcaggtcgacctcctaagggtgctaagacagattggatcatgaatgagtataggttggttgacacaaccatcaaatcctcaaggctaaaaggctccatgagattggatgactgggtactatgccgggttcgatataaaggctactctcagaagaattcatgtgaaaatcaagagagtcctagtgaactaaacttgtcagcaaaactactgaggagtgaagaaaacccaacaaaaatgaactgtcgggctgacatgatccctgattatcaatataaagactatcaaatcatagcctctattcttgttggtggacctattcctcccattgaaagcatgccaaatctgagctttaagggttgcaaaggcaacaatgtagtttcagattatgaagatggtttcactaaagggaattctcaaacgacaattccttcattggaaagttacttcaacccactgacaagaaaatccaatgaagatgaacagtatggaaatctcatttctttcaacaggaagttcaacactgataacagaatggacggatctactagcaaagtgttgaacagtagagaattgaattgctacaaccaaaaccattctcaagatgacattttcaatgggaacccaccagatcctaccatcaattttcaagagctaaacgaattagacttttcaggaaggtaccatcagtgatgaaggtatttattataagacagtcaacgtccctttacttcacaggtagattttcatggattatacaacttaagacgtaggagaaacctgaaggataatgggccctattccggcgaattattgctgtatttctttatgcatagtcaacatggggcaatagctacatatagaagtttccatgcattcatgaaattccttgtaaacaatgccccggccaactagcttcttgagcgtgccctgtgtcagttcaactagaactttatcctacctagtaattataacgtgtaaatacaatttgtattctgtatttctgcaacttacaggagtta

SEQ ID NO: 28630 - DNA, 1429 bp, Glycine max
  Clone ID: TF_GmC1307_1
ctctcgagccgaatcggctcgagcttcaaatcgattaagttcatagagagaattgaaatatctatttggtaagtgattgagagtttgaatttgtagataataagatgggttcgtcgactaatggtggtgtgccgccagggtttagatttcatccaacggatgaagagctgcttcattactacttgaagaagaaggtgtcctttcagaagtttgacatggatgtcattagagaggtcgacttgaacaagatggagccttgggacttgcaagaaagatgtagaattggatctactccacaaaacgagtggtatttcttcagtcacaaggatagaaagtaccctacaggttcaaggactaatagagcaacgaacgcagggttttggaaagcaacaggaagagacaagtgcattaggaatagcttcaagaagattggaatgagaaaaacccttgtgttttacaaaggaagagctcctcatggacaaaagactgattggatcatgcatgagtaccgcctagaagatggcaatgatcctcaaggaagtgccaatgaagatggctgggtggtgtgcagagtgttcaagaagaagaatttattcaagattgaaaatgaaggtgggtctacacataaaccagatcaccaaatcaacaattcttcaaacactaatgcacggtcctatagagaaaatcactacttactacatcaacagcaaaatcctaggaactcatcagggcttgagcttgataagcctgagctggctctccattacccgccgccacacttgcaaaaccctccatactcactcttccaatcccagcctcttcttcagacccaaaagcctatggtttatgattattcatatacatcagacacccctatcatggcaaagcaactcatgacaaaccctagagactgtgagagcggcagtgatggcctaagatatcaagtttcggagtcaggtatggaagttgggtcgtgtgaaccaaatcaagaaatgggaaccggaagaggtgaaggaataaacgaatggggtgttcttgataggctagtgacctctcatcttgctggaaatgaggactcatccaaaggggtcaggtttgaagaggcaaatccacagtctgtccaccagatcaatcaactttcattgaggggagagatggacttctgggcctatggaaaacaatgattaatttccctttattatagtgaaatttataaacaaattaagtgcattcaaggttggagataattacaaaggctctaaccattttaaaaaggacatatattttgatactgatcgatttaagattgtttgttatgtttttcacttgattagaagacttcattagttgtaatatttcaatccattgtttgtcaagtaccatagtgtcaattgaaaaaaaaatgcaattattgattgtatgataaaaa

SEQ ID NO: 28631 - DNA, 798 bp, Glycine max
  unsure (1)..(798): unsure at all n locations
  Clone ID: TF_GmC424_4
tacggctgcgagaagacgacagaagggggaaaaaaaaaaacattttcatcagcttcttcttctttttcatcaatcatcaccagtggttcttttccttctgagaagatcgaattgtgttttgcaaaaatgggagttccagagaaagaccctctttcccaattgagtttgcctcctggttttcggttttaccccaccgacgaggagcttctcgttcagtatctgtgccgcaaggtcgctggccaccatttctctcttccaatcattgccgaaattgacttgtacaagttcgacccatgggttcttccaagtaaagcgattttcggtgaaaaagagtggtactttttcagccccagagacaggaaatacccgaacgggtctcgacccaacagagtagctgggtcgggttattggaaagccaccggaaccgacaagatcatcaccaccgaaggtagaaaagttggcataaaaaaagccctcgttttctacgttggcaaagcccccaagggcaccaaaaccaattggatcatgcacgagtatcgcctcctcgactcttcccgaaagaacactggcaccaagcttgatgattgggttctgtgtcgtatatacaagaagaactcgagtgcacagaagacggcgcacaacggcgtggttccgagcaacgagcacactcaatacagcaacggttcctcttcttcttcttcgtcccagctgggagacgttctggaatctctgccatcgattgatgaaaggtgtttcgcgatgccacgcgtcaacacgctgncacaacacagcaccacg

SEQ ID NO: 28632 - DNA, 1915 bp, Glycine max
  unsure (1)..(1915): unsure at all n locations
  Clone ID: TF_GmC363_1
cccacgcgtccgcccacgcgtccgatttagtgctgcgtactaagtttttggtttcatcagatccacaccggaattctattcagactctatacatagttacatcgatcctcgcggggagagccaaataacgagatacacaggttttaattctttgagagcggaaatggatacattttcacatgtaccaccaggctttcggtttcatccaaccgatgaagagctcgttggttactaccttaggaaaaaggtagcgtctaaaaggattgatctagatgtgatcaaagatgtcgatctctataaaattgaaccatgggatctccaagaactatgcaaaataggaaccgatgaacaaagtgactggtacttcttcagtcataaagataagaaatatccaactggaactcgcaccaatagagctacaaaagcaggattctggaaagccacgggaagagacaaggcaatatactctaagcattgcctcattggcatgagaaagactctcgtgttttacaaaggacgagccccaaatggacagaagtctgattggatcatgcatgagtacagactagaaactaatgaaaatggaacttctcaggaagaaggctgggttgtgtgtagagtgttcaagaagaggatgacaacaacgcagaaagtgggagagtatgatcaatcaccctgttggtacgatgagcaagtttccttcatgcaagatcttgaatccccaaggcgcaatatttctcagacttatgcatcataccaccatcaccaacaacagcaccaccaccatccctgcaagcctgagctcatggaattgcaatacaacaacattccccacgatgcattcctccaacttccgcaactcgaaagccccaaagttactcaatcatcatgctcagttgtcccttatggctatgaaagcaacaacaacaacaatggaagcaccttgcaattctcatcactcactcaggaagaacagctacaatattgcaataatcaacaaagtcaccattctctctatggtagcaatgatcatgcagttgaccaggtcacagattggcgtgtgcttgacaagtttgttgcttctcagctcagtcacaacaaccaagatgtttccaaggaaaccagttattccaatgcacctatcttccatgtggctgaacaaatttctgtggctgcaaatggatccaaaaaggagcaagtttctcaggagtatgcttcaacgtctacctccagttaccagattgacctgtggaagtgaatttttatatatatatatatatatatagtaactataaataagatacgatgcataataccaattataggaagtacgtacaagtgaatgttggaaaaaaaagaccatagtgttgttgctacgtgttgttgtacataagaagcctaaaatgttttatatatcattagttgttgaacctcttgaggctggagtatatggactgaaaatgtatccattagttgcaattcttcagttgcaaaagacacgcctatatacagcaaacagattggtgcttcaaggtcaactcgatctacagcaagaagtgatctatatgatgggaagagttctatgaattaatgttacaggtgatttgttcactacagcttaatgttgcatttattataaaagttacatatgttttcagtttgtatttgaaatagccaattacttggatatatgattggatctaccagaagtttaagaatggagggatgagatttgagaatctaaactaagcatgcttctgatatatcgttcctccactgtgccagtttagaattgactgtaatatggccttttctgcaagcgttcaatttctgtatagcncataagatgtgaaatttcaaacaccaagttaaagagattataaatcactgaaattgactgaaaatcattaacttt

SEQ ID NO: 28633 - DNA, 1109 bp, Glycine max
  unsure (1)..(1109): unsure at all n locations
  Clone ID: TF_GmC111_1
catgaatctcatacatgcaaatttagaagatcgagtttctctatgtaataataaaagatatatgaaacattaattaatattccgggaagaattacaggtgtaagaaaagatgggcaaatccgccacttctttcacaggccatctaaagcatacacaaccggaacaaggaaaagaagaaaggttcacactgataaagaaggaagcgagacaaggtggcacaaaacaggaaaaacaagaccagttttcgtaggtggtgctgtgaagggtttcaagaaaatccttgtcctctacaccaactatggaagacaacagaagcccgagaagaccaattgggtgatgcatcaataccaccttggtactagcgaagaagagaaagatggagagttggtggtttcaaagattttctaccaaacacaacctcgacaatgtggtaataattccattataaagcaggatctttatgatgaagaaagattgatgtctaaccaaattagtgtccataatgatgatgacaataatataatacctagaagtaataatgcaagtgctctcatggactactacaatccttctttcataaattatgaccaattaggtggtcgtagtaatagggaaagttcagctcaacttattccaaatttggccatgcaaggtgatagctcttctttcattcgattagcaatggatgcaaccaaagccatgctggacagaaaatagctccaattgatgaaagaactttcttggtagaattctatagtagtgacaatgaccatatattgatgttgatgttttttatattaatttcaatatacgtaatagcatgtatttattctatatatgggatgataaggtgaaagaaataataagacatgacttttattattattattataattattattattattattattattaatatatatgtgtgtcgaggattacccatttgacgaccctggttgcaattgagaggagataaccggttgttcccggtactgtggtgttnttatcttagagtttaagtgtaccaggtaaattntgtaaaatctgttcaccatgtgattctnatatgtcaaaattatgcagaagtatgtttgttttaaagttca

SEQ ID NO: 28634 - DNA, 899 bp, Glycine max
  Clone ID: TF_GmC806574_1
ctatttgcttcaatgggagataacaatgtcaaccttccacccgggtttcgattttatcccacagatgaagagcttgtggtccatttccttcacagaaaggcatctcttttaccttgccacccagatgtcatccctgatcttgaggtctacccatatgatccatgggaacttgatggtagagctttagcagaggggaaccaatggtactactacagcagaaggacacaaaatagggtcactggaaatgggtattggaaaccaacgggaatagaagaaccagtggtttcaagcacaagcaacaagagagttggcatgaagaaatattttgtgttccatgtgggagaagcccctgctgctggtatcaaaaccaattggataatgcaagaatatcgtctatcagattcttcttcctctaccagatcatccaaaagaaaatcacaaccaaaaatagtcagtatacatattttcatacataatcaggaagcacatcaaacatgaactcttcttatagtaagaaatgagaattaaaaatataaactattagctaatacataagtgattaaaattaaaaaaatacatataacttttttaaaatagctagtcgtgtgaacagttaccactgacgtatattcgagttggaaaactattgtacaacacattgatttgattgctgattttatttttccttttgtgtttgattcaggaatacaataaatgggtgatatgtcgtgtttatgagcgcaatggcgacgatgataatggaacagagctgtcgtgcttggatgaagtattcttgtcattggatgatgatcttgatgaaattagcttaccaaattattagctattaatgcaagtgatctagctagctagccgcagtatacaactggataattaattaa

SEQ ID NO: 28635 - DNA, 760 bp, Glycine max
  Clone ID: TF_GmC56379_1
gcgaaggaaagcccggaattcggctcgagaaagaacataaatagtatatacgagtcctagtttcatataatagttccatataacaaacattatggaagaagattatccacccgggtttcgtttcttcccaacagaagaagagcttgttggcttctacctacacaacaagctagaaggccaaagaaatgccatagccatagccatagacagagttatcccagttattgacatcaatggagttgagccttggaaccttccaacacttgctggggagctttgtcgtggggacacggagcaatggtttttcttttcgcccggtcaagagagggaaaccaggggaggcagacccagcagaaccacagcttgtgggtattggaaggctacaggttctccttgctatgtttactcttctcacaacaaagtcattggggtgaagaaatccatggtcttctacaaaggaaaagcacctatgggaacaaaaaccaaatggaagatgaatgaatacagagccatccatgtcccttcccaatccacccctgccacccttcatttgacatgtgaattcagcttgtgtcgggtatatgtcatatcggggagctttcgagcatttgatcgacgaccattagagaaagaaggagcagagtcgcgggttcatagaattgagaatattttgggtggggcacgtgctcaccaaacttgccctcactctcagatgctagaagctggagaatcaagtagcacaaagtgggatgtgaataat

SEQ ID NO: 28636 - DNA, 785 bp, Glycine max
  Clone ID: TF_GmC130308_1
taggtagtagtagttgtagcccctgcctgagattaactatatactagttgttagttacttacttacatacatagagatagagtcaatggcaattgcagctgcaaactcatcacccaccatgagcctcagccatagccagagccaagaggatgccaccaccgcctccaccaccaacaagcccgtcgacgtcgacgataatgatgatcacgagcacgacatggtcatgcccggctttcgcttccacccaactgaagaagagctcgtggaattctaccttcgccgtaaggtggagggaaagcgtttcaacgttgagcttattactttcctcgatctttatcgctatgacccttgggagcttcccgccttggcagctattggtgagaaggagtggtacttctatgtgcccagagataggaagtatcgcaacggtgatcgtcccaatcgtgttactacctctgggtattggaaggcaacaggagctgataggatgatccgaaccgagaattttcgctctatcggcctcaagaaaaccctagttttctattctgggaaagctcctaaaggcatacgaaccagttggattatgaacgagtatcgcttgccgcaacatgaaactgaacgatatcaaaaggctgagatatcgctttgccgtgtgtacaagagagctggagtggaggaccatccttccctccctcgctgcctcccaacgaggccatcctcgtcaagggcttctcatgacaataataagaagcacaatgaaatggttcagcacaacatcaacatgg

SEQ ID NO: 28637 - DNA, 1425 bp, Glycine max
  unsure (1)..(1425): unsure at all n locations
  Clone ID: TF_GmC1131_1
agccggaantggctcgaggtaagcaactgcttaatttattgatcaaacgtacagctcctaattttcaagtatttttctttctcttcttgaagaattaagaagaaagtttttgtagttaatttttctccaaaggaaggaaaaggaagcaattatcaaggaggggactacggaaatagaaatggaaggaactcgtgcaaaagagggaaccctaccaccgggatttcgatttcaccctactgatgaagaacttgtcacttgctatctcgtaaataagatatcagattctaattttacaggcagagcaataactgatgttgatctcaacaaatgtgagccatgggagcttccagggaaagcaaagatgggagaaaaagaatggtacttcttcagtctgagagaccgtaaatacccaacgggtgtgagaacaaatcgagcaactaacaccgggtattggaagaccacagggaaagacaaggagatcttcaacagtgaaacatcggagttgattggcatgaagaagactttagttttctacaaaggcagagctcccagaggagaaaaaagcaactgggtcatgcatgaataccgcattcactcaaaatccagctatagaactaacaggcaggatgaatgggtggtttgccgggtattcaagaagagcggtggtgcaaagaagtaccattcctccaaccatgcaagaacagtgaatccatacagcttggaaattggaccaagtatcatgccaccaccaatgatgcaactgggagatcctagtgctcatttcctttatggaagaaactacatgaacagtgctgagttagctgaacttgctagggttttaagagggggtggatcaaccagtagtgtcaacctcccaattcagtctcagttgagctaccctacatcatcatcagctggaggaggaggattcatcatttcagggctcaatttgaaccttggaggaggagcaacagccacaacacaacccattttaaggccaatgcaaccttctcctcctgtccatacaatggcccaagtacttgatgtgaattccagcatgatgacaaccagttctcttggtgctgagaataatgttggttatggaacagaagtgagtaacaatatgaattctcatgggaataggtatatgggcatggaccaccattgcatggatcttgacaactattggccttcctactaaattatgatgagagatttttatttagttaattaggcataatctattactatatatttagctttagttggatcagctaccataaaattgaagttctgctattttcttgtgtttcgaagttttatgccggaaaatgacgaccggtatggtattctagtgatcgtgtaccttttcaatccaataatattttaaatgtttgtttatcgattaaaaaaaaaaacgaaaaa

SEQ ID NO: 28638 - DNA, 204 bp, Glycine max
  Clone ID: TF_LIB3242-679-P1-J1-C10-F1A
aattcggctcgagcaataataataactgcattgttgcctctggcttccccccctgctctacacaaaaatatatgtattagcatgtgagaaggtgaatttttgtgaagaatggagagcttatattgcctccggtgtttcgatttcaccctactgatgaggagctgtttttgtaatacttgaagcgcaaggtatcttactgtcctg

SEQ ID NO: 28639 - DNA, 1526 bp, Glycine max
  Clone ID: TF_GmC1474_1
ctcatatccctcaaggtttggcttgtgcctttgtgtgctcatttttcactaaacaccaacccaaaccttatacacaaacattcttaattttgatatttttgtttatatattctaggtttttgttaattaattatattaagcatcatgggaaccccacaatccaataacttgccaccagggtttaggttccaccctacagatgaagagctcattcttcactacctaaggaagaaggttgcctccattcctttgccagttgccatcattgctgaggttgatatctacaagtttgatccatgggagctaccagctaaggccgcgtttggggagaaagagtggtacttcttcagtcctagagaccggaagtacccaaatggagcgaggccaaacagggcagcagcttcagggtattggaaggccacaggcactgataagaacatagtggcatcactggcaggaggagtgagggagcactttggtgtgaagaaggctttggtgttctacaaaggaaaacccccaaagggtgtcaaaaccaattggatcatgcatgaatatcgccttgttgacaccaatagacccattaggatcaaagacacctccatgaggttggatgactgggttctatgccggatatacaagaagttcaagcatgctgtatctccaaccacagaggcagcatcaacactgcaagtgatcaatgagcaattagatcaagcagtggtagaagaagaggagcaaatcaaagacacccttttaccaattttgaagaataacaacacttttgtccctcctccacaagccacaatactcatgtctcagaaatccttatccttctcaaatctcttggatgccacagactactccatgcttagcaccatcttatctgagaaccactccaataattaccctactccaagtgaaaccagcttattcaataattgtgagaatctggatcaggaaattaccccccaaaactactacatcaacgatactaatagtattaataataatagctacttgtttcagaagaacccttccaacatggaaaacattgctaggccaaaacgccaccttccaaacatggatcatgaggacaacatgttattataccctttaaagaaatatcatagttcctcttgcaatttccccaacaccaacctccaaaaccagaatccacaatggaacttcatgttcaagcagccactcatgagtcctcaatatcttcaatttcagtgataaatagcaaacaattatacgagtcacataaagaaaagaagaaaaaaaggttagggagaaaataaaaatgaaaaaaaaaggtgaaatatctacaagatgaatgtgctacatggtatccacatcaacctgttcactacgtaaggattagcacacagaaagatagcattttttttctttttcttttatgttgaaaaatgatgaaaagagacttcattggatcatgaactattacggaatcacagaaaaatcgtgtacaaataaaaatgttaatttgtacgtgttgggttggg

SEQ ID NO: 28640 - DNA, 417 bp, Glycine max
  Clone ID: TF_LIB3051-059-Q1-K2-D5
cccacgcgtccgcacaatcccaaattcccaattctctcttccttctccacaccaattggcaaaaccctaacccccaaattctccttcagcgattcatctctcttgaatcgaatcgatggcacggatgggcccagggttccgattccaccccaccgacgaagagctggtggtgttctacctgaagcgcaagatgaccggaaacctctcccgctacgaccacatcgccgttgtcgacgtctacaagctcgagccctgggaccttccccgttagcacccaattatcttcttccttccccttttttgtggtctcaatagataggcttttgagaattttggaagtgttttaatttgtttcggtgtttcagctctgtcgaagctgaagacgaaggacttggaatggtacttcttcagcgcgct

SEQ ID NO: 28641 - DNA, 2064 bp, Glycine max
  Clone ID: TF_GmC6673_1
tcgaagtcgcctcgaaaaatttctccttgtttgtacggcacacaagtgagatcaaagatggaaaatatgccaccaggttatcgtttctaccccacagaagaggagctgatttcgttctatcttcacaacaagcttgaaggagaaagggaagacatgaatcgagttattccagtcgttgatatatacgactacaacccatctgaactcccacgtaaaaatcttatatatatatatatatatacatatatatttccctcatctccctctttctcttttcatttttctaatttttttttcctttcaatcaaaatcgagcttgacttgaaagctatggtacaagttgatttattgcatatatatagaagcaaagcacattctggataatttaaggttacatacttttcttttaatttttcttaatgactgtaataccgtaaatgctgttgatatattattattctgtgatcaagattggagaaaaggatatacagtccttttggcttcatgaagattgctcataaaattaatattgatagatatatagatatacactagttttgcgtaactgactggtatatttgatattaaacatgatttactgaaacaaagatatagatgcattgatatatttttatttggtgttgaattgcagaaatttcaggagaggcaagtatgagagacacggagcaatggttttttttcattccgaggcaagagagtgaagcgagaggagggagaccaaagcgtctcacaactacagggtactggaaggcaacagggtctcctaatcatgtttattcttcggataatcgcatcatcggaattaaaaggactatggttttctatagtggaagagctccaaacggaaccaaaaccgattggaagatgaatgagtacactgccatcaaaacatcatcctctagtcccacggtaccttatatttactatacgtgtgtctaagaattagggttggctacattttaattagttgcctattaatttaatttgttaaatcttcaaggtttatcttctctactctccatattctcttcttccttcttctcaaatatcagaatttgagcacccttctgaacaaaaaaataaaataaaaattgagcatttttatttcttacgaatgcattgacacagaggcatttcactgaattttatcaactaataaaataataaaaaccaaaataaattgtgctcgatcgtgatatttcataagtatttcgtacgaaactaactcgtacattaaaaaaattgatcatagtactcaatattattctcagtcgataattaacttacaattaatcaaccattcagtcagaacaattaggtttgaattatatagtatatactatatatatagcatggaatttcatggatgcagtgcaattttaaatatttgttacgtgacagtgcagttttatatatatatattgtatacagatcatatatagttgcacttcttaatataactaaccttctgattctactatatattaattgcagctaaggaaggaattcaatttatgcagagtgtacaaaaaatcaaagtgtttgacagcatttgatagacgaccaccgccaaggagggacacagaaagctattcgggtgctcaaaatgtagaagagcaacaaaagggttcaacatcatatgatgattatcatcataaaatggtggagagaagtgcaacgtgttcaccagcagagagctcttcctccggagaccatgaccaaccccctcttcacggtgaggaagctactcaaatggatgttgacaacaacgatgacccttttttggattgggagaaagtggatatgttcttgggatcagaaccatgaacacatccaatccaatctatctgtgctttgttggtatgctacaacaaagttgactctcaagtctcagctacaccgatgactgaataagtagtaggttatgttaattaattgtgtatgtcgcaccgcatgcagaacaactactttaaatatttgttagatttcttgctagctttataaagttgtgtatagtggctaatttgtctgataaattatcac

SEQ ID NO: 28642 - DNA, 377 bp, Glycine max
  Clone ID: TF_7685641
agcttgttgatttttatctcaagagaaaaattcagcagaagtctcttcctattgaactcattaagcaagtggatatttacaaatatgatccatgggaccttccaaagctggcaggtactggggagaaagagtggtatttctactgtccaagggacagaaaatacaggaacagtgcacgtccaaatagagtcacaagagctgggttttggaaggccactggaactgacaggcctatatattcctctgaaggaaagtgcattggtttgaagaagtctcttgtgttctacagaggaagagctgctaaaggaatgaaaactgactggatgatgcatgagtttaggcttccttgcatatcagactcatgccctgccaaaaaa

SEQ ID NO: 28643 - DNA, 226 bp, Glycine max
  Clone ID: TF_uC-gmrominsoy158g10b1
ttgtttttacacacttttactctttagtttctgcaagatgctttttcaattctcaacagtggccactacaacataactttacttaccccctggattcagattccatccaacagatgaagaacctcttcatccacgtatcttcgttgcaaatgcgcttcggaacatatttgtgggtgccataaccgtcgaaattgatctgttcatgtaccacccttgggaccttcca

SEQ ID NO: 28644 - DNA, 383 bp, Glycine max
  unsure (1)..(383): unsure at all n locations
  Clone ID: TF_jC-gmle01810075f03a1
agaaacagcgtgctcctatctgatactcaaaaaccaggattaangttttcggcacgcttccgaatgctaggaattcgtttcgaggagagaccctcttgcacatttgagttttcctcctgggtttaggttttaccccacaggtgatgatcttttggttcagtacctttgccgcaatgtttttggccctcatttctctctttcaatcattgctgaaattgatttttacaagtttgttccatcccctcttccatttaaggccgcgtttggggggaaggagtgctatttttaaaggccaagattcaggatttacccttttgttttacgcccaaacagtcaacgtgatttctgttttttgtaaagacccctgatatcagacttttatt

SEQ ID NO: 28645 - DNA, 145 bp, Glycine max
  Clone ID: TF_11412668
tcaattgcccccatgcttctaatttcatccaactgaccataatctggtgttacactatctctgccgattatgcgcatcgcagtctattgacgttcccctcatcactgaaatctacctatacatatactacacttggaacttacct

SEQ ID NO: 28646 - DNA, 247 bp, Glycine max
  Clone ID: TF_LIB3093-046-Q1-K1-A1
tatgctttcaagttttaccaattgggcactttgaatagtgtcgtcattaatgctttcatggtcatcaattaaaccccctaaacagcatttatcttgctagccaaattacttattaattaggcacataatgttaaacccataatcctatttgtcacctgattttaggttccaccctaccgattatgaactcattcttcactaccttagtaaaaaggtatcatccatacccttgctctattccatcatt

SEQ ID NO: 28647 - DNA, 505 bp, Glycine max
  Clone ID: TF_uC-gmflminsoy078f11b1
ttagatttggctttgtgtctttgtgtgctcatttttcactaaacaccaacccaacctcatacacaaacattcttaattttgattttttgttattattttctttgtttgttaattacttatattaagcatcatgggaaccccacaatccaataacttgccaccaggttttaggttccaccctacagatgaagagctcattcttcactacctaaggaagaaggttgcctctattcctttgccagtttccatcatagctgaggttgatatctacaagtttgatccatgggagctaccaggtttgtctacgtttaaataagatctatattcttttttatattttaaaacttataaagataagaattgctttaatatctagaaaaaaattatggattttgatataattaattttagaaagattggacactctagaaaagtttttcaataatagcattaaaatctttaaattttctatcatgtcatagaatttctcttaagatataccatg

SEQ ID NO: 28648 - DNA, 648 bp, Glycine max
  Clone ID: TF_jC-gmro02910073d08a1
tgactttatgcacactacctagctcggaattcggctcggctctcttctgctctatttttcgtttctgactcagcctttcgaatcctctcacccagaggtacgattcgtaccatgtagttgtgggatttcggctttgccacttcttgattccaataattttggtttctttttttcccctaatttgatttccccagttagggtttttaactctattcgatcggcgatttcgaatactcggaggctcgaatcgtgttgggggttttccgttttgattaaaaaagtttccgtttttggtgttgggtgatcaagggttgtttgattttttcttgcgatcgagaatgggtgaggcttcgggagctggttccgctgattgtttcagccagatgatgtcgtcgatgccgggttttcgcttccatcccacggatgaggagttggtgatgtactatctgaagcggaagatttgtgggaagaggctgaagctcgacgtgattcatgaaaccgatgtgtataagtgggatcccgaggatttgcctgtgcaatctatattgaaaacgggagataggcaatggttctttttctgtcacagagataggaaatatcctaatggtggaaggtctaaccgagcaaccagacgtgggtattggaaag

SEQ ID NO: 28649 - DNA, 1127 bp, Glycine max
  unsure (1)..(1127): unsure at all n locations
  Clone ID: TF_GmC165789_1
gctccgctccacctccctgtcgtgcttccggtcgtttcctccgccgtgtagtgttcccgttttcacggcgctctctcgctctctctcttcccttcgggccctcgtgaataattatatctttctttcaattcctatcctcttccttgtagtgtacccattttgaatgtgttctctctctctctctctttctttaggtccctggtgaatatctagaaccactctctagctagtttctctcttcttgctagctagctatcgccgatcactctcttggtttaaaccacctgaatgccggaaaacatgagcatatcagtgaatggtcaatctcaagtccctcctggcttcaggtttcatccaactgaagaagagcttcttcagtactacttgaggaagaaggtctcttacgagaagattgacctcgacgtgattcgtgacgttgatctcaacaagctcgagccatgggacatacaagagaaatgcaaaataggaaccactccgcagaatgattggtacttcttcagccacaaagacaagaagtaccccacaggaacgcgcaccaatcgcgcaactgctgcagggttctggaaggccactggccgcgacaaagtcatctacagcaatggaaagaggattggaatgagaaagactctggttttctacaaaggaagagcgccacatggccagaaatccgattggatcatgcatgaatacagactagacgacaacaacaccgcggacaccaatattgtgtccaatgtgatgggggatgctgctcaggaagaagggtgggtggtgtgcaggatattcaagaagaagaaccatctgaaaaccctagacagccccttggcttccggggaaggtagaaggagccacttgttcgactcgtgcgacgagggagctttggagcaaatacttcagcaaatgggaaggggttgcaaggaggagagcagctatgaaggcaactacaacagctatggaaggtttgcaatggggttgaacaatggcggcggcggtggatacaatgataggttcatgaagctcccgagcctcgagagcccaaaatccgcaagcatggagaaccaccacaacaccaacaacnnntgcaacaataacatgaagagtaataa

SEQ ID NO: 28650 - DNA, 1988 bp, Glycine max
  Clone ID: TF_GmC206_3
gtaataataagtaactctcataataatccacatataaatttcaaatatacccagacctgacaaattttagtcgattcttgacccattttctactcaccagtttcaagaattgtgcaggtcgatgaaataaccggttctcgatccatagttgcataccggttattcaggacacatgtttatttatcgaacaatattaatctaatgctaatgtttttttttttttttacaagttacaaccaacaaaagatcattacaaatacaaagacagattccacaagataagatcttatccatgtacaatcaatctccaaaataaagtgctctccgggttaataaagaacaatatattacatggggccaaaaagaacaaactaaataaacttatccaaaaataagattagacaagcataaaaacttgctaaagtttttatgaatcaagttagcaattcaccctgcaaattcctttacagcgccttctcttgaattaaggttcattagaattaccctacaccttatattgcctccagtattcacaaagatttttttttattttgagaatatgttaggacagcactgtttggtaattctggggagatcccagacaacagtcattctgggaggtcccagacaaaatacctagcagcaaaactttggatttacataaatatattcaaggagaaatacttctacctactagtcttaagtttccaacaaaaacccaacaaaaagcacataaagcaataagaatagagaagaaaaggaatggaagtccctttctgccagctctcttcatagttccagtgtctttacctgatgcagcaatgttggtgtgcttgatcttcaacctgctgaagctagacattcgattcaaagctcggttcaccaatgcactttcagcagctgatgcaggagtagtaggtattgactcaacaaaggcccagagagcagaggacaagctacttgtagcaacatcttccacagtgctactttgattgttattgccttccgtaggaaagccaacagattcatatacaacacctggggatgatagctgattactttcaccatgcatccagaattcaccaacagtttgattggcatcctctggatttggcagcaattggtaactttgacattcaatattgctgctgacaagggcatttgtatatgcatgtgaatctgtttcatgaataattggccccaagtcacgaagaaacatctgtgcatcttggaacaaatcaagttcacttaacccatcttcaaaatgctggtactccacagaattttcaacatttgacaatgtaggttcagtatcaatgagatcattaatttccaagaagccatcctcattaaagtcaagctcctttgttttaatgttggaagcagaagtgacctcagatgtttcagaaacatgcagatgagaagtaactggccgattgaagtcaaagctaggctgtgcatcaaaaaattggttgctaggctgtgtgattctgactggctcagggaacatcacagcctcagagaactgatccacaacagtactttgtgtttcttcactaacaacctgaggaaagtcaggataaccattcacatgctgctgatcaaggacaagctcatcatccaaaattcccctaatgatgttgtcgatttcatcatcaagcaaaggctgcagtacattaccattatcaacatcatttggagcctcctgatcagctgagttgatattaaaatctactatgtcatcatctgcccactgttcttcattaaatggtgcgccatactgttcaccattttttggaccaggtccacttttcttgtaaaccttgtaaagtgcataatagtccttaacacccaggcatctcttaagctcctcttcatccaaggtatattcatgcataacccaatcagtccgctcaccactaggagctctgccagcatagaaaaccagggtcttttacactccaactgacctagaattgcctcgagcc

SEQ ID NO: 28651 - DNA, 913 bp, Glycine max
  Clone ID: TF_GmC625_11
caaagtaacactagaactcacaaaggacagaagaaacgcgaatgccaggagaactccaattaccacccgggttcagattccaccccactgacgatgagcttgtgaatcactacttgtgtagaaagtgtgctgcacaaaccattgctgttcccatcatcaaagaaatcgatttgtacaagtttgatccatggcagcttccagagatggctctttacggtgagaaagagtggtactttttctctcctcgagaccgaaaatacccaaacggttcgagaccgaaccgggctgccggaagcgggtactggaaggctaccggagctgacaaaccgatcggaaaaccgaaagcccttcttgaagctgggagtcaagactcgcggctgtaacggcttatcctacaccctcaattacgcagatgaaaaagggaagtttgatgagttggttgaggataagggtgttatgatactgattgatccaaaggcccttatgcatgtcattggaactaaaatggattttgtagatgacaaactaagatcggaatttattttcgtcaatccaaattccaaaggtcagtgtggttgtggtgaatctttcatgacaacaggaagtagtggatcttctaagccatgaaatagttaaaattgctatccaagccgtggatcctcacgtaatgaagtcgtcctttcatgatttaattgatagatagacatacaagtacaactaatggatttctattattctgcctgcgagaacaagggaaacgaaaactttggtgctcagaacaaaaggatactgaggactgacatggtctcgatatacagagttctctgaagctgatggtaataggcttatttcaacaatttttattgtcatttgttttgatgattcttatttctaatataaaattctttgtatc

SEQ ID NO: 28652 - DNA, 1458 bp, Glycine max
  Clone ID: TF_GmC1311_1
tacctcgagccgaatcggctcgagataagagaatctaaagaaagaaaaagccaggctcaaaaagttgtgttattgtatgcatgagaattgaaggagagaggtgaagactcattatcatcatcatcatatcatcgtcatgtatagcatggattcatcatcttctggatctcagttttctcagcacccacaactccctccagggtttcgattccaccccacagatgaagagctagtggttcagtacctcaagaaaaaagcagactctgttcctcttcctgtttccatcatcgccgaggttgatctctacaagtttgacccatgggaactcccaagtaaagcaacttttggtgatcaagaatggtactttttcagcccaagggataggaaatacccaaatgggacaaggcctaacagagctgctacttctgggtattggaaagcaaccggaactgacaagcccatacttgcatctcatggtcaccacaacaaagttggagtcaagaaatcacttgttttctatggtggaaagcctccaaaaggtgttaaaaccaattggatcatgcacgagtacaggcttgctgatagctcctcaaactctagctcaaaacctccttcttcggcttcagatcatgcacacagtggcaagaaaaactccttgaggcttgatgattgggttttgtgccgaatatacaagaaaagcaacagtacccacctgccaaggttacctttgatggagcagaataaggagatttctagggagatttctatgctaccaatgatgtcaactttgtcaatggctaatgataacaacactcctcaggattccaaaactgcgtcttctagaagcacaagttatggaccccttggagtagaaaatgatgataatttctttgatggaatctttggagttgatcatcagagcatgcagcaagatgtttctgatcattcccaacaagtgtcttcaaagggaaacttccctatgaaaagggaactttcgtcacagttttggaatggcacagggtcatcctcttcaagcaggagattccattacgatcttaattatgctggaaacagcactactgttgaggaagacaattccttcgtttctctgcttagccaccttccacagaacacaacaacgtttcacccaaatgcgcttcttggccctgttggtaatggtgtattgaggcaacagtttcaacttccaagcatgaattggaatacttagggtggttaatttggcttagggtatatataccgggtaagggttggataatgtagctgccattgtaggtttatattataagttaatttaacttgggttttattagccatatatacataacatactagagagagagagagatcatgaccgtacgcttgtatttttgtgagtttttttttttgaagcttatattaaactgaatacgatataatactgctgttctgtatcaaagg

SEQ ID NO: 28653 - DNA, 462 bp, Glycine max
  Clone ID: TF_LIB4127-116-Q6-J1-E9
tggccctggggagcataagatgtttcccttgcctgagactaactatatactagttgctagttacttacttacatattagagaagagtcaatggcaatagtgctgcacctcatgatcctccctgagccttagctcatagccagagcctagaggatgcctccaccgcgtacaccaccaacaagcccgcctacttctatgtataatgatgatcatgagcacgacatggtcatgccctgctttcgattgcatccaattgaagaagagctcgagtaattctacctctcaccctaagagtgcagggatagcgtttgaacgatgagcttattattttcctcaatctatatcgatatgacccttgggagcattccgccttggcagcatattagtgagaaggagtggcacttatatgtgcccatagataggaagtatctcaactgtgatcgtcccattcgggtaactactc

SEQ ID NO: 28654 - DNA, 3243 bp, Glycine max
  Clone ID: TF_GmC434_1
gagtagttgctctgcttcatcatcttctctctatctttgttgcaaacttacaaacacagtactgagtttaagtgttcaccaaaaaaaacaatggatgatgatattgtaggactcggttttcgtccaacagaacaagagcttgtcaacttttacctcaaacacaagttgctcggcgatgatccccgtgtccacgtcatccctgtcattgatctttgcgatgtggaaccttggaatgtaccaggtaactaactcaacacccctttgtcctttttcttcctcttctctttacttcactgttgtttgtttgattctttccttgttttcaaaattagtgatattagcatcgtcatcagctatacgatttggtgacccagattggtttttcttcagccctgttgatttcaagtacttgaaaagcaaaaggtttaacaggacaaccaagtgtggattctggaaagccactgggaaagaccgtgacattaggacaagggacactgataacactgtcattgggactaagaagactcttgtttactatcaaggccgtgtttcctgtggtgtcaagtccaactgggttattcacgaatatcatgctgttacctttcatgaaaaccaggttcgtttcttttattcaataaattttaacactgcttgaaaataatctttctactaaattataggctttgatgttagagggccatatatgttgtactagtttgtactttttaggctttgatattagaggttttttttttttttttttaatgatacaagaatgagaggaataaatctagacatataatgatacttggattataaaggtttaatatcatgtgaccatttaaaaaaagttatgtgattatttttaaatctcatatgacttgtatgttttaattgtggccaatatttattctttttacactcatatcaaaaaggtcatctcactagatatgtctccttatttgcaatcctattggttgttctgagttctgactttagcagattgctgttattggatactttgtttgaatctcatttattttttttgccgtctcatattgctgttcatggcccaattttctacatttagggtcttgcttgatgaatgatgacaaagggggcatgaaagaaatatttagcttataaacgtgactgatgaccttcctataacctctttttaagcttatttcaatgaattttacatgggagcttatcaaaacaagttctttttagtttatcaatgagctcctcgacaaagcttatggataatctcatgtgatttattggataagtgtttaattaaatcttttatctaagcactctcaaaattcatcatcagtgttcatcaaagactgtcaatttcttctgtataaattagtctgaatttccttgttcttttatttgtgtgaattgcatcaaataaatgctgattatactcaaaaaattatgcagaggacttttgttttatgttgcttgatgaagaaacctgagaaaacaactgaaggcggaactgatcccctgatctgtgatgaaggggagcccagcagaagcatgatttctgactatgaaaatcagccaacagcagaaggaattgcatctgtaagatgaagcatcctttgtggacatatttacactctgccatgtgaaacatgctgagaactgatacttgtttcgtatatttttttttctttttcaggaaggtacttttacaggaatagaggcaatctttcaggcaaccccttgggcagagaattgcttctccccaatacaacagtctccgactcttattgagcaggaaggagcatcctttccaaactatgcatttaacaatgcctattttagaaatgaagacaacattatgcagactccatttgaaactacaaaggaagatgaattcctaaatttaatcttagccgatgaaagtatagtgatcaatgaagaaaataagcatgattttgtcaatagctctacccaatcagagtcattgaaaagggtatactgtgtaagcagtgatacagatgctgaagtcatctctaaactggtaaagatttatcaagttcaaataatactggggagagtatctccatttgtttctgaagtggcattggatctataggttaaaattgtagtgtgcattgtggttatgtgaatgttgccacatttttgcattggatctataggttatgtcatgttttgttgtgattcatgatcatgaatgattcacggctgatactttagagcatgcttggatgaagggaatagttaggaaagggaacaaaatggagataaaccaatctatttctgtacccatttttacccttccttgcatctcttccctaacatacatcctaggatttcagaatcacaagtactcttttcttaggtttctgatatttgtttagtttattttgagctcttcaagaattgaattcatctacttactttcttctgaaatcattacaggatgacaatattgtggatatttcaacagcatgtaatgattatcctaattcagatgaatactattcatcaaaaaggtttaaatcatcacatgatgctgtccatggtggaatatgttttctaccttctaaccttgaagcaaaccaagagaaaaacgagagtatgtttcaagatagtttctggggagcagagacatcatcttgtgactcgacactagataaacctttggagatcaattatattgatatttctagttctcctttcactccatggagatgagaaaattaatatcattgaagaccagtcaatttcgtatgatgggaactaagatctaagttagctccattagattggtagtagctattttggagtatgtcataaaatatgactagttctacaatagcaaatttattagaaaacaattctgtattagaaattgcataatggtagttatgcataaaaaataactatgggcagttatgtattaagatttaggagcttatatcctaacagtaaatctattagaaagtattaaaaactgcatgatagcagttatgcatagaaaacagccactagtagttatgtattaagagcatatatgtgatggtattagtagattgtgtaattaggaagtatgtgtagttgtttgcagtttatggacagagaatactctatgtaggagacttttgtctctaggacaacaagtgtattttgtatcaatgtattttgtgtgattttagtatttcaataatatatttcattagtttttggaaggtgagccac

SEQ ID NO: 28655 - DNA, 1329 bp, Glycine max
  Clone ID: TF_GmC1127_1
gaacctgtttgaatcatccacggtagcaactcagcacaatgcaagatggaagtgcttcccacttcttccatagagcaatcaacgattacaacaccggcacccgaaagcgccgaaaaatactagggcaagattttggtgatgtccgctggcacaagactggaagaactaaaccagttgtctttaatgggattcaaaaaggctgtaaaaagattatggttttgtatgttagcaatgtaaggggaggaagagctgagaaaactaattgggttatgcatcaatatcacctaggaacaaacgaagatgtataggaaggagagtacattatctctataatcttttacaagtagcagtaagtcaaattgggtgataaatatgatgaagatgttcctgaagcctctgaaattaatgtattaacaattgtgaaagtggatccagtcactcccaaatttgtgactcctgaaactccttgtaatgaaaggtggtgtgcagatctagaccttggacaagaaacacataacagtccgcagcttcctcagatggattgtttagatgagattcaagctgattaccaagaccttgcaaatgaatcatctatggtagaaactcaacacaatgaagggatggatgataaagaaaaaaataccgaggaaggccaaaaatggtgggacagtgagtcacagaatctgttggattcacaacaactggtcgaggcactatcactgtgtgacgatctactccaaagccagtctcccagtagagatggaaaacatgaagatcataagaaccaacccggtctttctgtttatgctcagctaggaccagaaaatctgaagaaggatattgaagagtgtcaaaatcttgcccttgataaagcaaatatagagaatgatacaccttcagagtttcgactaagtcagctggaatttggttcacaggacagctttatttcctggggctatggcaaggcagtgaactaatatggttcttcacctcagctgggcaagctgatgtttttgtaactacattttgttgttgagattcctttcaaaattatgggctaatccttttccccttttggttgaagggctaaactcaactgttgctcctttgcttgactaattgagctgtaatgttaaagcaatgaactttgttgcttgatactttgatcaagtagtattgtaattataccttgttttggcttgttgaagttattgtatcttccaggttctctttatatcttggatgtgtggacctgacttggccacatataagcatacaactctcatgctgaagtaatggacgcaggtgcatgtcactatgttgtaggaa

SEQ ID NO: 28656 - DNA, 238 bp, Glycine max
  Clone ID: TF_6454111
ggataaacgggggggttttccgagaccggtggggatcaataaagcgttggttttttacgctggaaaagcgcccaatggagagaaatctaactggattatgcacgagtgtggtcttgcagacgtggatctgtttcgtcgcaaaaagaacagctataggctgtattactgggtgctgtaccgattttacatcttgaaatgtgcaattgattagcaacatctgccatcaccgaatggggtc

SEQ ID NO: 28657 - DNA, 509 bp, Glycine max
  Clone ID: TF_GmC94853_1
gtatgatccttgggatttgccagggaattgtgatctacaagagaggcactttttcagcccgaaggaagcaaaatatcgaaatggtaatcgcatgaaccgaacaacaaagtgtggctattggaaggcaacaggatcagacaaaagaatatcatcttcaacgtgtaacaatggtattgtcggggtacgaaaaacattgatattttatgaaggcaaatcaccaaaaggctccagaactcactgggtcttgcacgaatatcgtctcgtcagtgtagaaactggtgctgccaactcatcccataataactatgtgaacgagataggagattgggttctgtgtcgcttatcgatgaagaaaagaagtctagaaagtgatggcagcgccactcatcagaagcataggcaaaataatacagttcaaactagtcgtccaagattaatgtttgattttatgatggtagggaagaccaattcttctacatcctcatcatgttcaagttccagtaacatca

SEQ ID NO: 28658 - DNA, 1933 bp, Glycine max
  unsure (1)..(1933): unsure at all n locations
  Clone ID: TF_GmC398_1
catttttcaataacaagagagagagagagaggcgtagttcacttcacttcaccactctcgcaacttcaattcttcattcttcttctctctctttgacaggtgtcaacaattctcctgtctcgttccgtctcccgaatccgtacgattttctttgagggtttgatcgcgccgatgtctgtttaccacgaaatcggaggctcttcatccatcatcggcttccgatcctgcttcaccaaccgcgccaggcttcgctgtcccgctaagatacgctttcgcttttgagggttttttttttcttttttttttttcctctcacacatgaaatagtaataatcgcacgaggtttcctttccactcaaattaacaaaaaaaaactgctagattctgaagcaagcgttgtgttgtgttttattttcgattccatggccaaagctgttggagttcggttccaccctactggtgttgaattagttgtgtactttctgaagaggaaagtgatggcaaaaaaaatctgtgatggtttcattgctgaacttgacatatacaagtatgctccttggggtctcccagataagtcttgtctgagaactggagaattggaatgggacattttctaaccacctagaaagaaatatgaattatgggtttagctgattctgtgcattgaaatttggcaactcaagttccgcgagtgattgtgtatatgtgtttttattttttaattcgtctcgaggataaagacactgatatttcacacgggtaaatcgcctcgtggcgaaagaactgattgggttatgcatgagcataggcttgaagataaggacctcgctgacaaagggattgctcaggattcctatgtagtctgcaaggtattccaaaaggaaggtcttggtcccgggaagggaacacactatgcgagaccatttaatgaggaagagtgggacgatgaagaaattggaataccttgtgctgctttgactgcacaagttcccaccttgcctattacatctgatggttctgttgcaaatgacaatcatctccctgctagtggatgtattgggtcagcatccacatcatgtctatcaggatcagtgccttctctgggcacagtaaatcctactggtccaaatgatcaagctgttaatgatgatattttaccaatgcttcatatttttaatgatgacaaatggtttgaggagatttataatcctggtcaggaaaatattgttgaaggtgcaccaccttcagatgatttttttgcgggcttggaagactactttgctggtttctcctctggccagaatacaggtgatgttgggaactctgatgacttggacttcttagagttgaatgacctagacaccccattattctatccgaccacacaaccttgaagttaataagagtcgcaataaaggggttgttttggttatgacttacgactgacctttggcaactagctagaggacaatttaaattattgttttttttttcttattctgtgctttgaacattgactctcaagtcccgtgagtgattgtgtgtatatgtgcttgtttttttcattttagaacttccttctcataacgaaaaaaaaaaaaaaaaaaaaaaaaaaaaaaaaaaaaaaaaaaaaaaaaaaaaaaaaaaaaaaaaaaaaaaaaaaaaggaccattcataaccctaatttagcatagtgtgactctttggataattttctctttaagcagttccaaaattaagcttctgtcctaaactctaattcttttatgaactatatttctcttttacgttcttttatttactttctccaaattggtgcctccgttaatggttagtctccgnagaatttttgttccttttctcttcgtcctttttgaaaaccggatctcttaacgtcctttggttgcttgccctttatgagggtttacttttt

SEQ ID NO: 28659 - DNA, 1874 bp, Glycine max
  Clone ID: TF_GmC424_1
aattcggctcgagcttgaccatgatgatactgaaaagcagatgctgagaaagttaagtaaacaacttagtggtgaggaccagatatagatcctattgcccagcacagtgtgttcaaattgttccatcttcttcttctttttcatcaatcatcaccagtggttcttttccttctgagaagatcgaattgtgttttaaacatttccctgctacttcatcttcttcttcttcttcttcatcaccggtggttctgttcattcttccttgcaccttcttctttgaagatcgaaattgtgtttttgaaaaaatgggagttccagagaaagaccctctttcccaattgagtttgcctcctggttttcggttttaccccaccgacgaggagctcctcgttcagtatctatgccgcaaggtcgctggccaccatttctctcttccaatcattgctgaaattgatttgtacaagttcgacccatgggttcttccaagtaaggcgattttcggtgagaaagagtggtactttttcagccctagagacaggaaataccctaacgggtcccgacccaacagagtagcccgggtcgggttattggaaagccaccggaaccgacaagatcataaaccaattaaggatcatgcactagtatcgaaacatcgcctccttcccgaaagaacactggcaccaagcttgatgactgggttctgtgtcgtatatacaagaagaactcgagtgcacagaagacggcgcaaaacggcgtggttccgagcaacgagcacactcaatacagcaacggttcctcttcttcttcttcgtcccagctggaggacgttctggaatctctgccatcgattgatgaaaggtgtttcgcgatgccacgcgtcaacacgctgcaacaacaacagcaccacgaggagaaggtcaatgttcagaacttgggtgcagggggtttaatggattggaccaacccttcggttctgaattcggtcgccgatttcgtttcggggaataatcaagtggtacaggaccagactcaggggatggtgaactacaactgcaatgacctttatgtccctacgttatgccacttgggcacgtcggttccgttaaagatggaggaagaggtgcaaagcggcgtgagaaaccaacgggtcgggaacaataattcctggtttcttcagaatgatttcacacaggggtttcagaattcggttgacacgtctgggtttaagtacccggttcaaccggtggggttcgggttcaggaattgaaccctgttatcgattaataatagtagtaatcttttaaatcggtaaataggtgggggattctttgggcttaactcgtgggggttttagattaatcctttagaaaagggaagaagaagaagaagaagaaggtgaaaattttggtcctcattttcagctaaagatgtagggtatacaaacgttcaatgaaccaatccacgagataaagcaatgacgggaccattttaatttgttacgacgtagttttcggcccacacaagcccttactcagccacatgaatcacatttgtacttcaaatgaacagcaagaattttttttactatatgttaggtttcgttaaataattccaatcatgatattactttgttaactaactaaagtccctaaagaaatgcaactcattagaagtctgagaaaaaacatgtctaaagtatttggattgaaaatcatctacctttaaaaagacaccgggggggggggtctaaacccaatctgctttttccagactgtgaaaacactgcctttggggcccctgatgacacttacgttctggatacacctgggggtgctcgagttgaacctccctactcatgctccccttgggcctgc

SEQ ID NO: 28660 - DNA, 384 bp, Glycine max
  Clone ID: TF_LIB3242-682-P1-J1-F9
gcaattcctacacattgatactgttcagtgtctccacttatctttataaattctcaacaagggggggtacaacacagcgtcactgaccccatgaatgcatattccattcaaccgatggagaactagtactccgcttcctatgctgcaaatgcgcttcgcaacatatcgtggataccataatcgtcgtacttgatctgtacaggtacgaccattgggaccttccaggactgggtttgtacggagagaaagagtggcattttttcacgcggagggaccggacgtacctgaacggtttgagggcgaaccggtcacggggaaccgggtactggaaggcaaccggagcggataaaccagtcgggaaccgtgaccgggctgatcaagaaa

SEQ ID NO: 28661 - DNA, 1787 bp, Glycine max
  Clone ID: TF_GmC432_1
ggttgaacaaaaaacaatggagaacataatttccatatgtgatcacatgcctgtaggattcagattccgtcccacagatgaagagcttgtcgactattacctcaaacacaagcttctggctgatgatttccctgtccacatcatccctgaaatcgacctttgcaaggtggaaccttgggacgtaccaggaagatcagtgatcaaatccgatgacccagaatggtttttcttcagtcctgtggattacaagtacttgaagagtaaaaggtttaacaggacaaccaagcgtggcttctggaaagccactgggaatgaccggaaaaaagatcagcgggcaactccaatgaccatgaatggtttgaagactctcgttttccttccaagccgttgaagaggaaaaggcataaccagctaagcaagcgaggcttctgataatccactgggaaagaacggaaagttaggatacggtttgtgccgaatgatgaagaaacctaagaaaaaatttgaagggagaattgcggtgccgtctttggatgaaagggaaaccaggatacacatggtttctgactagggaactccgacaagagcagaaggcatttcatctgatgacattattcctggagtagatatggatgaaatctttcgggcagtggatcaagctgagaaattctcccccccagtacaacagtctccaactggcattgggctggaagattttttcccaaactctccattgttcaatgcccgttttggaagtgaaaacatcaatatgcaaacttcacttgaagttacggatgacgaagatgagttggtaaattcatttttggtttatgatgaagaatttgttatcaatgaagaaagaagacactgttttgtcaatagttccacccaaccaaagtcattgagaagggtatacaatgaaagcagtggaaattggttcagacttcaggaaagagtttatttttattgttttccctctctttttctagaactaaactgaatttggtttataaaatactgtcattgttgaaattaatggatcgaggattggatgaccagaaagacatgagagagaaacacgttagagagagagagaaagagagacagggagagagacaggcactctgtagaggaagagcgcctgagagagggagagcacgccttttagagagacagagaggttccctgagaaatcgagagcctacaagagactgttcttatgacaacaacagaatatacagacgcagcagggagagggggagagatagagataggcgacacgaggaatatctcccacgttgtcggagcatctctagaaactcgagccgaatcggctcgagtacgcgacagaagggggggaaccaggaacataatagacaggatgctgaacctgatcaggaagtatggaccaaggtgataagaaggagggaagcaaaggcagcaaagaagaactatacccagaacagatcactacataacctctcggcaaaccaccccaactggagagacaaggaggatattacatccttttacttcactaatttcacagacaacgttaatgaagtgaggctctgggggaagtttaagatttggggagatgtgcgtgaagttttcattgccaaacgtcgtaacaaggagggaagaaggttcggcttcgtgaggttcaaggacgtttcggacgtaaagcttttggagacgcacctggacaatatcttcattgatgaccataagctgttcgttaaccttcccaggttcacaaggctagcgtcgaatgttcatacgcatac

SEQ ID NO: 28662 - DNA, 1196 bp, Glycine max
  Clone ID: TF_GmC525_4
gggagcaagggggccccccacccttccaattattaataaccccctttttccctctccatacccttttgctttctttatccaataataagaacttcccacgagtggctttaactggtctggtctggtctggtcggacacacaaaaatattagtatggagaaggtgagttttgtgaagaatggagagcttagattgcctccggggtttcgtttccacccgactgatgaggagctggttttgcagtacttgaagcgcaaggtcttctcctgccctctgccagcctctatcattcctgaggttgatgtttgcaagtctgatccttgggatttgccaggttcctttctgctcacacccaccccccttctctcttctcatcttatttactaactaattgcaatgccatggcccctgtttaggtgatttggagcaagagagatacttctttagcaccaaagaggccaaatatcccaacggaaatcgctctaacagagccacaaattcgggttattggaaggcaactggcttggacaaacaaattgttacttcaaaagggaaccaagttgtggggatgaagaagacacttgttttctacagaggcaagcctcctcatggatccagaactgattggatcatgcatgagtatcgcctcaacatccttaacgcctctcagagccatgttcccatggaaaattgggttctatgtcgcatatttttgaagaagagaagcggtgctaaaaatggggaggagagcaacaaggtgaggaactctaaggtggttttctatgacttcctagcgcagaacaagactgattcctcatcctcggccgccagtggaattacacatgaacatgaatcagatgaacatgaccatgaagagagcagtagctccaacaccttcccttatactattagaacgaaaccttaacaaccaagtcaacaaccaccttccttaaaaagttgattatcacctagtttttttttttttaattctctttccctttccctgtaatcatcatcaaccacttgttgaaaggaagcatccctcccaatgagaccggcattagttaaagggtagcctgcagagtatggtactgatagtagcagtgtgtaatggactccccattttccttcaatttaacctttttttctaatgcccatgcttcttcttttagcaaaaagctactcattttcagtttc

SEQ ID NO: 28663 - DNA, 1660 bp, Glycine max
  Clone ID: TF_GmC83_1
gattccaatcctttccctcttgttctatgctttcaagtagtaccaattgggcactttgtttagtgtcttcattttttttttcatcctcatcaaattaaccccctaaacatcatttagctagctagccaaattaattattaattaggcaaataatgggaaacccagaatccaatttgccacccggttttaggttccacccaaccgatgaggagctcattcttcactaccttaacaaaaagggtaaaaaggtagcatccatacccttgcccgtttccatcattgcagaggttgatatctacaagttagatccatgggacttaccagctaaggcaacctttggggagaaagaatggtatttttttagtcctagagaccgaaagtaccctaatggtgcaaggccaaacagggcagctgcttcagggtattggaaggccactggcactgataagaccatagtgacatcattgcaaggaggagcacaagagagcgttggtgtgaagaatgctttggtgttgtacaaaggaagacgcccaaagggtgtcaagaccaattggatcatgcatgaatatcgccttgtagacaacaacaaacccatcaagctcaaagactcctccatgagattggatgattgggttctttgccggatttacaagaagtccaaacatgctctaacttcaacagaggcatcaataggggtgggtgaggtagatcaagcagaggagcacttattccaagagacccttttgccaatctcaaaatctccagcacctccacctcaaaacacattgatatctcagaaatctgtgtccttctccaacttgttggatgccatggactactctatcctaagtagtttcttatctgagaatcataccaaccacccaccatgggttggatcaagtgctggattcaacactgggaatttggatcagcaatgctctccaatcaataacaacaaccctaccaataattacatgtttcagaagaatccccaattgaacccttcagtctccaacatggaaaacatgatgaggccaaagcgccaagtttcaaacatggatgaggaaacgttgtacccatcaaagaaataccttagttcctcttgcaacttccctactaacatcagcaaccaatacgagaacccacaatggaactacctcatgaagcagtctttgatgaatcagcggttaatgcttggtcctcatcttcaatttcaaggataatccaaaaatatcaaaagattaaatgaaataggaaaattaaagtaaaatattcagaagctgagcacaccaaagaataccaccaatttgatcattagataaggaatagtagctaggggtttagtacatagcaattatagtgttttctttttttatttctctttaattaatttgtgattgaaaatgaagaatagaatgttagcttggaagcaagaactatttggtagggaatcaaagaaagattccaccattcaaggatcaagaaactgttaaaacaaaatatccaagtttctatgacaaattagaaacaatttgtgtacaaaaatgttaatttgtacatgttgttggggtttgtttggaggttagctttataatatactttgtagataaggtattgtccttaaaaaaaaaaagaaagggcggccaccacaaatgagctc

SEQ ID NO: 28664 - DNA, 390 bp, Glycine max
  Clone ID: TF_LIB3056-003-Q1-N1-G7
tgaagagagaaggcttaattaataagcaaatggaaaggctaaattttattaaaaatggagtgagtagattgcctccaggttttcgtttccagccaacagatgaagagcttgtgtttcagtacttgaaatgtaagatattctcgtgccagttgccagcttcaatcattcctgagattaatgtcagcaaaaatgatccttgggatttgccaggaaattgtgatgagcaagagaggtactttttcagctccaaggaagccaagtatcgaaacggcaatcgtatgaaccgaacaactaactctggctattggaaggcaacaggatcagacaaaaaaatttcatcatcaataagtaatattggttttgcggggcttagaaaaactctaatattta

SEQ ID NO: 28665 - DNA, 1708 bp, Glycine max
  Clone ID: TF_GmC207_2
ctctctctctctgaacaagacccagccagcagttagggaaatcaagcacagctcaatcattgaatcttagcataaacacatacagaagaaggaaaagtggcaccctggtacgattaaattctctctctttctgcaaatagagaagttgattcagaagaaacgagtccccaaagagacaaagctactagctctacctttcttcaccccttttcatctctatatatttttttttttttttgtattttattagggaggagctgatattgtaggagggtttggaagaaaaagaattttgttttgagatatatatacatatatgtgcaagtgcataggaaattaacacaaaaagatgacatggtgcaatgactctgatgaggatagggttattgaatcaatgacgccaacaataactattactcctaacactgatggcataaagctcaccgaagaaattagaaccataacatgcccctcgtgcggccataacattgatttcgtgaaatattagggtggaatccatgacttgccggggttaccagctggagtgaagtttgacccaaatgaccaagaaatattagaacatttggaggcaaaagtggcgtctgatgcatgcaagcttcatccccttattgacgagttcataccaacgcttgaaggcgaaaatgggatctgttatacacacccagaaaagctaccaggtgttagcaaagatggacagatccgccacttctttcacaggccctcaaaagcatacacaactggaacgaggaaaagaagaaaagttcacactgatgatgaaggaagtgaaacaagatggcacaaaacgggaaaaactagagcagtttttgcagctggtggtgcagtaaaaggttttaagaaaatactagtactctacaccaactatggaaggcaaaagaagcctgagaaaacttactgggtgatgcatcaataccatcttggcaatactgaagaagagaaagatggagaactagttgtttcaaaagtcttctaccaaacacaacctagacaatgtgttaatcccattatcataaaggacccgtacgaaaaaatgttgaatggtggaagtgtccaagacagcacaaatacatcaataactaaaactactgcaactcttttggattgctacaatgctccttacatagattatgatcatgcccatgcgagtcataatagggaaagttcctcacaactaataattcccagctcggttgttcaggttgatggctcttatattcgctcaacaatggatgcaaagaaagcaagatttgaaagtaacactgggaagagcttctaggtagacaagcagtgacaatgatttacagcatgtcctccatattgtttccattactaattgagtaatagtatttatatgtgaaattagactgaaggaattccaagggttggaaaaatataggtttttccttgaattattgagatcaatatggcgcaggcatgatggactttcccataattgaccctggttgaagttgagagacaagcaagaaggtatatatatttgcggtactgtagtttgattttaattttagggtacatgtatattcgtaaaatgtgtttatactttatagatattacaatacgtggtagggttatcgtttattgacaactcttcagaactatgtcagtctatatattatgttttgtctagaattgaacttttcaccccctc

SEQ ID NO: 28666 - DNA, 1783 bp, Glycine max
  Clone ID: TF_GmC423_1
ttttctaaccccacaattttatggccaccacacaatttcatttcatttttccttttcacttcactttcccccaattttctttctcaacaatggccgcagcaacacaactccacttaccccctggattccgattccaccccaccacaattcctacacatttctactctttagtttctccaattttctttctcaattctcaacaatggccactacaacacaacttcacttaccccctggattcagattccatccaacagatgaagaactcgtcatccactacctttgtcgcaaatgcgcttcgcaacatatcgcggttcccataatcgccgaaattgatctgtacaagtacgacccttgggaccttccaggaatggctttgtacggagagaaagagtggtattttttcacgccgagggaccgcaagtacccgaacggttcgcggccgaaccggtccgcgggaaccgggtactggaaggcaaccggagcggataaaccagttggtaaaccgaaaccggttgggatcaagaaagcgttggttttttacgctggaaaagcgcccaagggagagaaaactaactggatcatgcacgagtatcgtcttgcagacgtggatcgttccgttcgcaaaaagaacagcttaaggctggatgactgggtgctgtgccgaatttacaacaagaaaggtgcaattgaaaagcaacaactaccaccaccgagtggggtccgcaaaattgaatgttacgaaatggaggacgagaagccggagattctgccgcccgacatatacggcggcgacggtggcggattgcctgtacttcgaggcttccgactcggtgccccggctgcacacgacggactcgagctgctccgagcaggtggtgtcggcggagtttgcgagcgaggtgcagagcgagccgaagaggggcagcaacaacaacaacgagtttgcgtataattacgtggatgccactctcgggaataatcagatgtcgccgctgcaggatattttcatgtacctctccaagtccttctgcaattaacacgcaccaccacacgacgagacgacgtcgttctgtgttgtgtgtatgcattatgcatttttgcagtagctgctccacgcacatttgcacggaagcacgagactgagtgaagatccgtgagtgtgtccgtgctggttcgtgtagatgattattactataaaaaaacaaaaaagcaaaaaagagaagcattcttatatgaacatgatgaatccaactgtttacatgatctagtcgcaattaatagtttgatattaaaactgagtatgtgtcgccacaacaatggaggatgcatcatcggaaaatgcaactgccgttggatgaccgccggcaggcaaattaatccttagaaacttgaaacttttactcgaagcatcatccaacttgaatactctcacaactccatcagcgcaagcagttgccaaatttcgtccatcgcgggagaagcatacccctgtcactgcatcaccatgacccttcaaggtattcaaatccaacggatggtgacgcttgttttgatccttgtcggaggaatggggtttggagagaggcttcttgggagggggtttggaagacacgagtttgggattcgaatttgaatttggatttggatcggcgatggatcggatttcggattggcgcttgcagaagtaggtgttgaagatgaggaaggcgatgatggcacccaagagaagcgacagcgctacaatgggtaacgctggatccattgtcagagtgaaggcacc

SEQ ID NO: 28667 - DNA, 1786 bp, Glycine max
  Clone ID: TF_GmC74085_1
aattcggctcgagctagttctagattcgcgagcggccgaattcggtctaggccctattcccttctctttctctgaaccttcttcttctctctttcacattctcataagatataagacccatacacacacacacacacatatctgcttcttgtagaacaagttaagtttgttttgttttgtcgtttgcttaaggattaatcaatcaattatctgatgatggaagagccggttgtggttaacaaaggagattatgatcatgatcatgatcagcctttggatttacctccaggtttcaggttccaccccacagatgaagagatcatcacttgttacctcacagagaaagtcctcaatagagccttcagtgcaactgctattggagaagctgatttcaacaagtgtgagccttgggatttgcccaagaaagcaaagatgggggagaaagattggtacttcttttcaacatgggataggatgatcccaacaggcatgcgaaccaatagagcaacccaatctggctattctcaaacactaagcaccagcctgtggtctgtccctcgcaagaacaaccttgttggcatgaagaagacccttgttttctatagaggaagagctccaaagggtgagaagacaaattgggttatgcatgaattcagattggatggcaaattcgcatgttacaaccttcccaaggctgcaaaggatgaatgggttgtgtgcaaggttttccacaagagcagcactactactacagatgttaacaaaagggtactcccaataattaaccctggccttctgagaatgaactcaagtaatggagaagatctattatttgatttctcttctctcccacctctcgtggatcctctctttgaccaaacctcaaacaagcacattgacaatgatttcaagggtactaataacacaccttcatcttcatcagctaaactaccatcatcaagtggctactatcttcccaacttcaacaacaacaacaacaatcagcaaatgcttatgatgaagccagaagaacacaaaatatatgagattcccatcaacaactatgcctccaccagtcaagtggatttcactacaactaataacccaatgggaattagcacaagcaataataatatccttctttctcagcctcaaattcgaacccaaaattcaacctcagtacccttcaacatgttccaagattgttataatcatacgcaccaaggaaaacagtgcaagatggagcaattctccattgacagtactaagaaacagcccgtggtcagtgcctctcaagacacgtgcctcagcaatgacacttcctcggtggtttcaaagcaagacaataacatgggaaggaacaaggcattgtacgaggataattttgaaggtccttcatcagttgctactaccctctcagatttggaatgcctgtgggatgattactgaagaataactgaaaaacctgatgcatgaagagagagattaaagcaagttaatttgttggtttatggttttttctatagttactacaacataccatatattttctgattttaggcagtcatatatacagatatatgttatatattagacatggaaaaagttctggtgggatacccgtatactgtatagatttatgattgatcgattagattatccagggtcttgttaaagttcggtttatatttcgtagaccaaggagaaggattcgatcatgttcatgtacatctttcttttgttatataattagtgggtttgttttattgatttattatttttttcc

SEQ ID NO: 28668 - DNA, 760 bp, Glycine max
  Clone ID: TF_GmC44609_2
ccacgcgtccgtcaaattcgccaaagcttgacatctgattacggcgtctcgcgcttccttcttccaccttccccgggtttcaccgtgccgatgactttttttctgagaaagagatcgtcatccatcgcgtgccttcgttttcccttcatgaaccggggcaggctttggcgttcttggaacttcttcttccgccactggacttgacccaattagtgttatctattattattcactttcttccatttttttccttactaaaaaaaaaaaaacgtggttcttcttctctctctgcggacgagttttctttctcttcgattcgttctggttgctacattctgaagcacttcatatttcgctttttctttttcattttcttttatattatttggatggccaaaccaaaaatgccagggtatcggtttcaacccactgacgttgagctgattgagtattttctgaagaggaaggttcggggtaagaaattcccttccgaaataattgctgaagttgacttgtacaagtttgctccgtgggatctcccagctatgtctttgctcaagaatggggatttgagttggtacttcttttgccctcggggaaagaagtattcgactggtgggaggttgaatcgggccacggaggctgggtattggaagactactgggaaggatagagcaattgaacacaataatagagttgtggggatgataaaaacactggtttttcacactggtagagcccctaagggagatcgaactgg

SEQ ID NO: 28669 - DNA, 1447 bp, Glycine max
  Clone ID: TF_GmC206_4
tatattgcctacaatattcacaaagttttatttttttttttatattgagaaaatgttaggacagcactgtttggtaattctggggagagatatcagacaacaatcattatggaaggttctagagaaaatatacctagcagcaaaactttggatttatatatatatatatatatatatatatatattcaaggagagacacatctccccaatagtcttaagtttccaacaaaaatttttcaaatagcacataaagaaataataatagggaagcccaggaatggaagtccctttctgcctgctctcttcatagttgcagtgtctttacctgttgcagcaatgtatgtgaagctcatcatccaaaatttccctaatagacattcggatttcatcatcaagaaaaggcagtggtacattaacattatcagcaacatcatttggagcctcctgatcagctgagttaatattaaaatctactatgtcatcatctgcccactcttcttcattaaatggtgcaccatactgttcaccatttttaggaccaggtccacttttcttgtaaaccttgtaaagtgcataatagtccttaacaccctggcatctcttaagctcctcttcatccaaggtgtattcatgcataacccaatcagtccgctcaccactaggagctctgcctgcgtagaaaaccagggtctttttcactccaactgacctagaattgcatatcacgttacgatcctttcctgttgctttccaatacccacgtctggttgctcggttagaccttccaccattaggatatttcctatctctgtgacagaaaaagaaccattgcctatctccagttttcaatatagattgcccaggcaaatcctcaggatcccacttatacacatcggtttcacgaatcacgtcgagcttcagcctcttcccacaaatcttccgcttcagatagtacatcaccaactcctcatccgtgggatggaagcgaaaacccggcatcgacgacatcatctggctgaaacaatcagcagaaccagctcctgaagcctcacccattctcgatcgcaaaaaaaaatcaaacaacccttgatcacccaacacaaaaaacggaaacttccttaatcaaaaaccaaaacccccaacacgattcgagcctccgggtattcgaaaccggcgatcgagtagaattaaaaaccctaactggggaaatcaaattagggggaaaaaaagaaacaaaattttttggaatcaagaaatggcgaagctgaaatcccaccactacatggtacgaatcgaacctctgggtgagaggattcgaaagactgagtcagagaaggaagctaatagcagtggttgcgagagagagagagagtgttgaaaagaaagaaacgcgtggtgtgggcaatttgtgagggtttttgcggacgctgggtcgagcgggaatccg

SEQ ID NO: 28670 - DNA, 602 bp, Glycine max
  Clone ID: TF_GmC499_2
aagttggctcgagcgtttctcgagatttcgtccgaactaatataacatgttcttccgtggaagaagccatagccataacataactaccacttgaaaacaaaacccaccaccaccttagttaaaaaaaaaaaaaggttagataaaaattaagctttgttcggtggtgaccatggaaagcaccgactcatcaagcggttcacaacaaccgaacctgccacctgggtttcggttccaccccactgatgaagagcttgtagttcactacctcaagaaaaaagcagcttctgctcctcttccggtagccatcatcgccgaggttgatctctacaagttcgatccatgggagctacccgctaaggccgcgtttggggagcaggagtggtatttctttactccgagggacaggaagtatccgaacggcgcgaggccaaacagggcggcgacatctgggtattggaaggctactgggactgataagcctgtgttgacctctggtgggacccataaggttggggtgtagaaggctttggttttctatggagggaagcccccaagagggatcaaaaccaattggatcatgcatgaatataggctaactgata

SEQ ID NO: 28671 - DNA, 236 bp, Glycine max
  Clone ID: TF_701070486H1
ctctcttccttccttctccacatcatttcaaatacacaaaaaaccctaacccccaattcatctctcttgaatcgaatcgatggcacgcatgggtccagggttccgattcaacccaccgacgaagctctggtggtgttctaacttaagcggaaaattacttgaaaactctcccggtacgaacaaatcgccgtcgttgacgtctaaaagctcgagccctgggaacttccctctctgtc

SEQ ID NO: 28672 - DNA, 1377 bp, Glycine max
  Clone ID: TF_GmC525_2
ccacgcgtccgcttttctttctttttgttttgttcaaggaaggaacactgtgacagtagaagcaagcaagaattggaattggaattggaattggaatgaattctcctcctcctccaagaccaagagtggagaggtcgagcggaactaggctagcagcagtttccacacaagccaaaaccaaaaccaaaaccaaaaccaaaataaaaactgtagttgtcaaagtaaaagaaaggttgagtctagtttacgccaaatgtgtcttcttattcttctccttcttgtcagacccattactataaaagaagccacactgcatccttctccatacccttgtattttctttatccaataataataactccattttccctctgtcttccccccctcctctacacaaaaatatattattagcatggagaaggtgaattttgtgaagaatggagagcttagattgcctccggggttccgtttccacccgactgatgaggagctggttctgcaatacttgaagcgcaaggtcttctcctgccctttgccagcctctatcattcctgagcttcatgtttgcaagtctgatccttgggatttgccaggttcctttctattttccattcacacccatcatcccctttctctttctctaatttcaattccatgcccccatttttaggtgatttggagcaagagagatacttctttagcaccaaagtggccaaatatcccaacggaaatcgctccaacagagccacaaattcgggttattggaaggcaactggcttggacaaacaaattgttacttcaaaaggcaacaaccaagttgtcggaatgaagaagacacttgttttctacagaggcaagcctcctaatggatccagaactgattggatcatgcacgagtatcgcctcatccttaacgcctctcagtctcagagccatgttgttcccatggaaaattgggttctgtgtcgcatatttttgaagaggagaattggtgctaaaaatggggaggagagcaactctaaggtggttttctatgacttcctagcgcagaacaagaccgattcctcctcatcggtcgccagtggaattacacatgaatcagatgaacatgaagagagcagtagctccaacaccttcccttatactattagaagaaaaccttaacaaccttccttaaaaatttaagttcattatctagttgttgtttttaattgtctttccctttccctgtaattatcatcaatcacttgttgaaaggaagcatcctcttcccaaatgagaccggcattaagggtagtctggagagtatggtactaatactagtagtagtgtgtaatacacttctcatttcccttcaatttaacccctttttttcta

SEQ ID NO: 28673 - DNA, 1532 bp, Glycine max
  Clone ID: TF_GmC5702_1
ctcccgcacatgctcccttggcctcatcttgcttcgccttggtcatccttctgtgctctcaaaacctcctgaggctcacttcctctactggccggggccctttcctcgtgctccggcctcgtctgcgaggcgagcggttctggcgtggctcctctttcctcgccttccctctcgcatccccccttggcacccacgtccgccgcccttgaagctaagaaacagtgcaaccgtccactcctccaagctgtctgttttcctgtgtagttcttttgtctgctttcctttgtccttgagagggtttcatttttttgcgtatcacaaaaggtaacagagtcaaaaccctgcaaaaagtacaaaatgatgccaggcaatggacagttaactgttcctccgggcttcaggttccaccctactgatgaggagcttctctactattacctgaggaagaaagtttcttatgaagtcattgatcttgatgtcataagagaagtagatctcaacaaacttgagcctggggacctcaaagataagtgtaggattggatcagggcctcagaatgagtggtatttcttcagccataaggacaagaaatacccaacaggaaccagaacaaatcgagcaactacagctggtttttggaaagcaactggaagagacaagtccatataccacactaattccaagaggattggcatgaggaaaaccctagttttctacactggtcgtgctcctcatggccagaagactgattggatcatgcatgagtatcgccttgatgaagatgatgctgatgttcaagaagatgggtgggtggtatgcagggtcttcaaaaagaaaaaccaaagccgaggtttccaacaagaacttgaagaagaagagcacttaaccacccacatgagagcaagtggtccatgccaggttctagagcagaagcatcttcacatgcaaggaggaccatatgatcattacaactttgatgggacaatgcacctcccacagttgttcagtccagaatcagctattgcaccacctacaaattcttccttggccttatccatgaatgccatggacatccttgagtgctctcaaaacctgttgaggctcacaaccactggctgtggacttaatcttatgcagcaacaacaagaagagaggttcagtggtgactggtctttcttggacaagctactagcatcacaccatggcatggatcaaagcaaatgtaaccctcctactaatcatcatgctgcaactgctgtgggcacttctgctcaaaaattcccatttcattaccttggctgtgacaccacccatgatatcatgaaattttccaagtaggaagggatattgcattttaatgtgttattatacttaaggtgatcatgaggtgagaaatatttggtttctaagtatgtgtaatatgtagcaccttgttagatactcattgagattccactcattaatttagttatttcttgagtgtcaattgtatatatgtctatgatatcttttacgtttaattaaaaaaataa

SEQ ID NO: 28674 - DNA, 488 bp, Glycine max
  Clone ID: TF_LIB3242-060-Q1-J1-E1
ctcgagccgttgaagaattaagaagaaagtttttgtagttaatttttctccaaagggtatgcatgccacctcctcttgagtagtggaatattcataaaacgaagagcttaattgaactttctttcaacattttctaaagttttttcctaagatgtctatcatgtcactttttgtatggtacagaaggaaaaggaagcaattatcaaggaggggactacggaaatagaaatggaaggaactcgtgcaaaagagggaaccctaccaccgggatttcgatttcaccctactgatgaagaacttgtcacttgctatctcgtaaataagatatcagattctaattttacaggcagagcaataactgatgttgatctcaacaaatgtgagccatgggagcttccagggaaagcaaagatgggagaaaaagaatggtacttcttcagtctgagagaccgtaaatacccaacgggtgtgagaacaaatcgagcaac

SEQ ID NO: 28675 - DNA, 1240 bp, Glycine max
  Clone ID: TF_GmC5682_1
tgccaaaagcaagagaaaaattcacacatacacacacaaagaaaattagagagagagagagaagataagatgggtgtgaacgaagatttcaacaaggatattgatgatcatcatcatgagtatgtggatgatgatgatgttcctcttccggggtttcgtttccaccctacagatgaagaacttgttagtttctatcttcgaaggaagcttcacaagaaacccatcagcatcgagctcatcaaacagattgatatttacaaatacgatccttgggatcttccaaaaaccagtgccactgcagaagagaaagaagggtacttcttttgcagaagagggaggaagtataggaacagcataaggcctaacagagtcactggctctgggttctggaaagcaactggcatagacaagccagtgtactcacatggaggagaaggaaatgactgcattggcctaaaaaaaacactggtgtactaccgtggcagtgcaggcaaaggcatcaaaactgattggatgatgcacgagtttcgccttccttctaacaaagacaacaccaccaaccttcccagctccaagaattacgtagatgttccccaagaagctgaaatttggacattgtgtcgaatattcaagagaaatgtctcacagagaaagcacacgccagacttgaaacaattatctgctaagcgccactccattcatgacaagaactcaagaatgagcaacgtggagttcaacaatactaatcaagaatcatatataaactttggtggccactatcagaatgagcagaaacccgtgattaactacacaaacagtgatcaaaggaatcagtatcatgtgatgactcatcagttgtttgctgctccagtggcacagcatcatcagcaacctcaacaactaacttctccatcttctaacttttggcttaacagccctcctgggaacgacttcttcacgtttgataactgggatgagcttggatctgtagtgaagtttgtggttgattagcctagcttgtagataaaaaagatgtggttcatgttgagttgatcctagttagatacttagatgttacttagaatgaaatatactccctcccgtcttttttataagaaacaagacttatatatactgaaatttgtttcttataaaatgaaccagaggtatatcataagagtgcgtttgcatgtattagagagtattgatgttggtgatcatgacttttagtagccatgag

SEQ ID NO: 28676 - DNA, 1587 bp, Glycine max
  Clone ID: TF_GmC648_2
cccacgcgtccgtacggctgcgagaagacgacagaaggggggatttagacgccattgtcaaacccttttcacttctctctagggttttggctctctctctctctctcccttccttattcctttctacctctcacacccttctcaatgaccaacgacaacatcgccgtgacagatctcacttccgccctcaatgaagagaatcgcgccgacctagtcaatgctctcaagagcaagattcagagtctggctggggctcattctgatgttctggagactctatcccccaatgtcaggaagcgtgttgaatctcttagagagattcagggtaaacatgatgaaatagaggcagacttcttgaaggagaaagaagctcttgaagccaagtaccaaaaattgtatcagccattgtacacaaagcgctatgaaatcgtaaacggtgttattgaagtggaaggggcagcaaatgaaacaacagatgaatcagaagaggataaagagaaaggagtgccttctttttggctcaatgcaatgaaaaataatgacgtgttagctgaagagatttcagagcgtgatgaaggtgctctcaagtttcttaaagatatcaagtggagcaggatagaaaatcctaaagggttcaagcttgatttcttctttgataccaatccttacttttcaaataccatcttgacaaaaacatatcatatgattgatgaggatgaacctatattggagaaagcaattgggacggaaattgaatggtacccgggaaaatgcttgactcagaaggttttgaagaagaagcctaagaagggttcaaagaatgctaaaccaattaccaaaactgaaagctgtgaaagcttcttcaattttttcaaaccaccagaagtccctgaagatgatgctgacattgatgaagatttggctgaagaacttcagaatcagatggaacaagattatgacattgggtcaacattaagagataaaattatccctcatgctgtatcatggtttactggggaggccgctcagggagatgagtttgaagacctggaggatgatgaggacgaagaggaagatgaggacgaagatgaggacgaagaggatgacgaggacgaagacgatgaagaggaggatgacactaagactaaaaagaagaagagtggtaaggcacaggctggtgatggtgatggtgagcgacctccagagtgcaagcagcagtaattgtttgtttcttcggagtatcatgtggctgatgggtgtttttgaggtcctatggtgcctgacgggaaagtgggtttcaatttcatgcaatttttcatagtccttgattcattttcctccctagatccgatagtctgaatttattgagtcaatttctcctttttcccatattttgggagaatgtggttatatatttgtagtcagggatgctgtgatttgttactgttggaatttgtacgtcattccagacacttcacatatattataggttgtgctttgttactattatttttcttattaatttatttattcacaattttgttaacttgtatttatattgaggcaagaagttcattttttccccct

SEQ ID NO: 28677 - DNA, 1602 bp, Glycine max
  Clone ID: TF_GmC532_1
ctcgagccgttcgttttcttttccctccctcgttagcagttttcgttctccattctctccattccttcgccatgtccgatctcggctccgatcttcctgctgccgccgccgctcttagtgctgaggatcgtgctggtctcgtgaatgcactcaaggacaagctccagctcctcgctgggcaacatgtggacatcctggagacactgccacccaaagtcaggcaacgcgtggaaattctcagagatctgcagagtcaacatgatgaggtggaggctaaatttttagaggagcgatcaaagctggaggctaaataccagaagctctatgaaccgctttacacaaaaaggtatgagattgttaatggtgtggtagaggttgaaggagttacaaatgttgcagtaccagaagaagctaacaaagctgcagaagacaaaggagtacctgagttctggctaactgcaatgaagactaatgaaacactagttgaagagattactgaactggaggaggggtctctaaaatatcttaaagatatcaaaaggtatattaatgatattcattagggcatcattctcgattcttagggctttaagctggattatttcaagaattccgagcttacaaaaacatatcacatgattgaagatgatgaccctatattagagaaagcaatagggacggagattgagtggcatccaggaaagtgtttgacacaaaagattcttaagaagaagccaagtaaaggatcaaagaatgctaaacccatcacaaaaacagaaaaatgtgaaagtttcttcaactttttcaatcctccccaggtccctgaggatgatgatgatattgatgacgatgctgttgaagagctcgagaatttgatggaacatgattatgacattggttctacaatccgggacaaaattattcctcatgccgtgtcatggttcacgggggaggctgcacagagtgattttgaggatatagatgaagatgattatgaagatgaagaaggtgatgatgatgatgatgaggatgaggatgaggatgaggatgaggaggatgaggaggaaaagaaagggaagagcaagagtaagtctaaactgcagagtggtggcagggccatacctggtaaagatcagccgatggagcgtcctcctgaatgcaagcagcagtagtgtttggctgtgtacaaacagacctgggtatatttagtttcagagaagtaatcactgtagagtctgggttatttcagtcataatttgcaatttaattattattattattatgattattattattgtctgctcttttttattgggctgggggttggtggtggtaatttttttttttggcctgtgatatggattttatttctctctgcttttagtttttttctgaaaaagaaaaaagtaaagtgataagtatattcatgacgttgtccatatttattgtttgtgttatagtccgttatatgaaactgtacagatttgctaaaaagctgctgattgggttagttgacctgtgtcctgtgccagtgtgatatggattttatttctatctttctcccggggggaaaaaagggggcatatctactatttacccccc

SEQ ID NO: 28678 - DNA, 717 bp, Glycine max
  Clone ID: TF_GmC648_6
cccacgccccacgccacccgccacgggttggagggtcgccacgtttagcaataaccaaaccctctctactcttttttcttctccttctcttcgctagggttttagcttcttcctcttcacttcgttctttttcgcctctacaatgagcaacgacaaggacacattcaacgtcgccgatctcacttctgctctcaacgaggacaatagagcagaccttgtcaatgctcttaagagcaagatacagagtttggctggacaacactcggatattctagagtctctgtcgcccaatgtccgaaagcgtgttgaggttcttagagagatccagggccaacatgatgaattagaggctaaattttttgaagagagagcagctctcgaggccaaataccaaaaattgtatcaaccactttacacaaagcggtacgaaatagtaaatggtactacggaagttgaagaaggggcagtgaaagaaacagcacctgataatgaagaggatcaagagaaaggagtgcctgcattttggcttactgctatgaaaaacaatgaagtgttggctgaggagatttcagagcgtgacgaaggtgctcttaagtatctcaaagatatcaagtggagccggatagaaaaccctaaaggattcaagcttgactttttctttgataccaacccttattttaccaattctgtcttgacaaaaacatatcatatgattga

SEQ ID NO: 28679 - DNA, 643 bp, Glycine max
  Clone ID: TF_GmC532_3
ccctctcttccgctgttgaagagctcgagaatggggtggaacatgattatgacagggggtaagtcagtagtgaatacttgagcgatatttcttattccttttgatctgagtgatgaagacttttggtctatcaataatacttttcattgatattaaagcttagtgtatttattatctgatggtccctagttggaaaaggctttttttttttaattatttgttctcggaaactaactaaataaagatgtaaaaccagagaacaaataattgttgaacttgaaatgtagtttggcatgttgagtataaagttgtttatagtacacgcccaacattatgaattcatgtccttaaaactgtaattacttttgtgccattcttgtaccagaaaaagatcagaatgaacagatattaacctttggaagaaaatgttgacatttatggatgacaccaaatgactgtttatggtgctgttcactactattttttagatgtattttttattgacgtgcaactgcagttctacaatccgggacaaaattattcctcatgccgtgtcatggttcacgggggaggctgcacagagtgattttgaggatatagatgaagatgattatgaagatgaagaaggtgatgatgatgatga

SEQ ID NO: 28680 - DNA, 454 bp, Glycine max
  Clone ID: TF_uC-gmroLIB3259P244c01b1
cccttcccggacgcctggggggtgaacccatatttgagaaagccattgggactggaattcaatggcccccccgaaaaagtctggcacccaaaattctttagaaaaaacccaaaaaggggttggagaatggttaacccattacccaaactggaaattggggaagcttcttttattttttttacccccccccaggttcttgagatgatgaaaacatccattaaaatgtggctgggggacttccgaatcagatgggaccagactatttcatatggtccccaataagagacaagaatatttcccctgctgtatcatgggttactggggaggccactcccggggacgagttttgggatctggaggacgatgaggatgatgaagatattgaaaaggacgatgattaagatgaagaggacgatgaccattattatgattaccattattattaggaagagag

SEQ ID NO: 28681 - DNA, 742 bp, Glycine max
  Clone ID: TF_LIB4203-002-R1-K1-H7
gggcaatccagaagcgagccggagcgcggggcgcgagtcgaggagcccagccgagccgccgccgcctccccgccttcagcgagagccccggccgggggctcgccacaacgcgcccgggcctgcctccgcgtcaggccccgcgggcagtgccaggcagccagggggagggcaggcaagtgagcgccgggaggaggcggccggagcgagcgggcgccgcgcgtgtggcgtgaggggaagccgctggccgcccccttggccgtcccttcgctccccctccccgctccccgccccgatcgcggagggcaccatgtctgcgccgacggccaaagccagtaaaaaggagctcaactccaatcacgacggggccgacgagacctcagaaaaagaacagcaagaagcaattgaacatattgatgaagtacaaaatgaaatagacagacttaatgaacaagccagtgaggaaattttgaaagtagaacaaaaatataacaaactccgccaaccattttttcagaagaggtcagaattgatcgccaaaatcccaaatttttgggtaacaacatttgtcaaccatccacaagtgtctgcactgcttggggaggaggacgaggaggctctgcattatttgaccagagttgaagtgacagaatttggagacattaaatcaggttacagaatagatttttattttgatgaaaatccttactttgaaaataaagttctcttcaaagaatttcatctg

SEQ ID NO: 28682 - DNA, 1290 bp, Glycine max
  Clone ID: TF_GmC532_2
cccatcttccgctgttgaagagctcgagaatttgatggaacatgattatgacattgggtaagtcagtagtgaatacttgagcgatatttcttattccttttgatctgagtgatgaagacttttggtctatcaataatacttttcattgatattaaagcttagtgtatttattatctgatggtccctagttggaaaaggctttttttttttaattatttgttctctggttttacatctttatttagttagtttccactgaaaaatatttgttgaacttgaaatgtagtttggcatgttgagtataaagttgtttatagtacacgcccaacattatgaattcatgtccttaaaactgtaattacttttgtgccattcttgtaccagaaaaagatcagactcgagccgattcggctcgaggtgaaagtttcttcaactttttcaatcctcccgaggtccctgaggatgatgatgatattgatgaggatgctgttgaagaactccagaatttgatggaacgtgattatgacattggttctacaatccgggacaaaattattcctcatgctgtgtcatggttcacgggggaggctgcacagagtgattttgaggatatagatgaagttgattatgatgatgaagaaggtgatgaggatgaggatgaggatgaggatgaggaggaggaggaggaggaagaggaggaaaagaaagggaagagcaggagtaagagtggtggcagggtcaaacctggtaaggatcagccgactgagcgccctcctgaatgcaagcagcagtagtgtttggctgtgtacaaacagacctggatatgtttagtttcagagaagtaattactgtagagcctgggttatttcagtcataatttgcaatttaatgattatcatcattattattattttctgctcttttttattgggctgggggttggcggtggtatttttttaagtctctgcttgggtttctttgagttgccctgttatttggattttatttctctctggttttagtgttttctgaaaaaagaaaaagtaaagtgctaagtatatttgtgtcgttgttcatatttatagtggattataatatgaaactgtacagatctgcttacatttttctgcttctgcttgggtttcctgggttggtagatctgtgtcctgtgtgatggattttatttctctctcgttttattcattttgtattagcatttgaaactgtacagatctgcgtataatttctgaaagaaagaaaagtgataagtatatgtgtgtcgttgtccat

SEQ ID NO: 28683 - DNA, 693 bp, Glycine max
  Clone ID: TF_GmC648_5
ccaatttaccaaaaaccgagagctgtgaaagtttcttcaattttttcaaaccacccagaagtccctgaggatgaggctcgagttgatgaagatttggctgaggaacttcagaatcagatggaacaagattatgacattgggtcaacaataagagacaaaattatccctcatgctgtatcatggtttactggggaggctgttgagggagacgagtttgaagacctggaagatgatgaggatggagatgacgatgaggatgatgaagaggaggatgaggacgaagatgatgatgacggcgatgaagaggaggaagacagtaagactaaaaagaagtcatctgctgttaagaagagtggaagggcacaggctggtgatggtgagcgacctccagagtgcaagcagcagtaattgtttatttcttcggagtgtcatgtggctgatgggtgtttttgaggtcctatggtgcgcctgatggaaaagtgggtttcagtttcatgcaatttttcatggtccttgattcattttcctccttagatcctatagtctgaatttattgagagtccatttcttctttttcccatccattttgagagaatgtggggttatattatagtcagggatgctgtgatttgttactgttggaatttcattccagatacttaaaatatatcataggttgtgctttgttactaa

SEQ ID NO: 28684 - DNA, 183 bp, Glycine max
  Clone ID: TF_700899387H1
tctcgagccgattcggctcgaggtgaaagtttcttcaactttttcactcctcccgaggtccatgaggatgatgatgatattgctgaggatgctgttgaagaactccagaatttgatggaacgtgaattatgacatgtggtatctacaatccgggacaaaattattcctcatgctttcatggtc

SEQ ID NO: 28685 - DNA, 2162 bp, Glycine max
  Clone ID: TF_GmC648_4
accggtccggattcccgggtcgacccacgcgtccgctctctctctctttagggttttggctctctctctctctctccctccttattcctttctacctctcacacccttctcaatgaccaacaacaacgacaacatcgccgtgacagatctcacttccgccctcaatgaagagaatcgcgccgacctagtcaatgctctcaagagcaagattcagagtctggctggggctcattctgatgttctggagactctatcccccaatgtcaggaagcgtgttgaatctcttagagagattcagggtaaacatgatgaaatagaggcagacttcttgaaggagaaagaagctcttgaagccaagtaccaaaaattgtatcagccattgtacacaaagcgctatgaaatcgtaaacggtgttattgaagtggaaggggcagcaaatgaaacaacagatgaatcagaagaggataaagagaaaggagtgccttctttttggctcaatgcaatgaaaaataatgacgtgttagctgaagagatttcagagcgtgatgaaggtgctctcaagtttcttaaagatatcaagtggagcaggatagaaaatcctaaaggattcaagcttgagttcttctttgataccaatccttacttttcaaataccatcttgacaaaaacatatcatatgattgatgaggacgaacctatattggagaaagccattgggacggaaattgaatggtacccgggaaaatgtttgactcagaaggttttgaagaaaaagcctaagaagggttcaaagaatgctaaaccaattaccaaaaccgagagctgtgaaagtttcttcaattttttcaaaccaccagaagtccctgaggatgatgttgacattgatgaagatttggtatgacagtctgtcccaataaacctaaggctaaaaatatgaagcttttgtctattgctataataacttaattttttcaacaggctgaggaacttcagaatcagatggaacaagattatgacattgggtatgcctaattgctaccttttgcttgtatgagctaccttatatatgagctaccttatatttttcttgtccaagctgttgcttgctcttagcataatttttcttgtccaagttgttgcttgctcttagcataatttttcttgtccaagttgttgcttgctcttagcataatttttcttgtccaagttgttgcttgctcttagcataactgttgttgctacttgcacctgtattcttgaatctgttcttagttaatcttgattcctgtgtaggtcaacaataagagacaaaattatccctcatgctgtatcatggtttactggggaggctgttgagggagacgagtttgaagacctggaagatgatgaggatggagatgacgatgaggatgatgaagaggaggatgaggacgaagatgatgatgacggcgatgaagaggaggaagacagtaagactaaaaagaaggtatactgttaattgatatggagtgttgaaaccttggtttattctttattttatttgaggtttgaacgtgagttaatgcatttgtttttcacctgcactgtgttgtcaatttcctctggaatgttgctgcagtcatctgctgttaaggtgagatattttgattttgtgatctgaatgaaattatatggacacatgattttgcccaagatatgtcatgtgttttctgttataaatttgttttgcttgatgttgtatactttacattctttatttttcattgctctggtcattgcattcctgatttccattttgggttataaattttcagaagagtggaagggcacaggctggtgatggtgagcgacctccagagtgcaagcagcagtaattgtttatttcttcggagtgtcatgtggctgatgggtgtttttgaggtcctatggtgcgcctgatggaaaagtgggtttcagtttcatgcaatttttcatggtccttgattcattttcctccttagatcctatagtctgaatttattgagagtccatttcttctttttcccatccattttgagagaatgtggggttatattatagtcagggatgctgtgatttgttactgttggaatttcattccagatacttaaaatatatcataggttgtgctttgttactaaaaa

SEQ ID NO: 28686 - DNA, 1494 bp, Glycine max
  Clone ID: TF_GmC602_2
ccacgcgtccgccctcaacgcgaccacttttctttttttcctacacttttcatttggcttcctctgcctcgcttttgaaaacgcgcgtttcaggcgaagatggttggcgacaacacgaagaagttgaaagtcgccgagaatttggaggatagcatcgacggcgaactcgtcctctccatcgagaagctgcaagaagtccaagacgagctcgataagatcaatgaagaggcgagtgataaggtcctcgaagtagagcagaagtacaatgagataaggaagccagtttacgataagcgaaatgatgtcgtcaaatctattcctgatttctggttcactgcttttatgagtcatcctgccctttgtgaacttctgaacgtagaggatcaaaagatatttaagtatttgggttctcttgatgttgaagataataaagatgtcaaatcaggctactcaatcacctttaatttcaatcccaatccctattttgagaatacaaagcttacaaagacttttaccttccttgaagaaggaacaacaaagataactgctacccccataaaatggaaagagggcaagggattacccaatggacttgatcatgacaagaatgggaacaagcgggctcgtattgatatcagtttctttagttggtttagtgactgtgagcagaaagatgatgtggatgaaattcatgacgaggttgcagaattaatcaaggatgatttatggccaaatccactcacttatttcaacaatgagcttgatgaagaggatgttgattctgaagctgatgatgaggaaaacgatgaggatgactctgaagatgatgaccaagaggagaatgacgctgggagtgaggatggcaatcacagttgaaaaatgcattatggtgctgttccctgtttatttgtctggttgagtatgtaaggcttttaggcgtggtgagcgtttccattttttcgaggtgttaactcaaggtggagctatatagaaagtggttctttgaccatataatttattaattaccctgtgaagttgtttcgctggtttcagccttcatgcactttttttgtgatactagtaacatactagctctctatcggttcttttttgtggaattacatattaaaattacagtatttattgtatatttggatttcttggcataaggattacccttcaaggcattttaccgatatagaaccatttcaaatgctatgttgatctgttttccttcgacctgatggaatgatcctttcatcccttttctaccgatacagaaccattttataacacagtttgctgtcacaactggacataaactgcatgtttcatttgaatttatgttaaacatagatacagtcacacatgcagtcgtggccagttatgactttttctatgcaactagcatcaatacatgttaacgtgtggagccgtcaaattgtgacatgtaattacttaatgttgatgcaataatgagtgtttgcactacgg

SEQ ID NO: 28687 - DNA, 1928 bp, Glycine max
  Clone ID: TF_GmC648_1
aaatctgttgggattagtagatttgaagtgtggttagttctggttattgttttgaattggtcgggactagtagatgtgaagtgttgtgtagccttgcatgtaagtttttatgttgattgggggcatatgcgtcaaggtagcatttttatgttttgtaacttccaccatgtcgtcgtgtgcttgttttcaagattttttcccccctaaccctggtctgcagtcccggcggccacggcatcccgtccctacaaatgctggaaggctgcgaaaagtggtgcaaaggaggaagaggaaaaagaggattggagggtcgccacgtttagcaacaaccaaaccctctctactctttcttcttctcttcgctagggttttagcttcttcctcttcacttcgttcttctggcctctacaatgagcaacgacaaggacaccttcaacgtcgctgatctcacttccgctctcaacgaggacaatagagcagaccttgtcaatgctctcaagagcaagatacagagtttggctggacagcattctgatattctagagtctctgtcgcccaatgtcaggaagcgtgtggaggttcttagagagatccagggtcaacatgatgaattagaggcaaaattttttgaggagagagcagctcttgaggccaaataccaaaaattgtatcaaccactttacacaaagcggtatgaaatagtaaatggtgctacggaagttgaagaaggggcagtgaaagaaacaacaccagatggtgaggaggatcaagagaaaggagtgcctgcattttggcttactgccatgaaaaacaatgaagtgttggctgaggagatttcagagcgtgatgaaggtgctcttaagtatctcaaagatatcaagtggagcaggatagaaaacccgaaaggattcaaacttgagtttttctttgacaccaacccttattttatcaattctgtcttgacaaaaacatatcatatgattgatgaggatgaaccaatattggagaaagcaattgggactgaaattcaatggcacccaggaaaatgcctgacacagaagattcttaagaaaaagcctaagaagggttcaaagaatgctaaaccaattaccaaaactgaaaattgtgaaagcttcttcaatttcttcaacccaccgcaagttcctgaagatgatgaagacattgatgaagatgcggctgaggaacttcagaatcagatggaacaagattatgacatagggtcaacaataagagacaagattattccccatgctgtatcatggtttactggggaggccattcagggggatgagtttggagatctggaggatgacgaggatgatgaagatattgaagaggatgatgatgaagaggaggaggaagatgaagatgacgatgatgacgaagatgatgaggaagaaagcaagactaaaaagaagtcatcagcacctaagaagagtggaagagcacagcttggtgatggccagcagggtgagcgacctccagagtgcaagcagcagtagatgcagaaggtcatttatgtagttgttgagttttgttggtgttcgagaatgtttgatgtgaaagtgggtttcatgttttaatgcttcttaagttgattttcctcactatatcttggtagttcgaatttgttgagagtcccttctcttattttgcgcctggtagagagaatgtggttataggtagagatgctgtgatttgtttatgttggaatttgtactgccgtgtcaggtatacttgaaatatagttcgtgctttcaactagtaatttttgctgttttactgaactcagtatacttgatttatagtttgtgcgccaactagtaatttttgctgttataagaacttgattatagctcaatcaacattgttttaagtattggaaggaagtctatgtaaaggttaaa

SEQ ID NO: 28688 - DNA, 1411 bp, Glycine max
  Clone ID: TF_GmC602_1
tacggctgcgagaagacgacagaaggggactctttgtcttcacactccccttactcgctcgacctagaactgtgttagggttttacgaaaccaccgaagttgcagaaaaaggaagaaagaagaaaaaatggtggctgacaggagcaagaagccgaaggtctccgagaagggcgaaaacctcgatgaaatcgacggagaactcgtcctctctatcgaaaagttgcaggagatccaagacgagctcgaaaagatcaatgaggaagccagtgacaaagtgctcgaaatagagcagaagtacaatgagatacggaagcccgtctatgataagaggaatgatattatcaaggctattcccgatttctggttaactgcttttttgagccatcctgctcttggtgatcttttgaacgaggaagatcagaagatatttaagtatttgagttctcttgaggttgaagattttaaagatgtcaaatcaggctactcaatcacctttaatttcaatgccaatccctattttgaggatacaaaacttgtaaagacttataccttccttgaagaaggaacaactaaggttaattgctacacccataaaatggaaagagggcaagggcatacccaatggagttaatcatgagaaaaaaagggacaagcgtggctcctactgatgtcagcttctttagttggtttagtgacaccgagcagaaagatgatatagatgacattcatgatgagggttgcagaattgatcaaggatgatttatggccaaatccacttacctatttcaacaatgaagaacctgacgaagaggaaggtgatgaggatgaagctgatgatgagggaaaggaggatgaatctgatgatgatgatgacaatcaagaggaggatgacgatgagggtgaggaggatgattacaagtgaaaaatacattatggtcatattacttttttttttttggggttgtaggagtatttaagcgttctttaggggatgatcatggcctccctttgtggttgtcatcttatgtcagctggtggagctaccaaggccagttattggttctctctctgactatagcctatttattgtcctacgaagttatttctggtttcatcccttgtgcactttttcagatactaatgttacatcgtttcttttttcataaccctttgtcgtggaactaaatagtaaaaattgcagtatttagtgtatagcagagtccagtttggtatttcttagcgtgcaggataccatgggaagcatttatcagatacagatgttcaaatgctatttcaatgttatccaatttatttcctcttaccaatgactgttgggattaatctttcaccaaataaaagtaatgctacttgcccagaaaaaaaaaaaaaaaaaaaaaaaaaaaaaaccaaa

SEQ ID NO: 28689 - DNA, 1696 bp, Glycine max
  Clone ID: TF_GmC648_3
gcgaccacgcgtacggtgtcggcgttttagcttcttcctcttcacttcgttctttttcgcctctacaatgagcaacgacaaggacacattcaacgtcgccgatctcacttctgctctcaacgaggacaatagagcagaccttgtcaatgctcttaaggttagtattttctttattctttctctgtgaagttgatattgagatttgaatttctcaatttttacaagttcattttactgtttgcattgtgtgtatttttttttttcaatgtttaattgtgagcagagcaagatacagagtttggctggacaacactcggatattctagagtctctgtcgcccaatgtccgaaagcgtgttgaggttcttagagagatccagggccaacatgatgaattagaggctaaattttttgaagagagagcagctctcgaggccaaataccaaaaattgtatcaaccactttacacaaagcggtacgaaatagtaaatggtactacggaagttgaagaaggggcagtgaaagaaacagcacctgataatgaagaggatcaagagaaaggagtgcctgcattttggcttactgctatgaaaaacaatgaagtgttggctgaggagatttcagagcgtgacgaaggtgctcttaagtatctcaaagatatcaagtggagcaggatagaaaaccctaaaggattcaagcttgactttttctttgataccaacccttattttaccaattctgtcttgacaaaaacatatcatatgattgatgaggatgaaccaatattggagaaagcaattgggactgaaattcaatggcacccaggaaaatgtctgacacagaagattcttaagaaaaaacctaagaagggttcgaagaatgctaaaccaattaccaaaactgaaaattgtgaaagcttcttcaatttcttcaaccccccgcaagttcctgaagatgatgaagacattgatgaagatgtggctgaggaacttcagaatcagatggaacaagactatgacatagggtccacaataagagacaagattattccccatgctgtatcatggtttactggggaggccattcagggggacgagtttggagatctggaggacgatgaggatgatgaagatattgaagaggacgatgatgaagatgaagaggacgatgacgatgatgatgatgacgatgatgatgaggaagagagcaagaccaaaaagaagtcatcagcacctaagaagagtggaagagcacaacttggtgatggccagcagggtgagcgacctccagagtgcaagcagcagtagaagtatttatgcagaatgtcatttatgtagttgagttttgttggtgttcgagaatgtcctaatgtgaaagtgggtttcatgttgttttttaatgtttcttaaattgattttcctccctatatcttggcagtccgaatttgttgcgagtcccttctcttattttgcgcctggtagagagaatgtggttataggtagagatgctgtgatttgtttatgctggaatttgtactgccatcagtatacttgattatagtttgtgcgccaactagtaatttttgctgttataagaacttgattatagctcgatcaacattgttttaagtattggaaggaagtctatgtaaaggttaccgtaaggttcatgttagtgtttattattgttaacgctac

SEQ ID NO: 28690 - DNA, 588 bp, Glycine max
  unsure (1)..(588): unsure at all n locations
  Clone ID: TF_LIB4127-038-Q1-K1-G3
aaatctgttgggattagtagatttgaagtgtggttagttctggttattgttttgaattggtcgggacttgtaaatgtgaagtgttgtgtagccttgcatgtaagtttttatgttgattgggggcatatgcgtcaaggtagcatttttatgttttgtaacttccaccatgtcgtcgtgtgcttgttttcaagattttttcccccctaaccctgcagggccaacatgatgaattagaggctaaattttttgaagagagagcagctctcgaggccaaataccaaaaattgtatcaaccactttacacaaagcggtacgaaatagtaaatggtactacggaagttgaagaaggggcagtgaaagaaacagcacctgataatgaagaggatcaagagaaaggagtgcctgcattttggcttactgctatgaaaaacaatgaagtgttggctgaggagatttcanagcgtgacgaaggtgctcttaaatatctcaaagatatcaagtggagcaggatagaaaaccctaaaggattcaggcttgactttttttttgataccaacccttattttaccaaatnctgtcttgacaaaa

SEQ ID NO: 28691 - DNA, 512 bp, Glycine max
  Clone ID: TF_GmC259_3
gagccaagtgttggacttagccgacgctgtcgtcttcaccgtataagaactatcgcctggttctgaacagtgtgtgattcggattccgacgaggatgtcgtcgttgggttccccgaagaagcggctgagatcccaaacagcagaagagaataaggaagaggtcgtttgttgcgggatttgctacgctgagcgtggggtttcgattacaggggaaatcgattgctgcagccaccacttctgcttcgtttgcatcatggaataggcccaattttccgccaaaggtttatcatcctcatggaaatatggcaactggtccggctgattcttatactgaaaccaaatgtggtgtttgtcatgctggaacagatgagcatcttctactactttgtgatctatgtgatactgcttcgcacacatactgtgttggcctgggctatactgtttctgatggtgataggttttgtcacgattgtgctatttcccgggagaccaatatcaatgaagaatcagac

SEQ ID NO: 28692 - DNA, 593 bp, Glycine max
  Clone ID: TF_GmC126_6
gttttgaaggtattgcaaatgtgagatgccttataacccggatgatctcatggtacaatgtgaagggtgcaaggattgggattatgtgattccagcgcctgcagaatgaacgccgtaaagggtgttaaggtgttgtaaaggtcaaatttggtagtaaaatgagaaggggaatggttgtgacaacaggaagctcatagaaaatgtaccatcctgcttgcatgggcatgactattgaagaagctaagaaactagatcattttgtatgttccgaatgttcatctgatgatgatatgaagaaaccccaagctacattttctgcatcactgggagctgatggcaaggtggagccgaagcggcggaagagatgaccatgtgaggtgtgtgtggttcttgcttaatttggctggctctatggtagcttttgtgtgttgtacggcttcttctagaggctataaacattgatttcatgtatttgattcaggttattatgtatctatccgttttacattttgttatgacaggtcatctgtttttccttttgtccattgatgagaactccgatccaagtgttaattcttgagaaaaaaaaataa

SEQ ID NO: 28693 - DNA, 2799 bp, Glycine max
  Clone ID: TF_GmC1741_1
ggcaaaatgggttaaatgatttccggggggaacgtggtaaagagagacaaaagtagattgtcccagagcaatccatccgctcgaatcaaatctcaccatccacacagaaaaacacactaccaaaccctaatctgaaaccatcgttccctctctttctttctctctctttacattctttctctctctatcaacctccaaactccgatcccgtatttctctcctcgctacccgatccagaggcttcaatcctttccccgtcgagatcttgcttcacgcgcctccaacgctggaccacgcgcctgtttccgcctccatcatggtcgtgagcggagggaagggcctcaaacgcgccgcgaagaagagagtcaccgccgatttctacgacttcctcacgttccccacgccgtcgctcgccgaagctgagaacttcgccggtggaccgttccgctccaacgtgcgcgcctttctgacgaagcacgcgcttcttccgccgccgtccgcgctcttcccgcacctgctgacgtggcagatcgtcttccgcgtcggcgagctcaccgagggccccgacgcgccggtagtgtgcctcgacgtcgtcgaggaggacgtcgccagatccagatctgtttactgtgatcagtgccgagttttcggtgagatgactcgccccttttttttgaggttcattgcttgttttgatttgccttgttatttctgtgttaataaggtatcaccaaaatggtctgaaacaagacttattttggatcaatgcaatgctatcgatcctgatcttacattttggtctattcgctctttctatcttcagatgtttttcttatttactttaatataccactgacgaacccaatcatcatcataaataacgattagagaacacgactcatcttttacatggcgtagtacacaccaatggatatgggcacctcgagccgaatcggctcgaggaagggggctctagatttctttctggtattcatattatggatttctgggatcgcctatgcaagactcttggagtcagaaaagtcagcgtgatggatgtttcaaagaaatatgggatagagtatcgcttgcttcatgccattatgaagggacatccatggtatggtgactggggttataaatttggctctggcagctactgtcttacacatgaatcatacaagtctgctgttgaaagcctatccaatctacccttgtccaccttttcccagggaaagatgcctgactctcgtgtgcaggatatgatcaaatattaccaatctttgtcagaacacgagcttgtaaatataagggacctcttttgtttcataatgggtttgattggtgatgctcacaagactgcatcaaatgttgatgagacaacctgcaagaagcgttgttttaatgcttctggactgtcaatatcatgggataagagtggcattgaacgtgtggagcaagccatgatcatagtgctgtgtgcagtgtctgagtccaagtgggtgagctggcgtgctcttatgggcgcagcctccaagttgggctcttcagagctgcttgattattgccttggagaactgggagggaaaatggtctatggtggaatggttgttaatagctacggctgcgtgaagacgacagaaggggagttcagacttgaggctgcaactggtgcttgctatggaattttagcaaagaataattctctgggctcgaagtatccatctgaagaaaacctcctacaatgcttgagatatttatacgactctttgcttcatcctcagatgatggtaaactatgaagcagggacaaggactcttgcaatgaactcagctcagaagctttttgactgcaagcagtttgtaaaagattataatcctgagatgtggccattgtcagattcgcagatgtttcgcctctcatgtcatgttgaacttgtagatgaatttgaagattcagaagctataactccaccagaattagttgtgctgcccctgaatgccacggtggctgagcttaagaatcaagcagcaaatgcttttcaagatgtatatctaaggttcagaagacttcaagttgatgggctacatggttatagcggtgtcgacgattccacccaggtcaagctcttgttaggatcgagagatgtagtttgtgtccgaggaagatgcatcgggaagaatgggttgagcaagttccgaatggaaaggggacttgagaggtggactgtagattgcagctgcggggccaaggacgatgatggagagagaatgttggcgtgtgatatatgtggagtgtggcgacacaccaggtgttctgacatccatgatactgatcctgttccagctcgttttgtttgcctgaaatgccaaaactgtgaatcaaaactcaaatgtagtgggcactgcaaagatgagaccgtgactaacgttagtggtagtagttgcttcagaaacggcttgccagtgccatctgatgttatttgattagtcagattagatgtgtatgaaaagctccttttttttttgctttggcctgaaagaacatgtacataacacagataggccttagaggtagtaggttcagggatggggcatgtcttgttcatatttcagcaggttctaccttcggttgtttattgtgtgtatatatagtactaactgaaagatgtggacgggggtagtgagagtattcaactttcttttcttctgttcaaaaggagcttcttggtaaatttagagcgaattctaatgattatgggtcttctttttatgctaaaagtgattatggtcttctgac

SEQ ID NO: 28694 - DNA, 614 bp, Glycine max
  unsure (1)..(614): unsure at all n locations
  Clone ID: TF_LIB4391-058-R1-K1-B5
aattggaggacaagtgttctggtgaaaggatccatgctatcgctggaaaaatggatgctgcaagtggctgagtttcatgctaatgctgtagtttctgtgaaacctaaaaagccttcctttaaagaaaggaaacagaagttgcttacctttctacaagagaagtatgaaccagtttgtgctaagtggactacagaacgatgtgctgtatgtagatgggttgaagattgggattacaacaaaattatcatttgcaacagatgtcaaatagccgttcatcaagaatgttatggagcaagaaatgttcaagattttacgtcatgggtttgtaaagcttgtgaaacacctgacatcaagcaggaatgttgtctttgtcctgtaaaaggtggtgctctaaagccaaccgatgttgacacattatgggttcatgttacttgtgcttggtttcgacctgaagtatcttttgctagtgatgaaaagatggagcctgcattgggtattctgagtattccattgaattcttttgtgaaggaaattcatggttcgtgcacacaatgttgcaagtgttccacttatttccatgctatgtgtgcatcaagggctggntatcggatgga

SEQ ID NO: 28695 - DNA, 617 bp, Glycine max
  Clone ID: TF_GmC1741_5
aagttccgaatggaacgtggacttgagaggtggacggtagattgcagctgtggagccaaggatgatgatggagagagaatgttggcgtgtgatatatgtggagtgtggcgacacaccaggtgttctgacatccacgacactgatcctgttccagcacgttttgtttgccagaaatgccaacactctgaatcaaaactcaaatctagtgggcactgcaaagatgagactgtgactaacgttagtggtagtagttgcttcagaaacggcttgccagtgccatctgatgttatttaattagtcagataagatgtgtatgaaaagctcctttttcttctgtttattttgctttggcctgaaagtacctgtacataacacagataggccttagaggtagtaggttcagggacggggcatgtcttgttcatatttcagcaggttctaccttcggttgtttattttgtgtatatagtctaacctgtgaagggtggagaggggaaatgtgagcatattcaactttcttttcttcagttcaaaaggagcttcttggtatatttagagcacattttaatgattatatgggtcttctgacaactcatctatttcaacatttttcttta

SEQ ID NO: 28696 - DNA, 2475 bp, Glycine max
  Clone ID: TF_GmC276_1
agaaaaaccacagccaaaagtcaagtggagcaaaaacaatgggcagctagtgcttccaaatagggtcactgttctctgcaatggtgttgaagtcataatttttccaagccttcatatagttgtgtgcaagtgtgggttttgcaggacagaaaagcaagcacttagtgcatgggaacgacacacaggttccaaattaagaaattggagaacaagtattagggtgaaagattctatgctacctctggaacaatggatgctgcagttggcagaatttcatgctactgctcaggttcccaccaaacctaagaaaccttctctgaaagaaagaaagcataagttgcttaccttcttgcaagagaagtatgaacctgttcatgctaagtggactacagaacgctgtgctgtttgtagatgggttgaagactgggactacaacaaaattatcatttgcaacagatgtcaaatagcagttcatcaagaatgctatggagcaagaaatgtccgagattttacatcttgggtttgtaaagcttgtgaaagacctgacatcaagcgggagtgttgtctttgtcctgtaaaaggtggtgctttaaagccgacagatgttgacacattgtgggttcatgtcacttgtgcttggtttcgacctgaagtctcttttgctagtgatgagaagatggagcctgctttgggtattctaagtattccatcaaattcttatgtcaaggtacgttttatgctggtaaaaattagtcacgcaaaggcacgtttttttcatcgtacaaagattttagacaaaatatattcaatggtatcttattgcgtattgcatttactttattggtttcaaatcgacaatcatagaaatttgataaaagcaagttgttgtagctgtttggcataaaggacattatctagactctgaattacttaatatttttatcattttgtgcaaatcctagaaatagcctctttgtttgcaagagtaaggctgtgttcgtctaccctccccaaactccatttggtgggagctttttgcattgggttgccttttgatgtctcttggtccactactcttaacaaatacctcgagccgaatcggctcgagtgaattttcagatttgtgttatttgcaagcaaattcatggttcgtgtacacaatgttgcaagtgttctacttatttccatgccatgtgtgcttcaagggctggttatcgaatggagttgcattgtttggagaaaaatggcaagcagacaacaaaaatggtctcttattgtgcttaccacagggctcccaatccagatacagttttgattatgcaaacccctcttggggtcatttcaactaaaagccttctccaaactaagaaaaaaactggttcgaggttaatctcatctagcagaaaaaagcaagatgactctcctgttgataacactgagcatgagccattttctgctgctaggtgccgtatctttcaaagaacaaaccataccaaaaagagagcagcagatgaagccgtttctcatcgagtgaggggtccctatcatcatcctttagatgcaatagagagtttaaatacacacagagtagtacatgaacctcaggcattttcttctttcagagaacgcctataccacttgcagagaaccgaaaatgatcgggtttgctttggtagatcaggcatacatggatggggcctctttgcacgaagaaatattcaagaaggagacatggttcttgaatatcgtggtgaacaagtgaggcgcagcattgcagatttgagggaggcacgctatagattagaagggaaagactgctacctgtttaagataagtgaagaagtggtggtagatgccactgataaagggaatatagctcggctgattaatcattcttgtatgccaaattgctatgccaggatcatgagtgttggtgatgaggagagccggattgtactcattgctaagactaacgtggttgccggtgatgagttaacgtatgactacttgtttgatcctgatgagccagaggaaaacaaagtcccgtgcctatgtaaagctccaaactgccggaaattcatgaattaggaaggattatacaaatgaaatgaacaccagatgactagactattgtttcttctccgcaaggagcactaaccccccatcccctcttctgcagggaagctcacagttacaccaaagctgtattttttatcaaaccaaaagaagagaaaacaaagtagggagaaaaaaaaaaggcatagtttagtgtttttcttttacccttttgatttcctttagacattcatcgaattttaataaaaacctagatttggtagcttttggctcttggcgtctctgtaaatgtatcaccttacattttactcattttcttctacttaatgtcaaccgatttcttcccttcatgtacttttccgatgatctaccaatctaattgtattgaaagatagtaat

SEQ ID NO: 28697 - DNA, 534 bp, Glycine max
  Clone ID: TF_uC-gmflminsoy049c10b1
ttctttgcgtccgctccctctgtgttccctggtgggaccgagagcggagattgttgtgccccttctgtcaccttccccactccgaaccaattacaaaaccctcaccgtctgaagtccttgctcatttccgtgccctcagttacagcgagaatgaaaggggggcgatcgcaccgccctcggagctcggacccgccggacgagtgggtggacgggtcctggacggtggactgcatctgcggcgtcaccttcgacgacggcgaggagatggtgaaatgcgactagtgcggcgtgtgggtccacacgcgctgctcgcgctacgtgaagggcgacgacaccttctcctgcgacaagtgcaaggccaggcacaacaaaaacaacaccaccaccaacaacagcaacaacaacagcaacagcactaccaaccccatggagaccgaggtcgcgcagttcctcgtcgaactccccacaaaaaccatctccatggacaataaaaaagccctcctctgcaggcccaggctctggaccgacagccca

SEQ ID NO: 28698 - DNA, 1114 bp, Glycine max
  Clone ID: TF_GmC6775_1
tttcatacgcaaagacctcaatattgagtaatcacgatgttcaagagaatatggtgagatagatatacattacagggtatcacacaaatctgaaagaaatttgtcaaacattctatgattcagaacgctgatatgagactcgaatcagggacttgtaatgtgtgctcagctgcttgttcatcttgcatgcatcctaaccgagctctcatggggtcaaaggctgaagaattctctgatgaaaactgtcgcttaggggaggttaatcagtattgtgatgagagtgatagatcttctcttgggagcagagcttgtgaaaggttgaagcatggtgtcagtgaaaccagtcacaagcctagtgtttcttccactcatgattctctatctgaaaatgctgagaacagtcaagccttatcagagaagtatcaggattccaagtgtttagaaagtcttgatgatagcacttcttgtattagtaggaccagtaatgctaatttagcgagcagttgccatcagataaatacagacagaataaatatatcttgtagttcaacttcagttagtcacttagtggcagaaggatctggaaatgggccaactgttgacatatctagtttgtcagaatgttgtatggaaaatgttgattcatcattgaccaaagagagagtacctattattgttcctggtgaaaaatctctggcagataaggaaaacctaaataatggtacagccaaggtttcaattgaaatatgtccaaagtcagaagaagatactgaaaataatgttgatgttgcggaagatgatgatcataaatattcagcccatgatggattgcatgagaaggttgaggagctgattaaatcatctggaagggctgaacctcaatcagaagatgagagtgatgaatcagatgttgttgagcatgatgtaaaagtatgtgacatctgtggagatgctggtcgtgaggatctacttgccatatgtagtaggtgcagtgatggtgcagagcacatctattgcatgcgggaaatgcttgagaaggtccctgaaggggactggttatgtgaagaatgcaagtgtgcagaggagactgcaaatcgaaagctagatattgaag

SEQ ID NO: 28699 - DNA, 247 bp, Glycine max
  unsure (1)..(247): unsure at all n locations
  Clone ID: TF_jC-gmXLIB3563P061bd07a2
ggaggggatttaatctgttgtgatggctgtccatcaacaattcatcagagctgcttggnaatacatatgctnnctcctggngaatggctttgnctaagtttaaaagtataaaatgatgaaaaggtttgatgttctagcttaagacatatataaaaggcagttccaatgggggggggaaatacacaactccattttacataaaacaatcctataaatagctagaaagagagagaataatcatgaaaaa

SEQ ID NO: 28700 - DNA, 211 bp, Glycine max
  Clone ID: TF_5819965
aagctctcttattacttcataataaacacttatattacttaataagctctactctagcaagaataatcttcacacatttaccataaaaccacttgtcacagatatcacagcaaatccagaattcatcagtaccataattctcaccacataccccacacaagatatctccatagtcatcattatcttactcttctagttcttcatcctcatc

SEQ ID NO: 28701 - DNA, 683 bp, Glycine max
  Clone ID: TF_GmC195872_1
ccacgcgtccggttccctgctgctactgagagcggagattcgtctcccccttctgttaccttccccactccgtaccaatcacaaaaacctcaccgcctgaagtcgctccccatttcggtgccctcaattaccgcgagaattatgaaaggggggcgatcgcaccgccctcagagctctgacccgccggacgagtgggtggacgggtcctggacggtggactgcatctgcggcgtcaccttcgacgacggcgaggagatggtcaaatgcgacgagtgcggcgtgtgggtccacacgcgctgctctcgctacgtcaagggcgacgacaccttcgcatgtgacaagtgcaaggccaggcacaacagcaacagcaacaacaccaccaccaccaccaccaacaccaccaaccccatggagaccgaggtggcgcagttcctcgtggaactccccacaaaaaccatttccatggacaacaaaaaagccctcccctccaggcccaggctctggaccgataagcccatcgaggagcgggtccatgttcagggcccaccgggcggagacccttccatcttcgctggccaaagcgcctcctcgattttcacgccccagctctggaaggcatgcgggtatgtccctaagaaagtcagttttaagtacaatgagttcccttttttgaatatgataac

SEQ ID NO: 28702 - DNA, 697 bp, Glycine max
  Clone ID: TF_GmC1724_4
aattttacaagtggggagagagagatttgttctggtattgttttgatcctcggtcaaaagaacacgcaaagcaaacccagtcacccccaacaaacacgagacaagccgtgtgcaaacaatagtcggtgtgaacccccaaaccctaatcgccaccacctccaatccttcgtttctatgaccgagtgctgttggggtcagcatgcgctagcttcgtcgtcgattttttggttggtgattctcgtgattcttttcgggcagaatttttgggtttgacggcatggatttggtaccgagcgtcaaggaaaaattaaactattttcgtataaaagagctcaaagatgtgctcactcagttacacctttcaaagcagggaaagaagcaggatcttgttgatcgcatattatctgttctctcagatgaacaagtttcaaaaatctgggctaagaagaatgctggtggtggaaaagaacaggtagcaaaattagtggatgatacatataggaaaatgcagatatcaggggccactgatctagcttctaagggacagggtgcatcatatagcagtagtgtaaaggttaaaagtgaatgtgatgatgcctttcaaccagatgtgaagattcgctgtctatgtggaagtagattcaaaacagagaaattggtcaagtgtgaagatgcaagatgccatgtgtggcaacac

SEQ ID NO: 28703 - DNA, 1388 bp, Glycine max
  unsure (1)..(1388): unsure at all n locations
  Clone ID: TF_GmC454_8
ggctcgagcagagttacacactctctctctctctgtcggtcaatttttcgatccgggtctattttattaagttctgaaccttgtggagcgttgtcacattccttgatgggaattgctgaattggggtgctcctgattctgtctcttcctctctctcactcaactttcttggttttgtgatccagttattggcttcattggccaggaatttcatctggggttgtcacaatctgagtgatccatctactttggtggcaaagattgctcttttaaggtcttattcagatccgagcttcaatttctataccaagagaaggagctgattctgaagtttgacttggagtggattagaagagagaaatcttccaaactgatctgagcaattggaaagtgcacaaggcttttaagtaacgtgtgtatcttgttgagcttaaagtatcttttgatccgttattggcatctgaatagagcttagttagagtctatgatggagtcagaaggagaagctggggcaaagccaatgaaaacattgggtggcaaaatctgccagatctgtggtgataatattgggaacaatgtgaatggcgatcctttcattgcttgcgatgtttgtgctttccctgtctgcagggcgtgctatgaatatgaaaggaaggatggaaatcagtcttgccctcagtgcaagacccggtacaagaggcacaaaggaagtcctgcaattcttggagaccaggaagaggatggggttgctgatgagggtgctagtgacttaaattacaattcagaaaatcagaatgaaaaacagaagattgagcgcatgttgggctggcaaatggcacatgggcgagcagaggaggctgttgctccaaattatgataaggaagtttctcacaatcacattcctctgctctctggtggacaagaggtttctggagaattatctgcagcctcacctgagaggctgtcaatggcatctccaggtggccgagggaagcgtgtccataatcttcaatattcctctgaccttaatcaatcaccaaatattagggttggggatcctggattgggtaatgtggcatggaaagaaagagttgatggctggaaaatgaagcaagataagaatgttgctccaatgagcacaggccaagctacttctgaaagaggagctggagatattgatgctagtactgatgtgcttgtggacgattccttgttgaatgatgaagctcggcaacccctctctaggaaggtttctattccatcatctaggatcaatccatatcgtatggtcattgctctgcggctggttatcctatgcatttttctgcattatcggataacanatcctgtgcccaatgcatatgcatttgtggttgatatcagtcatat

SEQ ID NO: 28704 - DNA, 477 bp, Glycine max
  unsure (1)..(477): unsure at all n locations
  Clone ID: TF_LIB3242-276-Q1-J1-D1
ccgggttttgtaaatgtgagatcccttacaaccctgatgacctaatggtgcaatgcgagggctgcactgactggtgagtttcacatgtaaggtgatgtggatcttcaatttattccacgtctgctcttgtcgtttggtttaatgttcctgatctggtccattttctggactcttgtatgttctggtctgtaaatattctgcaccatccctattgaaatttcaggttttttaatcatggtttatcctctttcatctggttcaatcgaagaaaacaagtattttaagtttgtacctacctttcccgccttaattttccctgtgtatgattcttcacttaacttggactgttcttttttcccatgacagaacaaccctgtgtgtttgactattttatgtatnngntatttgttgttctgggtttttcatccttgccagtgcatattttgcttctgtctagactgttgttatttaacttct

SEQ ID NO: 28705 - DNA, 1023 bp, Glycine max
  Clone ID: TF_GmC454_7
aattcggctcgaggaattggggtgctcctgattctgtctcttcctctctcactttctttgagtttcattgtgatccagttattgacttcattggccaggaatatcatctggggttgtcacaatctgagtgatccatctacttttgtggcaaagattgctcttttgaggtcttattcagatccggacttcaatttctataccaagagaaggagctgcttctgaagtttgactaggagtgtattagaagagaggaatcttccaaactgatccgtgcaattggataatacacaaggcttttaagtaatgtgtgcatcttgttgagcttcaactatcttttgatccgttattggcatctggatagagcttagtaagagtcaatgacggagtcagaagaagctggggcaaagccaatgaacacattgggtggccaagtctgccagatctgtggtgataatattgggaacaatgtgaatggcgatcctttcattgcttgcgatgtttgtgctttccctgtctgcagggcgtgctatgaatatgaaaggaaggatggaaatcagtcttgccctcagtgcaagacccggtacaagaggcacaaaggaagtcctgcaattcttggagaccaggaagaggatggggttgctgatgagggtgctagtgacttaaattacaattcagaaaatcagaatgaaaaacagaagattgagcacagccactggcttcctcaaggttcaccagaaggagcagactgagattgctgaaaaagccgttcaacaagaaccaatcgacttcccattttgaaaaatcctttgcacatgcatccatcttttttgagagtgataataatgcatttagtttaatttatccaccacgtaagtggctatagttggaaggaaggcgacctcatacatttgctttcaagttttgacctttttttatgttcttttggttccttacaaaaagtatgttaagctgaatttcaacatacgtatgctgaaatatttatatttcccttgttgcgatagc

SEQ ID NO: 28706 - DNA, 1501 bp, Glycine max
  Clone ID: TF_GmC8684_5
cggaattcggctcgagagcaaacaagtctccttacatctgcacccagtccatattccaattccgtgtgcccattcacgtgtgcggaccgacggcgcctaaatcccaatttcctcccattagggtttctctctctccaattcatgttctctttttcttaattcattctcttctattcgattcgattgttctatggaaccgcagcttcagcccaagctggagcccgcgccagagcttgtgagcgctggcgctgaggattccgagaagtcgcatgtcagtgatgtcacggaggttcgccacgttgccatggctgaggcaaacgccggttgttgcgcttccgttttgaaacggaagcgtggccgtccggccaagggaagccgcgttccgaaagggatgactccgccgtcgaggcagaaaaaggaagaagaggatgtttgcttcatatgcttcgacggtggaagccttgttctctgtgatcgccgtggatgccctaaagcgtatcatccctggtgtattaagcgagacgaagccttttttcgctcgaaggccaaatggaattgcggttggcatatatgtagcgcttgtgggaagggatcgcattatatgtgctatacttgtacctattctttgtgcaagagatgcacaaaaaatgccgattttgtctctatcagagaaaataaaggtttatgtggaatatgcaagaggactataatgctgatagagaattgtgcccagggtgataaggcggagtgtgaggtggattttgatgacaagagcagctgggagtatcttttcaaggtgtactggatgtatttgaaagagaagctatctttgacatttgatgagatccttcaagctaaaaatccgtgcaaaggagttgcaagattagaagcatctggtgttgcggtggatgtttcatcattactcctttctccaaagatggagctgccaatcaacaattttgcgaatgataaaccgtggcattatcaggatccaactgggaaggttcaaggacctttctctttattgcagctgtataagtggaatgcttgtggatattttccttcagatctcagaatatggagggtagacgagacacaaaataactctatattcttaactgatgtgctgaatgggaagtgttcaaaaaatgtgtcattgccaaacaacagccaacagctgtctttgggaaccaatagtacattggaaaataaagaaaatagtcaggatggtggtgagaatgagaacaatgcgacaaggaatggaaattctgcaaaccatcaaattgttgagcagtgtgatgagcaaaaagtggctgatacttatacacaatctaatggtaaagatgaatctgtaaggagcaatggttggaactctcagtctccaggtttgactatacaagcagatgggaataacaatgaggggcaaagtggaaattctgaaaggatggaggagtcacccaaatgtgaaatttcttgtcatgacatcccccatgtatacact

SEQ ID NO: 28707 - DNA, 1030 bp, Glycine max
  Clone ID: TF_GmC77995_1
ccacgccgtccgcacacatatacatacacacgtacacagcaacactctcccacatgtctctgactctgtctcagctctcatcttatctctcttctccgttgaatttccaacccgtgcttgctttgcctagattctctttcttcttccacacatactcacatttctttttacccttttataatgggttttctgataatgctgcaagcttgtgtctttcacaattgacaaaagagtggtagtagcagcctggcaccaccccatctgttagaaaacttggttgctcaagtaaagaatcattttcattcactatatcccccaaaggaaacagctttctttgatttcactcctagtttaaaaacctttctatttttgcttctttttctttcactatatgtgcatggaagaggcaaatttgtgaagtggggtgtttgatatttgaagattgaggtgttgaagagtggtgagttaaggtttcaatggacaccaaagggagattagttgctgggtctcataacaggaatgagtttgttcttatcaatgctgatgaaactgcaagagtagctgtcacagaattaagtggtcaaatttgtcagatctgtggggatgagctggaagttactgtgaatggggagccatttgttgcttgcaatgaatgtgcattccctgtgtgcagaccttgttatgagtatgaaagaagagagggcaaccaagtttgtcctcagtgtaaaaccagatataagcgcatcaaaggtagtcctagagttgagggtgatgaagaagaggatgatactgatgatttagaaagtgagtttgatattgggagtgtgttctctgctcgccttaactatggttcacaggtgaatggttcagtgatccacgcaccatcagagtttgatgcagcttcggtggcttctgagatccctctcctaacatatggtcaagaggatgtcggcatttctgctgataaacatgctcttattcttcctccattcacggcgtcgagggaaacgggggtgtgccatgcctttgg

SEQ ID NO: 28708 - DNA, 1885 bp, Glycine max
  Clone ID: TF_GmC1432_1
agtggtgtgcaatggcatggaaggcttttacatcccaaagcttcatctggtcatgtgcaagtgtggctcttgtggttcaagaaagcagacacttagtgaatgggaaaaacatacaggttgcagatcgaaaaaatggaaacatagtgtgaaagtgaaaagtacaatgctaccactggaaaaatggatggaagaaaacattccacttgatggaatacctgagcaggtagatcaacagcaggtgctggcctttttgcaagagaagtatgagcctgttaatgtgaaatggacaacagaaagatgtgctgtttgcagatgggttgaagattgggaagataacaaaattattatttgtaacagatgccaaatagcagtccaccaagaatgctatggggcaaagaatgttcaggattttacttcttgggtttgtagagtatgtgaaactcctgatgttgagagagagtgttgcctctgcccagtaaaaggtggtgctctaaagccaacggatgttgaaatgttgtgggttcatgtaacatgtgcttggtttcgacctcaagttgttttccaaaaccatgaggccatggaacctgccatgggaatccttaaaattcctcctaattcctttgtgaagacttgtgtgatctgtaaacagagccatggttcctgcataagttgttgcaagtgttctacttattttcatgtgatgtgtgcatcaagggcaggatatacaatggagttacattccatggagaagaatgggactcaagtaacaaggaagctaatatattgtgcaattcacagggttccaaatccagattctgtactggtggtacacacacccctggggattttctctcccagaacttcacttcaaaatcagaagggatgcttcaggggatcaaggctaattttatcaaagaatatagagcttaatgaatcttcaaccactgaaaatgacttagtagagccgctgtctgcggccaggtgtcgtgtgtaccgaaggtctcctaataagagagctgatgtgccaataattcacttgctggggggacccagccttcattctttaggtgcaataactcagttgaacatttttaaggatgctgatgaatctaaagtattcacttctttcaaggaacgtcttcaccatttatgggaaacggaaaaatttagagtttgctttggaaaatcgggcattcatggatggggtctctttgctcgtagagatatacaagaaggagagatggttgttgagtatcgtggtgtgcacgtaaggcgtagtgttgctgacctgagggaagaaaaataccgttcagaaggcaaggattgctatctgttcaagatcagtgaggaagtggtagttgatgcaacgaacagaggcaatatagcacgtttaataaaccattcttgcatgccaaactgctatgcaaggattatgagtctgggtgatcaggggagccgaattgttcttattgccaagaccaatgtttctgctggtgaagaactaacgtatgattacttgtttgatccagatgagcgggatgaattgaaagttccttgcctttgcaaagcccctaattgtaggagatttatgaattaggcttaggcattttttttctctctttttgagcaattgcagttgccaaacccgtgaacatttgtcaattgagccatttttaaaatttttttaaaatagtttagtataatttgtatagcattatattattataaaataaaatagaaaacttctgagcaaatgagctggaggcatttttgtaacttgcacggatgttcttcacattatgacatttagaggcaatttacttgaagacaaaaggtgtatagaggagcacacatgttacataatacattttaggcttttcatgtg

SEQ ID NO: 28709 - DNA, 803 bp, Glycine max
  Clone ID: TF_GmC96941_1
taaaaacacttcccatgcgtccgacctaatctaacccttatcaaggagtttaacacagtttgtttggcattgtatacgagttgttgtaattattcttgtacttgagtttaattccggcgaataaaaaaacctaatctaacccttcgctctgctctcgcttcaactattcacaccaagatggaagctgtttgtcttcactgtggcgacagaggctttccagaaacattggttttttgcagccagtgtaaggcttatgcgctgcataggtactgtttaaaggggcctgtgatttttactgatgctgttacatggttttgtgaggattgtgcaacaaagctatgggtgccacctgctcttgaccaatctacacctatctcatctgtaacaagaaaaaattgcgtactgggagtgaagaaacacaataaacagcaaaaaaagaaggttaaaaagaagcagaaggaaggaaaagctaactctgtcttagttgctgaaacaaaggttgtattatctggtagtcacagttcacctgggcctgagcatcctcaatgtagcaacagaggtgaagaatatgaggtgaaaaatgactgtggaccagctccaagggatgtagctaattttgttgctggtgaagaagaaagtgtggccagggatatagctaattctgatgaaggtttcaaatctgttccagtttctcaaggagctaacaatagtgattcaggttgggtagaataggatggtatgtttatgcacagcctactattaatccaatctggaggggaagtatggatttctgccatgaaact

SEQ ID NO: 28710 - DNA, 1406 bp, Glycine max
  Clone ID: TF_GmC454_10
cggaattcccgcgtcgacccacgcgtccgggtgcccaagtgtgccagatttgtggtgatggtgttgggaagactgtggatggtgaaccgttcgttgcgtgcgatgtttgcgctttccctgtctgcaggccttgctatgagtatgagaggaaggatgggaatcaatcttgcccccagtgcaaaacccggtacaagaggcacaagggaagtcctgcaattcttggagacatggaagaggatggtgctgctgctgctgatgccagtgacttcaattatgattcagaaaatcaaaatcaaaatcaaaaccaaaagcagaagatttcagagcgcatgttaagctggcaattgacatacccacgaggagaggaggttggtgctccaaattatgataaggatgtttctcacaaccacattcctctgctgaccagtggacaagaggtatctggaggagttgtctgcagcctcacctgagaggctctcaatggcatctcctgcagttggtggtggaaagcgtgtccataatattccatattcatctgacattaatcaatctccaaatatcagggctggggatccaggattgggcaatgttgcatggaaagaaagagttgatggctggaagatgaagcaagaaaagaatgttgttccaatgagcacaggccaggctgcttctgaaagaggagctggagatattgatgctagtactgatgtgcttgtagatgattctttattgaatgatgaagctcgacagcctctttccaggaaggtttctattccatcttctaggataaatccatatcgtatggtcattatgctgcggctggttatcctttgcattttcttgcattatcggataacaaatcctgttcccaatgcatatccattgtggttggtatcagttatatgtgagatttggtttgccatatcttggatattggatcaatttcccaagtggcttcctgtaaaccgtgaaacatatcttgacaggcttgcactgaggtatgatcgggaaggagaaccgtcacaactagctgctgttgacatttttgtcagtactgttgatccattaaaggagcctccacttgtgactgccaataccgtactatctattcttgcagttgactatccagtggataaggtctcctgctatgtgtctgatgatggtgctgctatgttgacatttgaagcacttgctgagacatcggaatttgcaaggaaatgggttccttttagcaagaagtatagcattgaaccccgtgcgcctgagtggtatttttctcaaaagattgactacttgaaagataaggttcatccatcatttgtcaaggatcgtagagcaatgaagagagaatatgaggaatttaaagttcgtattaatggacttgtttcaaaggcacagaaagttcc

SEQ ID NO: 28711 - DNA, 251 bp, Glycine max
  Clone ID: TF_700735931H1
gctgatatgttgcgataactgtccatctacttttcacctagcttgtttgtccactcaggagatcccagatggcgactggtactgcactaactgcacttgtaggatatgtggaaatttggtcattgacaaagacacttcagatgcgcatgattcattacaatgttcacagtgtgaacataaatatcatgagaaatgccttgaagatagagataaacaagaagtagcaatttcagacacttggttttgtggtc

SEQ ID NO: 28712 - DNA, 553 bp, Glycine max
  Clone ID: TF_GmC340979_1
caagtttaaatccacaatcaactaatcacaaaggcacagttttaccattacgccatacttataataaaattgtccaagataatgccacatgttaacttagcaaggctttgtttcccaatcaaaacctcaacattttcttagttttattgatgagaattaagaatgcatctgactacagtttcgctttaagatttgcgcagcatgagaagctccccaaaatcacaatgaatggggacatactagggactccaaagagttgcattggataagagatgtacactaatacaagtgattactacgataatgcatccgaagttccttgcagtgagggcatatccatggccgtagaggagggtccatgcaataggaatggatctttcgaatgtggcaaacatcgcaactctcaaggagatcctctggttcccgaccacggcaaactacacaagcatttgactgtgcagactcaaagatattatctggcaaattttgatccacggggataaaaataactggggctgaattgtcacatgggaatcgttgggaggataatttt

SEQ ID NO: 28713 - DNA, 595 bp, Glycine max
  Clone ID: TF_LIB4390-044-R1-N1-E9
ggggggggggggggttttttttttttttttttttttttttttttttttttttttagcaaacaaggacaaaacaataacacccatttaaaaaaaaatgggttcaaaaaccaaattttaaagggacataaaggaaaaaacttcacctttcccaagccaacagggggggggggaaaaattttttctttttaaaaagggaacaacggaatgggagttgatactaacgaaaccaacacagcaaacccccacagactaaaaaaaaaaacccacccaaggcaaacagaaactatccattaacgggaacatcaaggaaaaaaagcaaaaaaacagggcccaacaatgatgggaaaggagggaactgggcccatggcaaacagggccgagccctcttggtacgggaaaaagggcacctgaatgggtggaaaggccccgccctaacaggggggatcttcacacatttaccagggaaccacttctggcagagggcacagcaaatccaaaattcatcagggccaaagggcccaccacaggccccacacaagggccccccagggtcataaaaaactggaacggccaggtcttaatccccaactttggg

SEQ ID NO: 28714 - DNA, 1605 bp, Glycine max
  Clone ID: TF_GmC47902_1
tccatggttgggcccacgaaatcgcgcagcttccgtgcgactccgatggcgtctgcatgctctgcaaactcaaacccagtccctcccaaaccctctcctgtggaacgtgtgccactccctggcaccttccgtgtctcccttcgccccctctctccctctctgactcccattgggactgccccgactgttctgacaccttctgccatcaccccgtcgctcccaccgctcaccttgtctccgccattcacgccattcaggccgacacctctctcactgaccaacagaaggccataaaacgccaacaactcctcgctggctctgcccacccctcaaaggacaaaaccaaagccaaagacatttttgatggaagcttaaactgctccatatgcatgcaactacccgatagacccgtcacgacgccttgtgggcacaacttctgtttgagatgtttcgagaagtggatcggacagggaaagcgcacttgcgccaattgccgtgctcaaatcccgaccaagatggcgagccagccgagaatcaattctcagttggccatggccatccgattggcgaaggcagccaagtcggaaggttcttcgggcccacccaaggtctatcattgtccgcgcaatcaggaccgtcctgataccgcattcaccacagagcgagccaagaagactggaaaggcaaatgcttgcagtggtaagattttcgtgactgttcctcccgaccattttgggcctatcccggctgaaaacgaccccacccggaaccgtggtgttctggtcggggacacgtgggaggaccggatggagtgtcggcagtggggtgcccatttgcctcatgtcgccggcattgctggacagagtgcttatggttcccagtctgttgccctttctggtggctacgaggatgacgaggaccatggtgagtggttcctctacactggcagtggtggcagagatctcagtggcaacaaacgcaccaacaagctacaatcctttgaccaaagtttcatcaaaaatagggcatgtggaggtggacgcactttacgagcacagaaaaatgttatgaaatgcccatcttgttcaaatgacattgctgactttctccagaatccacaggttaatagagaaatgctggctgttatagaatcattacaacgccaggctgaagaaaattctgaagagttaagtgataaaaatgatgaaaatctgcatgatccaacagaggtttctaaacccagtgattctactgataaagtcttggaggaaattaaggacaatgagctgaatcagccacacaagcgaaggaaggagtgaaggatgactgcgaagttattttggtcgtttggattatggattttcattgaatagcaagggacggactgctgatgcaatttttttaagtgctagcatagattgctggatattgacttgtatggatttaaatatattttttagaggttcatgtgatagaaaattggtatctcctttatttgtgggtttcatgtctctagaaggagagaatgagtgcattttacactggaatggatatcttaatgcattatgtgcttttattgaagatgttattttaactactactatt

SEQ ID NO: 28715 - DNA, 2446 bp, Glycine max
  Clone ID: TF_GmC961_1
ccggtcctgcattcccggaattacccagtcgacctatgcgtttagtcagaatgagtctgcagcagctttcggctgacagcgaaggcgcgtgtatggtgtgcaagggcttgccggggcaagaagagagactgttatgcgtcacgtgtgacaccccttggcacgtgccctgcctgttcgcccctccacccactctgtccgccaccgcacgatggctatgccctgattgttccattctggactctgacgttccaccagtccccgctcccgcccgcaaccaactggtggctgcaatgctggccgttgaaaatgacgcttctctcacccaacacgacaaggcccgaaaacgtcaagagcttttgactggaaaggctcccgcagacgacgacgacgacgacgaacaagagaataaatcatccttatcggatattctctccagatctctcaactgctccatctgtatccagttaccggagagacccgtcacgagtccgtgtgggcacagtttctgtttgaagtgctttgagaaatgggttcggcaagggaagaggaattgtgccaaatgccggcagattattccggccaagatgacaagccagccccgtatcaattctgcactggtgtttgcaatacgaatggcgaggcaggcttcaaacagtagtggtagtggccgaggaggagtgaggagtgttaaccatttccttcacaatcaagatagacctgatgagccattcaccactgaacgcgcacagaggagtggtcgtgccaatgcggctagcggtaaaatattcgtgacagtgcctacggatcattttggtccaatcacggcagagaatgaccctctgcggaatcaaggtctgctggtaggtgaaagctggagagacagactcgaatgcaggcaatggggtgctcacttcgtccctgtgggtggcattgctggacaatcagaccgcggtgcacaatctgttgttctttctggtggttatgttgatgacgaggaccatggagaatggtttctctacaccggaagcggcggtaaggatcttagcggcaacaaacgcacaaacaagagtcactcttttgaccagaagtttgagaaatacaaccgtgcacttcaagttagctgtctccagggttatcccgttcgagttgtcagatctcacaaagaaaagcgatcctcatatgcccctgagactggtgtgcggtacgatggaatttatagaattgaaaagtgctggcagatagcagggttgcagggtttcaaagtttgccggtatctattcgtcaggtgtgacaatgaacctgccccttggacaagtgatgatcatggagataggcccagacccttgccggtcattcgtgagctgaaaaaggctacagtcatacatgaaaggaccgaatctccatcttgggattttgatgaggaggattctcgttggaaatggaagaaaccaccgcctcccagcagacaaaaggtacaaaatgttgaacccgtagaggtagcaagggcaaagtcaaataaagaagtaaagaaattccaacttaagtcaatcaaggaacaattgcagagagggttctcgtgcatgatatgcaaggaggttatggtttcaccagtgacaacaccgtgtgctcataacttctgcaagtcctgtttggaaggtgaatttgctggtcaggcttttgtgaaggagagaagtaagggtgggagaacacttcggtcccaaaaaaatgtgatgaaatgtccttcttgttctattgacatttctgattatcttcagaacattcaggttgacatagatttgaagagtgcaattgagtcattgaaagccaaggtcgaagaaattggagaatcggtggagtcaagtgaagatgcagatggattacaggatgatggtgctggcaaggatgaagatactgactccagaaacaaaaattctgtgcaggagttgaatggtctacctgaaggatctgatgttggtgaacttgaagataccaccaataaggagccagatccagcaatgaagtgcaatggaaagagaaagaaaggtgattatggaaatcaatcgcctgatgataaaatggaaaaaagaggtaaaaattacaaaacaacagaggaagaattgcatgaagaaaatgattcttcatcaagtcctctccatcctcaatgaaatcttcatagactgaggaattttaacaactagaccttcagcttgttggattgcaacatgattctctttattttgctgatggttcagtattagtcttagaaatgctataaggactatcattgtatcaagttatactcttttcgttttagtttactttcttagtttgttatcacccttttgtgaatgttcatggttttatgggaaatggaactatcaaagaccttaaaaaaccccaatcaaattaaagaccttttttttagtaagtaatgaaaagaaaaggg

SEQ ID NO: 28716 - DNA, 726 bp, Glycine max
  Clone ID: TF_GmC251796_1
atgaccggctgcgagaagccgaatgcccgggtcgactctgcttccgatgagtttgaggaagaagaatgagaagaaagagcaggggcaaacgtaggcgtgcggcatctgcaacaactctgagtccttcttccctctccgccattcccattctttgggatgcgtatgataccatctgcattcactgcaataacaaaggcgaggaggccaaggaggatggacttttgatttgcagcggaatgggctgccccgtcgctgtccatgccacctgcctcgccaccggacctaaatttgacggttccggtaacttctgctgcccctactgctggtacaagcgcgccgttgacacgtgtcgacgcctcagggagaaggccctggaagccaagggagacttgtcacgctttctggacaatcacgaccacgcacgtgcggctgcacatgtggatctggttgttcaggatagtgaagaactcatggaggaaacaggaacacaagcacagtctaaagataataaagatgaggagggagaggcacgtgtgaatcaggttcatgatagggaagaatctgagacagaaccagaagagaataaagaaaaggagggaaaggttcgggatgatgaagaactcgtggaagaaagagaaagaaaaacagtgacagaagcacaatctcaagagaataaagatgaggaggataagtttcaagatgatagtgaagaactcgtggtggaaa

SEQ ID NO: 28717 - DNA, 268 bp, Glycine max
  Clone ID: TF_LIB3242-613-P1-J1-D12
caccatggaagcttgtactgggctttttgctggtaccccaaacagcaatgagcttgtggtcattcaaggacacgatgagcctaagcctgtgaagaacttagatggtcagctctgtgagatatgtggtgattctgtgggacttacggtggatggagacttatttgtagcttgtgaagagtgtggtttccctgtgtgcatgccatgttatgagtatgaaagaagggaagggactcaagtttgtcctcagtgtcatacaagatacaagcgt

SEQ ID NO: 28718 - DNA, 407 bp, Glycine max
  Clone ID: TF_jC-gmXLIB3563P056bc07a2
ataatgggtgatgtggttacagtttgtgatatctgtggggatcaaggatttgaagagtatcttgctatttgtaacaagtgtcctgatggggcagaacacatttattgtaatgatgaaaagttggaaaaagtgccagatggtgattggtggacctgcgaagactgcaggaagtcaccaggtaatgaattaccaacattgggctcacaaaccgagatagaacatgctcaatgctctcctctattgaattcagaatttaatggacagctgaccaatcgggaggttgagaaaaatgtagctattcatgatactagaaagaggaaaaatcttggattgctgtccaaatctgtgtcatttgataatgctagctcagcgaaattaaatggcaaatgctctgaagttattgcagc

SEQ ID NO: 28719 - DNA, 2618 bp, Glycine max
  Clone ID: TF_GmC838_1
ccgccacgcgtcaagagagagagtgagagatggcgtattgaatgggcgaagattttcacgctttgcttttgcctccaaattgatctctctctgtcacgagctttgatctgaagcgaagcacttcctctgcgaacatggaagcaagtgcgggaatggttgccggttcgcataaacggaacgagctcgttcggattcgccacgattcttctgacagcgggtctaaacccatgaagaatttgaatgggcaaatctgtcaaatatgcggtgatactgttggattaactgctactggtgatgtgtttgttgcttgcaacgagtgtgctttccctgtgtgtcgtccttgttatgaatatgagcggaaggatgggaaccagtcttgtccacagtgcaagactagatacaagaggcacagagggagtcctcgagttgagggtgatgaagatgaagatgattctgatgatatcgagaatgagttcaattatgcccaaggaaaagccaaggccaggcggcagtgggaagacgatcctgacctgtcgtcgtcttctagacgcgaatctcaacagccaattcccctcctcaccaatggccaaacgatgtctggtgagattccatgtgccacacctgatactcaatctgtgcgaactacttcaggtcctttgggcccatctgaaaaggttcactcacttccctatgttgatccaaggcaaccagttccagtaagaattgtggacccatcaaaggacttgaattcttatggtctgggaaatgttgactggaaagaaagggttgaaggttggaagctcaagcaggagaaaaatatggtgcaaatgactggtagatacactgaagggaaaggtggagatgttgaaggaactggttctaatggagaagaacttcaaatggtagatgatgctcgacaacctatgagtcgtgttgtgccaattccttcatctcagctgacaccttatcgtgttgttatcatcctccggttgattattcttggcttcttcttacaatatcgtgtaactcaccctgtgaaagatgcataccccctgtggttgacatcagttatttgtgagatttggtttgccttatcctggctcttggatcagtttccaaaatggtctcccattaatcgtgagacttatcttgaacgacttgctttaaggtatgatcgtgaaggagaaccatcacagttagatcctgttgatgtgtttgttagtacagtggatcccctcaaagagccgcctcttgtaactgcaaacactgttttgtctatactttctgttgattaccctgtcgacaaagtttcctgctatgtatcagatgatggttcagctatgttgacctttgaagcactatctgaaacagctgagtttgcaaagaagtgggtgcccttttgcaaaaagcacaatattgaaccaagagccccagagttttattttgcccagaagattgattacttaaaggacaagattcagccctcgtttgtaaaagagcgacgggcaatgaagagagaatatgaagaattcaaagtacggatcaatgcccttgtagccaaagctcagaagatgccagaggaaggttggacaatgcaggatggaactccttggcctggaaataatcctagggatcatccgggaatgattcaggtgtttttaggtcatagtggggggctggatacagatggaaatgagctgcctagacttgtttatgtttctcgtgagaagcgaccaggcttccaacatcacaagaaggctggagctatgaatgctttgattcgagtttctgctgtcttgaccaatggtgcatatcttctgaatgtggattgtgatcactatttcaataatagcaaagccctcaaagaagccatgtgtttcatgatggatcctgttcttggaaagaagacatgctatgttcaatttcctcagagatttgatggcattgacttgcacgatcgatatgccaatcgcaatattgtgttctttgatatcaacatgaaaggtcaggatggtgttcagggcccagtctatgtgggaactggttgttgtttcaataggcaggctttgtatggttatgatcctgttttgactgaggaagatttggaacctaacattattgtaaagagttgttggggttctagaaagaagggaaagggtggcaataagaagtacagtgacaagaagaaagcgatgggcagaactgaatccactgtacccatatttaatatggaagacatagaggagggtgttgaaggttatgatgatgaaaggacactacttatgtctcaaaagagcttggagaagcgttttggtcagtctccagtttttattgctgccactttcatggagcagggtggcattccaccttcaacaaaccctgcaactcttcttaaggaagcgatccatgtcatcagctgtggttacgaagacaagacagagtggggaaaagagattggatggatctatggctctgtgacagaagatatcttgactgggttcaagatgcatgctcgtggttggatttccatctattgcatgccccctcgcccagcatttaaaggttctgcccctatcaatctttctgatcgtcttaatccagggcctccgtggggccta

SEQ ID NO: 28720 - DNA, 772 bp, Glycine max
  Clone ID: TF_GmC838_2
gaagagagagatggcgtattgaatgggcgaagattttcacgctttgcttttgcctccaaattgatctctctctctctctctcacaatctttgatctgaagcgattaagcgaagcactttttctgttaaaatggaagcaagtgcgggaatggtcgcaggttcgcataagcgaaacgagctcgttcggattcgccacgattcttctgacagcgggtctaaacccttgaagagtttgaatgggcaaatctgtcaaatatgcggtgatactgttggattaactgccaccggtgatgtgtttgttgcttgcaacgagtgtgctttccctgtgtgtcgtccttgttatgaatatgagcgaaaggatgggaaccagtcttgtccacagtgcaagactagatacaagaggcacagagggagtcctcgagtggagggtgatgaagatgaagatgactctgatgatatcgagaatgagttcaattatgcccaaggaaaagccaaggccaggcgccagtgggaagatgacgctgacctgtcgtcgtcttctagacgcgaatctcaacagccaattcccctcctcaccaatggccaaacgatgtctggtgagattccgtgtgccacacctgatactcaatctgtgcgaactacttcaggtcctttgggcccatctgaaaaggttcactcacttccctatgttgatccaaggcaaccagttccagtaagaattgtggacccatcaaaggacttgaattcttatggtctgggaaatgttgactgga

SEQ ID NO: 28721 - DNA, 1260 bp, Glycine max
  Clone ID: TF_GmC1270_1
gtactgaggccttttcttgtgtggccatagacccagagctattcctcaattatcaatatcttctgcttctctctctcgatgagaaacaacaacacatacagcaaaacatgacaaccaaaggaacaactcactctgaacccaacaacactgaatgttgcatgtgtggggatcttggcttctctgatcagctttttcaatgcaaagcctgccaattcagatctcaacacagatactgcagcaatctctacccgaagccagagtctcttggaacctgcaattggtgtttgagtcaaagagaggacaccaaagagaggtcaaccaattcatcaaattcttcctcatctattaggaacaatgatgatgagagcagaatcaagagaatcaggaatggtaatagctacaacagtgctcaaaatattggaccggtgaagaagggagtgaaagggagtgtccttcatctccaaattcataaacccattaagaaaccaaagtcaccggagtcatcaagatcaccatcagcatccaattctccaccgaaatcttcgccggttttggtttcaacccggaagaggattgtcaccaatggtaccttggaagagagactgaggaggactaggtcagaagacatcacaagaagtggtgcaaccaaacaggtcttcaggaataaggtgagaaggtataagcttctggatgaagtttcaagttaaaataatactaaaaattataagaataaaaggtttcgaatgaaagagttatgtaagagatgatcagtctatacacaggaaagaaagaaaaaagggtcatggtttttggttccttttgcgttttttccccttcaaagttttgtcccaatacatgtacagaacaatggtgaattaatgaaggagcaaaaagtgtttgagtttagactcattgtaacttgacagttgccattcccttttttttttttttccattttcttctcgaatgtcatcataatttacaatgaaaattaagattcagtttgtcaattgaatactaaatgcggtttgtggaagagtgagctaataatagtaatggtgaagagtttgataatttccttagttttaggttcaaatcttcattgcagcaaaaaatcacataccctcttctattttcctgcaaaatataatggcataagctgaattcaatgacttgagaggaaaaatagagaagcaaagcttgcttagcatttgtttttccaattttaatgtgaatgagattaaggtcattgaaagagat

SEQ ID NO: 28722 - DNA, 426 bp, Glycine max
  Clone ID: TF_GmC216911_1
acctgcattttctctcacttctccttccctctccgccattcccattctatcggatgaacacaacaacaacgcaccaactgcgtttgataccgactgcgacgatgacaataatgcccttcatcaccgcggctccgaacccgaacccgaacccgaactcgaacctgtggatatatttgacaaaactatctgcattcactgcgataacaaacgcgaagaggcggagggagttttaatctgcggcggaaggggctgccccgtcgcggtccacgccacctgcctcggcttcgaacctgaattcgacgattccggtaacttttgctgcccctattgctggtataagcgcgccgtggacacgtgacaacggttgagggagaaggccatgaaggcgaagggagaattgtgacacttttttggacaatgacgtgc

SEQ ID NO: 28723 - DNA, 494 bp, Glycine max
  Clone ID: TF_LIB3242-327-Q1-J1-E10
tttctttttccccattttttctctttctttttttttttctttttcttttttcattttcattttcccctgggcttcgtctccacaggtgacgccattctcgtctcccttttccaacaaaccgtttcctcgggaattgagagagttctaattctgcccctcgcggcttcgcgaatttaccaatccgagagtcatggctccagccaccaccaattcctcgccctcggctcagcgccacgtcggcttcagtcggcgcacgcaggcgccgcgccagctggacggcgactcgccgccagtgaagaagtaccggatgctgtcagagataatggcgcgcgcgccgtacgcggtggtggagagagaaacttacagcgacctcttgtgcgaccaatgcggctccggcgagctgccggaggagctgcttctctgcgacaaatgcgataaaggctttcacatgaaatgcgtgaggcctatcgtcgtgaggattccgattggatcgt

SEQ ID NO: 28724 - DNA, 3729 bp, Glycine max
  Clone ID: TF_GmC760_1
gtgggtttttgagtctacattcaaaagaggacaaataaatgctgttgaaggaatggaaactttgccgaaaggagttgacatttgttgcatctgccaccacaagcatggtgtatgcatgacgtgttgctatggccattgtcagaccacattccatccatcctgtgctagaagtgctggaatatacatgattgtgaggactactggtggcaaggctcaacacaaagcttactgtgaaaaacatagtttggaaccaaaggcactggctgaaactcaaaaacatggaattgaagagttaaaaagtatcaggcaaattagggttgaactagagagattacgtctcctttgtgaaagaattgtgaaacgtgaaaaaataaagagggaattggtactatgttcacatgacatactggcctttaaaagagatcatgttgctaggtccgtgctggttcgaagccctttcatccttccggatggtagttcagaatcagctacaacgtcccttaaagggaacacagagggatacagatcatgcagtgaaccacttcaaagatcagatgatgttactgtggacagttcagtttctgctaagcgccgtgtcagagtcgccatatctatggacacagactcaaaattggacgatgactgctcaacctctcaaagtcgatacaaccacaggattccagatagattgcaattttctggcaagaaggttcctcatagaactgctgcatcacgtaatatttcagatgaaggtggatggatatccaaatctagaaatcattccgatagattcggaaaagagcttgttatgacgtcagatgaagcatctatgaagaattcaatgctacctaaaggatatgcatatgttcctgctgattgcttgtcaaatgagaagcactctgacgaggacgtatatgctagtgaaccagtggagcatgacaggtagagtgttggatcccagcctggttctttatttttccttcgaggctgacatccataatattcaatgccgtgctatttttcttcgagtggggaagttttatttgagaatggcggatatttttgttatttgcagcatgtactgctttctgtctcttattatgtgttagtggacatcctttgatatgacttacacagtgtggtactctccttgagagtaaagtttaccttatttgaaatgctcaaagaaggatgcaatctctagttacattcatccatacatcaacaagaaattgctgcagattcgtgatggggtgcccttggaggacattatatgttcaatcagtgagggaaattcttctttggttgaatcctttggggctagttcctgctcaagtagccaaaatcagaacttaactcgagttgatttttcaaagcctgatgaagtaaatatggagcagttggttagggctataaaaatgggactttttgaattttctccacaggatgaattggagggggaacttgtttattttcagcatagattattgcagaatgcagttgcaaaaaagaggcatattgataacttaatctacagtgttgccaagagtttgccacatgagattgataaggcacatcaacaaagatgggatgaagttattgttaatcaatatctgcgtgatcttagagaggcaaaaaagcaaggcagaaaagaaagaaagcacaaagaagcacaggcagtgttggctgctgcaactgctgctgcagcagcatctactagggctctccggaaagacaacttagatgaatcaatgcaacaagagaatttgttaaaattggatactctaaatggaagaaccggtgcttgttctcagccgatgtctcgagccaaaagacgacagaagggggtagctgtgacaagaacttcgtccgagaaatattcagaattttgcatgccaacctcagatttgtctaaggagcaatgtaaatcatgtgatatttgcagacgatcagagtttattttaaaccctatcctagtgtgctctggttgcaaggtttcggtgcacttggattgttatcgtagtgtgaaagaaacaacaggtccgtggtactgtgagttatgtgaagatttgtcctctagaagctctggggcagctgctatcaatttctgggagaagtctgttgtagaatgtgctctctgtggtggtactactggtgcttttagaaagtcttctgatggtcaatgggttcatgccttctgtgctgagtgggtttttgagtctacattcaaaagaggacaaatagatgctgttgaaggaatggaaactttgcaaaaaggagttgacatttgttgcatctgccaccacaagcatggtgtatgcatgaagtgttgctacggtcattgtcagaccacattccatccatcctgtgctagaagagctggtttgtacatgaatgtgaggcctactggtggcaaggctcaacacaaagcttactgtgaaaaacatagtttggagcagaaggcaaaggctgaaactcaaaaacatggaattgaagagttaaaaagtatcaggcagattagggttgaactagagagattacgtctcctttgtgaaagaattgtcaaacgtgaaaaaataaagagggaattggtaatatcttcacatgacatactggcctttaaaagagatcatgttgctaggtcggtgctggctcgtagccatttcatccttccggatggtagttcagaatcagctacaacgtcccttaaagggaacacagagggttacagatcatgcagtgaaccactccaaagatcggatgatgttactgtggacagttcagtttctgccaagcgccgtgtcagagtcgccatatctatggacacagacccaaaattggacgatgactgctcaacctctcaaagtcgatacaaccacaagattcttgatagatcacaattttctggcaagaaagttcctcagagagccgctgcatcacgcaatatttccgatgaaggtggatggagatccaaatctagaaagcattcggagacattcggaaaagagcttgttatgacgtcagatgaagcatctatgaagaattcaatgctacctaaaggatatgcatatgttcctgctgattgcttgtcaaatgagaagcactctaacgaggacgtatatgctagtgaaccagtggagcatgataggtagagtgttggatctcagcctggttctttatttttccttcgaggctgacatccataatattgaatgccatgctatttttctcgtggggaagttttatttgagaatatggcaaaatgtaaagataggctttttgctctggcgggggctagttttgttagcattgtacattccttatgagagtaaactgtacagtggatgagcatttcttgcatttacttgtattagaagggtatgcattccgttttattgacacatttgtgggaaggactaaacggaagcattccttgtaatcatacaagggaagatcggggaatcacctgtttttctgtaaagttgatgtgtacatattttatggcagtcttagtaattctgaaagggatcgtgctcgatatcagatccaccgagcatacaaattatacttaactcccacctcataaatttgtatttccccctttatcctgcatttctattatgatgattcttgcgaccactgaattcccttgttataatgtagatgtagttagtgataattgatcctgtttcatttgttatgcaaaaaataaaaaaaaaagaagacata

SEQ ID NO: 28725 - DNA, 4872 bp, Glycine max
  Clone ID: TF_GmC4344_1
gagaagtctatctcaatggaatctttttttacagaagtcaccgcttacccccctgcacatgtggtacatgaaaaattaagtgagatgaaaatggataacaataatgcagatgataaaatgcctattgctgaacctgtcaaatatgatgaacctgctaatttagctaggcctgaaaatataaaaactgagaaagaaactggacaagacaggaaagaaaatgttgtgcagacatctgaaaatgcagctggaaccaagtctggcaagccaaaaataaaaggagtctcattaactgaattatttactccagagcaagtcagggaacatatcactggcctcaggcaatgggttggccagagcaagtcaaaagcagagaagaatcaagcaatggagcattcaatgagtgagaactcctgccaattgtgtgctgtagagaagcttacctttgaaccaccgcctatttattgcacaacttgtggggttcgcattaaacgaaataatatgtattataccacgggcaccggtgacacacggcattatttttgtcttccatgctataatgatgctcgtacagagaacatcattgttgatgggactcccattgccaaatcaagattggaaaagaagaagaatgatgaggaaactgaggaatggtgggttcaatgtgataaatgtgaagcatggcaacatcaaatttgtgctttatttaatggcagaagaaatgatggtggacaagctgaatatacttgccctaactgctatattcaagaaatagagaggggagagcgcaagcccttaccgcaaagtgctgttcttggagccaaggatttgccgagaactattcttagtgatcacatagaacagcgattatttaaacggctaaagcaagaaagactagaaagggcaaggcttcaaggaaaaagttatgatgagattcctggggctgatgctcttgttgtaagagttgtgtcatctgttgacaaaaagttagaagtgaaaccgcggtttctggagatttttcaggaagagaattacccaacagaatttccatataaatcaaaggtagttttgttgtttcaaaagatagaaggtgtggaagtttgcctatttggcatgtatgttcaagaatttggatctgaatgtcaatttcctaatcagcgccgcgtgtatctttcatatttggattctgtgaagtattttaggcctgaggttaaagcagtgactggagaggctcttcggacttttgtttaccatgaaattctggtaaatttggacactaagatcttgctttggagcccttccttagagatattctagttctgggttactatcttcctgtaaattatatttgatatgaattatttctttttagattggatatcttgaatattgcaagaaacgtggttttacaagctgctatatctgggcttgtcctccattaaagggggaagattatattttatattgccatccagaaattcagaaaaccccaaaatccgataagctacgtgaatggtatctggccatgttaagaaaagctgcgaaggagaatattgtggtcgacctcaccaacttatacgatcatttctttgtatctactggtgaatgtagggctaaggttactgccgcaagactcccgtattttgatggtgactactggcctggggctgcagaggatttgatttatcagcttcgccaagaggaagatggaaggaaacaaaataaaaagggaacaactaaaaagactataacaaaaagggctttgaaagcgtctggtcagtcagatctttcagcaaatgcctcaaaagaccttctccttatgcacaaacttggtgaaaccatttgcccaatgaaggaagattttattatggttcatttgcagcatgcatgtactagttgctgtattctaatggtgtctggcaaccgttgggtttgcaggcaatgcaagaattttcagatctgtgacaagtgttatgaagcagaactaaagcgcgaagagagagaacagcatcctattaaccagagggagaaacatactctttatcctgttgaaattactgatgttccttccgatacgaaggacaaagatgagattcttgagagtgaattctttgacactaggcaggcatttctgagtctctgccagggaaatcattatcagtatgatactctaaggcgggccaagcattcctctatgatgattttgtatcatcttcataatccaactgcccctgcatttgttacaacatgtaatatttgtcgtcttgacatagaaacaggccaaggttggcgttgtgaagtttgccctgaatatgatgtgtgcaatgcttgttatcaaaaggaccgtggcgctgatcatcctcataaattgacaaatcacccatcaatggcagatcgtgatgctcagaacaaggaagcaaggcaacttccagtattacagttacgaaaaatgcttgatcttcttgtgcatgcatctcaatgtcgttctgcccactgccaatatccaaattgtcgcaaggtgaaggggcttttccgtcatgggatgcattgcaaaatccgtgcctctggaggttgtgttctatgcaagaaaatgtggtatttgcttcaactccatgctcgtgcttgcaaggaatctgaatgccatgtaccacgttgcagagatttaaaagaacacttaaggaggttgcagcaacagtctgattcaagacgaagagctgctgtaatggagatgatgaggcagagagctgcagaagttgccaacagttctggatgagcattttgatgtttggatatgtacatatgggatgttttggaagaatgctcctgacaaatatagacattagctttgcccgttctccagttagacactgctggaaactagggcttgacatggatccggatcaatccggtgaatctgaatcaattcaaactcaaaattccagattggatcggattgaaaaattgcaattctgatttgtttggattgcatcacggatttcactttgaaaatcctatctaatcctatccatcaaattgcttagtatttttttaaatatttgtttaatctttagagtttgggttttttagcccagcccaatttaattgtattttttttcacttggattgcaaacttaaactaggaaaaaatccattggatccaaatatgttaaaattgattggatcggattaaaaaatgccacagaccaacctaccaggttagttgctcggatgactaactcatacccgcgttacctaaacgtcagtagcatgttggcgtggagctggcgatccacggcaaaaaggcttgggggctctatgaatttcatttcccggcccgggaaattatcagtctgggctaatcgctaagagctcatcccgagagaactcgggacgggataactcgaagtacggcatgaagtaagaagttagccaagttctgtgatcctcgagaatgaactatcagacctaaagcctagactagaaggaaagaactgatctggtcctaacagacccgtgtccacccctgctggaaaccgtattttgaccagctgtgcgtggatggtttctatatgcatgacctgattgttaccatgaggatcatagagttcaaccaactagtgatgcctcaactaactaatcaggtccaactgggtataacggcggtggtgtcttcgtatgctagtcgatttgatgattctttgatatagtcagcttctcgtgttatctctaatggtcattgtgtggcaatttactatagttctaatttgtcaaaagtatattactttctttttttcgcgggggcactgctaagtcgcattttgtcctcgtcttctttaatgttgacactttctgtagtacctttttatttaaagattaagtaattagtagtttcagaaaattgtactaagtggctcaaagggttgtccttgggggatcgggacgctcatcattcacatgagtgagaacaacgagtatcgcagctacggaaaatgcttgatctcctcgttcatgcatcccaatgtcgttctggacattgccaatatcccaattggtcgaaaggtgaagggacttttccgccatggaatgcactgcaaaacacgagcttctggaggttgtgttctttgcaagaaaatgtggtatttgcttcaacttcatgctcgtgcttgcaaagaatctgaatgccatgtaccacgttgcagagatttaaaagaacatctaaggagacttcagcaacagtctgattcacggcgtagagctgctgtaatggaaatgatgaggcagagagccgcagaagttgctaacaatgctggatgagcaatttatacttgtaaatatgtggcactttgaagaaatgctctagacagaggtataccttagtttcacctatgctccgacagcagtgattgtttttgtgaatgaataggaatagatagggtacatgtatccttgcgtccatctcaacatgtttgtcccagaaaaagatctgagttcagccatttagtgctgctgtcctcttctgcaaaggactaaccaggtccggcgggatatttggtggtgcgtctgtttttgtaattctttgattttgttaagttacttgttttatgtcagatgccatccttcttcggtggcgggtgtactatagtcctaaataggtctcaaatttcttagaaatctttgtgggagggagggatgtcatcaagtcgtttttagttgaccgttttaaagattcaatgcattttgtagaatcttttatttaaagatggaagtaaataattagaatcttcacatagttctgcttcctttatgggatagtatctactgtctcttttgcgtacttttttatattcaatattgctattcgattttttgctatgg

SEQ ID NO: 28726 - DNA, 1114 bp, Glycine max
  Clone ID: TF_GmC832_1
gagataacttggatgtggtgtcatgttctgtatgtcagatgggtgttttaattcggcatcctcacaagtgcaatgcatgccaaggttattgtcacgagggctgttcaacaagatcaacagtctcggcaaatgaagttgagtacttgactacatgcaagcaatgctaccatgccagattacttgctcagaaagagaatactaatgaatctccaaccagtccattactcctacaaggacgagagaataactctgggacatttttgaatggatcaaggcctaaatctcatgatcaagtactgaaatcttccaggacaaaggctaataatcccaacgtgaaacaagttactcctgtgacggctttgaaatgaacaaaggctaaatattatgaacaagaaccgacttctaccaggacaaaggataataatcattttggcacgcctcaagttgcttctgaggccactttgacaggaaaaaaacctcgcaaaaattgttcttggggtattatatggcaaaagaaaaataatgaagatacagacaatgatttctggctcagaaacatacttttgaaagggggttcaaacatgccacagttaaaacctgtttgtcacttgtgtcggaagccatatatgtctgatctgacgtatatttgctgtgagacatgccgaaattggtatcacgctgaagctgttgaacttgaagaatccaaaatttctagtgtgttgggcttcaaatgttgcaagtgtcgaaggataaaatcacctgtttgtccatactctgatttgaagcctaagagacaagagggcaagaagtcacgcacaaggactaaaaagaaagagcattctggagcagactccgattctggagcaatctattatgatatgagagattgtgaagttgctactcctgtctttcatgtagaggatgatcccagtcatgtctttcctgtagagggtgatcctactcacgtctttcctgtagagatgatcctcttcttttctctctttcgagtgttgagctgctaacagaacctaagatggaaggggatgttgagtggaacagtgtccctgggccagggcttcggaaattgccagtgagaaggaatgttagcattgag

SEQ ID NO: 28727 - DNA, 465 bp, Glycine max
  Clone ID: TF_GmC154798_1
gaaagaagaaaagacaaaggaataacatagatgttgatgatgcttcacgcttgcgaaggagaacaaggtacctcttaatcaaaatgaagctagagcagaaccttattgatgcttactctggagaaggttggaaaggtcaaagtcgggaaaagattaggccagaaaaggagctactacgagcaaaaaagcagattttaaaatgtaaacttagtattcgcgatgccatacaccagctggattctcttagttctgtgggtagcatgaagattctgccattgctccagatggatctgtttatcatgaaaatatattctgtgccaattgcaaactacatgaagctttcccagataatgatattatactctgtgatggcacttgcaatcgtgctttttaccaaagatgtctcaatcctcctttggatactgaaaatattcctcctggagatcaaggcttgttttgcaagtt

SEQ ID NO: 28728 - DNA, 1452 bp, Glycine max
  Clone ID: TF_GmC28830_1
catttcacataagagaggaatgaaacttagacttatgaatggaatagcatacaatgagacgtggtttggcagttggggttacaaatttggtcgaggatgctttggtgtaactcaatccatgtaccacaaggccatacaagcaataagaagcatgtcattatacttgatcatacaccacattgccaattctagccatggcattccactaatcttctcaaggaaccagacactttcagatcaatccctagtgacccttggtgacctattttgttacatgttagaccttaaatcatgtcttcctcgtgaaacctgaattagttcctataaaacaaatgccttagttgagaccaattgtcgttggtcccctaaaaggattgagatggcaacaagggttattgttgaggccttgaaaagaacagagtttaaatgggtttcaagacaagaagttagagatgctgctcgtgcatacattagtgacacaagtttggtagattttgtgttgaggtcactaggaaaccatgttgaaggaaactacttggttcgctgaagcttgaaccttgtgaccaaagtcttggaatattgtttagaggacatttctgatgtgtacccttataatgaaggcttggttatgagtaacaaagtgaaggacaagtataagaagggctcaactaatgaaggacatgctttatttgtataagtacattcttatagattaaaaccaattatgaggtcagaatttctttcagctataccattggcagctaggataattcttggcactaagtattttattaaagattactttggagatattcctcaccaagttgaattaggctccgatgataaactcaacatttattgtacaatttggttgagaaacaatgttggcagtggttagtacttaaacaaggccattatgccaccccatgaatgtatcacattgaaaagaaatgctactatcaatgacttgaagctagaagttgaaagggattttagagaaatttgttgagagttaaggagttttatggtggaatcatttgggaatttgagtgtcaacaatgagacaatggcttttggtctaattgaagtgggtggaaaagttgtccttgagggttggcatggtgacatatgaataaacatgattgagcaaatatgtgaaagtgatatgaacaatggtataatggattgcacttgtggaactatagaagatgatggtgagaggatggtctcgtgtgatatttgtgaaatttggcaacatactaggtgtgtttgaattcccaatgatgaagaaattcctcatatttttttaatgcaaaaagtgtgagcaagaaattgtcttgtttccttcattgccatagttatacaattataatttttttgatgatgcttaatcattcactttttgtttaaaggacgcctttgagattgaacaattaaaattgcttcttagct

SEQ ID NO: 28729 - DNA, 732 bp, Glycine max
  unsure (1)..(732): unsure at all n locations
  Clone ID: TF_LIB4167-058-R1-N1-G3
gagggggaaaaatctccattcttttaattttcgaaagtaacagaacttacaactattgggaaatattggcttacaacatcccaaccccaaatacaatattctgaatgaaacaagcaaagcagccaattaaacttcatatcaaccatgtctatagcctatagtctatatgctacagtatctgacctgcttactctgacagatggcacttagagcagcttcagattatgccttttgctctttagcctctctagtcatgtctttccatgtgatgtatcaaaatgtcggaaaatctatgaaagttttacagccacaaaattcatgttctctgtaacttgatgtggcttgccgcctctttctcttcaaaattcagagtattggctgcagttaaaagcatgtccattgctccaccactttccaattcccgtgcacgtttattgtgtgtgtttcttttcaagattggcatttggctttgcagcatcttcaccatttcttcttggcttgttaaactcatatgcctttttagcctggtggattgcttgtattccagcatcacattttctgcagaaccagttccctcttggaatagaagtccgcggaggtttcatgcaatagatgtgatatgcatgatcacagccatcacacagaacaatnccgatcatcatcttggatcagttaagcaaacccggcataaacaagaggggcagtaccaacaatgaccatatgacttcaact

SEQ ID NO: 28730 - DNA, 2479 bp, Glycine max
  Clone ID: TF_GmC697_1
ccacgcgtccgggatgattgtagtggtgggtcattagaaagcccgtgtggaatgggatatgttcatgatggagatttggatttgtacactcgcaatatggaattgaaaatgtccaagaaagtagtccccaactgctaccctacaaatgtcaaaaagcttttatcaactggcattcttgacggagctgtagtgaagtatatttacaatcctggaaaggttgagctacaggggattattgatggtggcggatatttgtgtggctgttcaatgtgcaattactctagagttcttagtgcctatgagttcgagcagcatgctggagccaagactagacatccaaataatcatatattcttagaaaatggaagaccgatatatagtattatacaggaaataaaaacggctcgagagatgaggttataaagaatgtggctggttcatctgtcaatgaggagtccttccaggcttggaaagaaagtcttctacaaagcaatggcaaggttcaggctcataaaagttatagcaccaaacttgtcggtatgcctcatacaaacataagtcaatctgtagaaagtacaagccatttgtcatctttgcatgtaccgagtcattatgagcagcacatgtatatgaatcagacaactgatgaatggaagcgtgtggtgaaaaagccaagctcctacacttctaactcaggtgtactgcagaaaagaagtgctgatggttgcactaagagaagggacaatgatttacacaggttgctttttatgccaaatgggctactcattgtttctgagttttcttactatgtcaaatgatgcaaattacttggaggttacaaacagggaaacgggatagtctgtggttgttgtgatatagagataagcccttcacagtttgaagcccatgctggaatggctgctaggcgtcaaccttaccgacacatatatacttccaatggattaacacttcatgacatagctctatcgttggcaaatggtcaaaaccttaccacgggagacagtgatgatatgtgtgcagtatgtggagatggaggagatttgattctttgcaatggatgccccagggcatttcatgcagcctgcttgggtttacagtgtgttccagacagtggttggcaatgtctaaattgtatagataatgctggtaatggaagagaatcttctattgtgaggccaatcatgatacgattgacacgcgttgataaaacaccagaagttgaaatgggaggatgtgttgtttgcagggaacatgatttcagtgttgctaaatttgatgaacgaacagtaataatttgtgaccagtgtgagaaggagtatcatgttggctgcttgcgggacatggggctatgtgagttggaagagctgcccaaggataagtggttttgttgtgatgactgcaatcgaatatatgctgctctacagaattcagtttctgctggagcagaaattataccagcttccttttcagaactaataatcaggaagcatgaggacaagggattatgtacctatggggccatgaatgatatccagtggagaattttaagtggaaaaagtcgttatcctgaacatttaccattgctttcacgagctgctgcaattttccgagaatgttttgatcccatagttgccatttctggtcgtgatctgattcctgttatggtctacgggagaaatatttctggccaagagtttgggggaatgtattgcattgttttaattgtgaattatgttgtagtatctgctgggcttcttaggatttttggccgtaatgttgctgagcttccacttgttgccacaagcagagcacatcaaggaaaaggttattttcaagtgttgttctcttgcatagagaggttgctgtcttctctaaacgtggaaaagttggtgcttcctgcagccggggatgctgaatcaatttggactaagaaattgggcttccgaaagatgagtgaagatcagttatccaaacatctcagagaggtgcagctaacactcttcaataaaacttcaatgctggagaagacagtgcagctggctatagaatgaattttatctggtgttgtaactaatttttggctatttattcatttttttagcattttcctcactgtaacgttgctgcgatgttcatgctgccgtattgttcttttcttaattttttgtttcccacgtagtatgggtggttgtggcttggtcttggttccagccagccatgtctctttttgtacaatgtaggataaaaaggcgtaaaaaatagggaacatggcctagaaggaagtagaggagttccaaagagccagcatgctgaccaattttattttttttaattagcatgcatgttggatatataaaatcctactgtattgatttttttttcctcctaaaaaaagggcggcgtctgtagtgaattataagtggtgaagggggggccccccagttggtgcccgctcccc

SEQ ID NO: 28731 - DNA, 2018 bp, Glycine max
  Clone ID: TF_GmC24_1
ttgaaaatttccagggaatgaagcctgaaagtgtacttgacttttcccgcgtgaattcaaggatgaaggagcaagcttatgaacaatcaccaacactcttcttgtcagatattcaacaggtttggagaaagcttcaagacgctggtaatgagattgttgctcttgccaagagcctctctaacatgtcaagaacttcctactctgagctggtgggaattccagcacagagcacatttcaagatgagaagcaagtggaatttgactgttgcatgaaaccagaacagacacaagcatgtgctatgtacaaaatttgcagttgcaagtgttgtggagagaaggcagatgacacagactgtttggtttgtgattcatgtgaagagatataccatgtgtcctgtattgagcctgcagtgaaagaaataatacctcacaaaagctggtattgtgccaattgtactgctaatgtgattgaatctctccatgagaattgtgtgctatgtgaaaggttaaatgatgcaaagaccctggatgatgtaattggtgatggaagctttcctacaattgaggaaacacaaaatgaatttgaagagaattcaaattgcacctctgatggaattcaagtttccataggtgaggaaaaaacacccaattgcaagatatgtgaaaatgaagtggatggtggaaaaataaaaatatgtggccatcggttttgctccaataaatactaccatgtaaggtgtttaacaattaatcagttgaagtcatatggtcattgttggtactgcccttcttgtttatgccgggtttgcttaactgatcaagatgatgatcggattgttctgtgtgatggctgtgatcatgcatatcacatctattgcatgaaacctccgcggacttctattccaagagggaactggttctgcagaaaatgtgatgctggaatacaagcaatccaccaggctaaaaaggcatatgagtttaacaagccaagaagaaatggtgaagatgctgcaaagccaatgccaatcttgaaaagaaacacaacaataaacgtgcacgggaattggaaagtggtggagcaatggacatgcttttaactgcagccaatactctgaattttgaagagaaagaggcggcaagccacatcaagttacagagaacatgaattttgtggtgggcttcgttaaccttccagttattgttagtagtgactttaacttcatatttgttgactgttaatacacagtattttgcatttgctgcattttttgaatgactgatattttggtaggctgtaaaactttcatagattttccgacattttgatacatcacatggaaagacatgactagagaggctaaagagcaaaaggcataatctgaagctgctctaagtgccatctgtcagagtaagcaggtcagatactgtagcatatagactataggctatagacatggttgatatgaagtttaattggctgctttgcttgtttcattcagaatattgtatttggggttgggatgttgtaagccaatatttcccaatagttgtaagttctgttactttcgaaaattaaaagaatggagatttttccccctcatggtttagaatttaatattttattaccatttctgtatagagcttattctgcattgatgcacttgatagttgatcaaatatattttgccttttcaagtaccacgtaccagcactcttccagttgttgtttgttttgggagttcagaaggggctagttaaggttggtaacatgatatttgatggtaaatggttgcagcccaaaagtcttggtgttgtttaggttcagttttaaatagcttgaggtaagttctagcttacaaataagcccttgtaaggttataggcttttgtagaaaagttagatgaagaaattgctgaaaatgttgaagaatattagttgattttatattacgagagaagtttgatttcaagagggggggggggggggggggggggggggggggggggggggcgcgccgc

SEQ ID NO: 28732 - DNA, 1273 bp, Glycine max
  Clone ID: TF_GmC1699_1
ccaagatgtccattgccgagaggtattcccatgctaagtggaagatggaagaagcaaagaaaatttctgcaccttctacaccttctacaactcacacctctcagcccttgcaaacaaacattgttggaccagttgacaatcgtgtgccatcacatgttcgaatttttccttctgataaatcaagccacccatcaatcccttctatgggtgccatagtgtctattcctgcccatgtttctgtgggatcttctgcagcattgcagtatcaagtgatcagcaatgaagtaagaccagcgtccggacccagtggtttctggtgtgatgcctagcagtcacttggggagaaatgcatcttccttagcattgcctaaagttgaacgcccacagtttaaagttgatggaggatcaaatgggtctccttacatgctgcaagtccaagcaaattcatctgcaaaccaacctttggtgaatgctccaacatggtctatacagactcaagctgcttcattagccagaagtgcatcagaaaacaaggtgcctgttcataactctgtcaaggttgagggaacacctgatgcaactgtatcaagggcagggacacaaataacaacagactcgagctttagaccatttatcactcaaacagcccctggaaatttacctagtgtgcaccagccattgccgcgtacaaacattgttcaggctcctttgattcctagtcacactgatattgctaagattgtccagaaagtgttacaaccaaagcttcctgtccatcccacgtggactcctccatcaagggattatatgaataaggctttcacatgtcagatgtgtgaactcagtgtcaatgaggttgatactgtacttctctgtgatgcttgtgaaaagggatttcacttgaagtgcctgcagccatcagtcttgagaggaattcataatagagttgattggcattgtatgaggtgcttgagtttaagtggtggaaagcctttgcctccaaaatatggtcgtgtcatgagatcctcaaacacaccgccaaaattgccctctaatacaggtggcgttcaaccatgttctgagaagaaagtagagaatatcgatccaaaggtcatcccacagacgttagcaacaaatgggagctctgttccaactgtttccggtggccatcacaatgttgagttgccatccgaatcaaagataccagataccaaagatatgcaagggactggcatttcatccaccattgaagctattgataagaagcctgatc

SEQ ID NO: 28733 - DNA, 1152 bp, Glycine max
  Clone ID: TF_GmC7106_2
tcgacccacgcgtccgaggcttttagcttttctccgtcttcctttgttccttctttccctctctttttccgctccttattactggaaatgctgctttcttcttctcgcgctcatcttcactgactacttctctctctgcaatttccattgttgaagaaggagagaggttttgaggtgtggggtcggtgatggacggtggtggagtgaactacaaccctcgcaccgtggaacaggttttccgggacttcaagggccgtagagctggcatgatcaaggctctcaccactgatgttgaagaatttttccagcagtgcgatcctgaaaaggataatctttgtctgtacggattccctaatgagcaatgggaagttaatttacctgcggaagaagttcctccggagcttcctgagcctgcattgggcataaactttgctagggatgggatgcaagacaaggactggctgtctttggttgccgttcacagcgatgcatggttacttgcagtggctttctactttggggcacgatttggttttgataatgctgacaggaaacgcctgttctctatgattaatgatttaccaacaatatttgagattgtgactggaagcgcaaaaaaacagacgaaggaaaaatcatccatttcaaaccacagcagtaacaaatcaaaatctggttcaaaagggcgaggatctgaatcagggaagtattcaaaggaaacaaaggacgaggaggaagaggtactggatgaagaagatgacgaggagcatgaggagaccttgtgtggggcatgtggggagcactatgcatccgatgagttctggatttgttgcgacatatgtgagaagtggttccatggcaagtgtgtgaagatcactccagccagggccgaacacatcaagcagtataagtgcccctcatgcagcaataagagagcacggccttgatatagttgagaagtgggtcagtcctcaccccttgtaactaaatcatgttggacttctaacttgttagtggcttaggcttcctttgtcatgccatgatggtgtggaatatgtattcagtactttgggtcttgtgaacctttcagtggatatatttattaatattgatagtttgcaggttctgaacatgtctccaaaaaaaaagaga

SEQ ID NO: 28734 - DNA, 816 bp, Glycine max
  Clone ID: TF_GmC931_2
gtccagctctaaggcacagcgagcttcggaatctcaggctagacagtacttgctattgcattctattttggagccagatttgggtttgataaagctgacaggaaacggcttttcaacatgatcaatgaactgccaacaatatttgaagttgttactggtgcagcaaagaagcaagttaaggagaagtcttcagtttcaaaccacagtggcagcaagtctaagtccagctctaagcagcgagcttcggaatctcaggctagacagccaaagccattgcaatcaaaagaggaggatgaagaactggacgatcaagatgatgatgaacatggagagaccttgtgtggggcatgtggtgaacattatggcactgatgaattctggatttgttgtgacatctgtgagaagtggttccatggtaaatgcgtgaagatcacccctgctagggcagagcatatcaagcaatacaagtgcccatcatgcagtaacaagagagctcgcccctgattgacatgagccaagttccatcattgacagtcattgttggactctttgctgatcgtgttattttgcttttcttcctagatgttgcagttaatggatagtttctgtttgacttgtgtaggtttcttttctagtctgtaggattctgctgtgttggttttagtgtcagctgcaattcagttgatgccttcttggatttgatcaatttttagtttatgcattgttgacttgggaaagtgaagtcttttccttaatgtcactctaaaactaggttaattaaacacaaatttatttgaaatggatgtctagttatgt

SEQ ID NO: 28735 - DNA, 774 bp, Glycine max
  unsure (1)..(774): unsure at all n locations
  Clone ID: TF_9985993
caaaattcaatgtagtagttagtagtgaggatggagaaaagggtgaggatgaaaacaaggatggtgaagcggtggaaagtgaggatgaattgttggtaattgaggcaattgacgatgttgctgttgaacaagctcctccccaggacgacaagagtcaggacatttctgattcttctgttagtctagagtggtttttaggttgtaggaatagggtttctttgacttctgagcgccctaccaagaaaagaaggcttttgggtgttgaagctggtttggagaaagttgtaatgacttgtccttttgatgagggccagctgttttgccattattgtggcaggggagacactggcagggattccaataggttaattgtctgtgcttcttgtaaagtggcagttcaccgaaagtgctatggtgtgcatgatgatatagatgaggcttggctgtgctcctggtgcaagcaaaaggttgatgttgatgtgtcggtgaatccttgtgttctttgcccaatgaagggtggtgcattaaaaccagttaatagcagcgccggaaggtgtggggtcagtcccatttgtgcacttggtttgctctctgtggatcctgaggtttatatagatgatttgaagaagatggacctgttatgaatgtnggagaaatcaaggaaaccccgaagaaattaatgtgtantggtttgcaaagccaaatgtggtgcatgtgttccgtggaatcatggaacttcanagcttctttcatccttatgtccaagggaagctt

SEQ ID NO: 28736 - DNA, 1177 bp, Glycine max
  Clone ID: TF_GmC52662_1
gtttttctccatcttaaactgactgaaattgagttctccggtcgagcggacgatcgtgtttttttttttattccatcgtaaaccaaaatttagttctccagttgagcgttcttcccacaaaccctaatgtcgtttcttgaagaatttcatgccaatttggattcactacccgttattcttcggaagaagtatacactgttgcgtgacctagataagagcttacaggatattaaaaggcaaaatgaacagcgttgtgaacaagaaattgaagatattaagcgaggtgttaggtctggaaacatcacgcctgatacttcggcaattagattctctgatgaagcgcttgatgagcaaaagcatagcatcagggttgctgatgaaaaagtagccttggctgtccaggcttatgatttggtagatacaaacatacaacaacttgatcagtatctgaaaaagtttgatgaggagattcggcgtgaaagagaaaacgctgcaataactggagtacctgcttcaggtcctgaaggtaatacaaaatctggaaggggtaatgaaagtggtactggtagaggagggcgaaaaaaaacacggcaaacaacaatggtcacagaagcacaagccacttcaaacccaactggcatggatttagagttaccagttgatccaaatgaacccacatactgcttttgtaatcaagttagctatggagcgatggttgcatgcgataaccccaattgtaaaatagagtggtttcattttggttgtgttggtctgaaagaacaaccaaaaggaaaatggtactgttcgaattgtgcagcaaccaaaaatcggcgtagaagcaaatgaggctgacagaagaataagaataatgttaaaaatgattgaatgtgtatataaattttaatatctctagaagggagttatttatattgggcctagaaactttgttttcgtagctgttattaatcgggaaattatgaaagtacaaatttccaatgacttatagttggtggctgtgtttgtacattccgttggttttgtacacatttgaaagctatggttcttttttattgtagatctgggttgaaaaggcccggaattattgtgtgtatgtgactatgtgtgtaccatacaatgaagtttctgcactaattatagttagcagttgagttaaaaa

SEQ ID NO: 28737 - DNA, 657 bp, Glycine max
  Clone ID: TF_GmC52662_3
tttcaaagaggagggcgaaaaaaaacacgccatacgactgtcacacccgcagcaacagaagcacaagccactgcaaacccaactggcatggatttagagttaccagttgatccaaatgaacccacatactgcttttgtaatcaagttagctatggagcgatggttgcatgtgataaccccaattgtaaaatagagtggtttcattttggttgtgttggtctgaaagaacaaccaaaaggaaaatggtactgttcgaattgtgcagcaaccaaaaatcggcgtagaagcaaatgaggctgccagaagaataagaataaagttaaaaatgattgtattgaatgtgcgtatatatattttaatatctctagaagggagttatttatattgggcctagaaactttgcttctgtagctgttattaatcgggaaattatgaaagtacaaatttccaatgacttatggttggtggctgtgtttgtatatttaattggttttgtacacacttcagagctatgttcctttaaggttcttctcctggccatcaaatgtttccttttcattgtagatctgggttgagaaagcacggaattactgtgtacttgtgtagcataccatgtagtttctgctctaattatataattagcagtttacccatgcc

SEQ ID NO: 28738 - DNA, 1279 bp, Glycine max
  Clone ID: TF_GmC931_4
ccggaaaacccgtcgacctagcgtccgcgacagaagggggttgttgtttgttgtggcattttgcacttgcaaaattttggttgcagaggcagagagaggaggcaacgccacaccgcaccactctcactctgcaacacccgaatctcgtttcacctaaacgacctcgtttttgcgttcttttcccttttcttcttctgatttaggtttcagagagaagaagaaggagcagcaatggactctcgcacgtataatcctcgcaccgtcgaagaggtttttagggatttcaagggccgaagagctggtctcatcaaagccctaaccaccgatgttgaagatttctacaaccaatgtgatcctgagaaggagaatttgtgcttgtatggctttcccagtgagcagtgggaagtaaatttacctgctgaagaagtaccaccagagcttcctgagcccgtactgggcattaactttgctagggatggcatgcaagaaaaagactggctatctttagttgctgttcatagtgatgcatggttacttgctattgcattctattttggagccagatttgggtttgataaagctgacaggaaacggcttttcaacatgatcaatgaactgccaacaatatttgaagttgttactggtgcagcaaagaagcaagttaaggagaagtcttcagtttcaaaccacagtggcagcaagtctaagtctagctctaaagcgcaggcttccgaaactcagggcagacagtcaaaggcattacaaacaaaagatgaggatgaagaactagaagagcaagataacgatgaacatggagataccttgtgtggggcatgtggtgagaattatggtactgatgaattctggatttgctgtgacatctgtgagaagtggttccatggcaaatgtgtgaagatcacccctgctagagcagagcttatcaagcaatacaagtgcccatcatgcagtaacaagagagctcgctaagcaaatttccatcagggacaataaaccatttgagtcttaacgaatctgattaatattttttttttctagatgtagctgatggatagtttttatgtttgacacatgtagatttcttgtctttctgtgggatttatgctgtgttggttgtctgggggaagttcattctttttccaagccttgtcctagctatggatccacatcggcataagcttcatatgaatggggttgaaaccataatctcctggccaccttaatactatggaaatgaaagtacttcgacatttgcaccaaa

SEQ ID NO: 28739 - DNA, 1678 bp, Glycine max
  Clone ID: TF_GmC1724_2
ccctcgcgtccgaatcaccgttccattttcatttcgctcagttccatagttcgctttttttttttttaatttgatttaatcagaccgagtgctgttggtgtcagcatgcgctagcttcgtcgtcgtcgtcatcgattttccggtttgtgattctcgtgattcttctcgggccgaattattgggtttgacggcatggatttggtaccgagcgtcaaggaagttgaactattttcgtataaaagagctcaaagatgtgctcactcagttacacctttcaaagcagggaaagatgatctggtaccttactattaggtctggtttaagtcgattatagtgctccatatatgctgtaatttattgtctttgactttgttatcttttattcacattcttgtatttccttttatgcaggaaaatgcagatatcaggggccactgatctagcttctaagggacagggtgcatcagatagcagtagtgtaaaggttaaaagtgaatttgatgatgcctttcaaccagatgtgaagattcgctgtctatgtggaagtagattggaaacagagaatttggtcaagtgtgatgatgcaagatgccatgtgtggcaacacatcagttgcgttattattccagagaaacctactgaaggcatcccactagttcctgataaattttattgtgaactctgtcgtctcactcgtgcagatccattttgggtttcagtggcgcaccctttgcatcctgtgaagttgaccacaaccagtaatccaactgatggaaacaacccagtgcagagtgtggagagaacatttcaactgactagagctgacaaggacttggtatcaaaaccagaatttgatgttgaggcttggtgtatgctcctgaacgacaaggttccattcaggatgcaatggccacagtatacagacctgcaggtcaatggtgttcctgttcgtgcaactaacagacctggttcacagttgcttggggctaatggtcgggatgacggtccaattatcacgccctatacaaaagatggaattaataagatttccttggctcgaggtgatgctcgcattttttgtttaggggttcgtattgttaaaaggcgcagtatgcagcagatcctaaactcaatcccaaaggagtctgatggtgagaaatttgaagacgcccttgcacgtgtctgccgttgtgttgggggtggaaatgcagttgatgatgctgatagtgacagtgatttggaagtggtttcagatactttcactgtcaaccttcgttgtcctgtatggctttcatcaatagatgaattattttagcaattcatgaagtcctactaatcagttttttatttttggtgaaaattttagatgagtggttcaagaatgaagattgctggaagatttaaaccctgtattcacatgggttgctttgatcttgaagtgtttgtggaaatgaaccaacgatcaaggaagtggcaatgtcctatatgtctcaaaaactatgcgttggagaatatcatcattgacccttatttcaatcgcatcacttctatgatgatgaattgtggcgaagaaattgcagagattgaggtgaagcctgatggttcttgccgtgtaagggtaagagtgaaagtgaacgcctggaatagggaatctacacagtggcgccttctgatggac

SEQ ID NO: 28740 - DNA, 514 bp, Glycine max
  Clone ID: TF_uC-gmrominsoy277f07b1
tttcgttcgcgtgggaaaagaacagcttttgtatgcttcagatgcatgcagtgacgtaacatacttggctgagttcacataaatgatctggtaccttactattaggaaaatgcagatatcaggggccactgatctagcttctaagggacagggtgcatcagatagcagtagtgtaaaggttaaaagtgaatttgatgatgcctttcaaccagatgtgaagattcgctgtctatgtggaagtagattggaaacagagaatttggtcaagtgtgatgatgcaagatgccatgtgtggcaacacatcagttgcgttattattccagagaaacctactgaaggcatcccactagttcctgataaattttattgtgaactctgtcgtctcactcgtgcagatccattttgggtttcagtggcgcaccctttgcatcctgtgaagttgaccacaaccagtaatccaactgatggaaacaacccagtgcagagtgtggagagaacattttaactgactaga

SEQ ID NO: 28741 - DNA, 549 bp, Glycine max
  Clone ID: TF_jC-gmro02910013g08a1
ggctcgaggatcgctgctggaggcggcatgcactagcttccggggccttgcttgcagataggtcttcgtttttttgctgaagattctttgcaaaatggatttggtagccagttgcaaggaaaaattgcaacatttccgtataaaagagctcaaagatgtgctcactcatttgggactctcaaaacagggaaagaagcaggatcttgttgatagaatattagctatcctctcagaggaccaagtttccaaattgtggaccaagaagaatgctgttggaaaacaagaagtggccaaattagtggatgacacgtttagaaagttgcaggtatccggggccattgatcttgcatcaaagggacagggtgcctcagatagcagtaatgtgaaaattaaaggtgaaattgacgattcctatcaatcagatacaaagattcgctgtctctgtggaaatgtattcgatacagagccattggtcaagtgtgaagatacaagatgccatgcgtcacagcacatcagctgtgttattattccagagaaacctatggatgg

SEQ ID NO: 28742 - DNA, 994 bp, Glycine max
  Clone ID: TF_GmC2696_3
ccacgcgtccgcgacgcagaaacgagaaccacttcgctatgcatttgcaccctctccgtcacattcccattccgttaccttattttttatagacacacacgaatcccccttttctctgaataataattcaattcaattactcctaaattaaacaagtagacgaggaggaagaaggagaacagcaacaagtagatgaggaggaagaaggaggacagcaacaaggagacgaggaggaagaaggaggacagcaacaaggagacgaggaagaagaagaagagcgacaaggagaagaagaagatggtgatggtggaatggcaatggcagaagacacagaggagaagagtgctgctgtgagtggtgggaagaggaggcgtggggctgggaagaatgctaaggctacagggagagttgcatccaggaaaaagatggaggaggacgtttgtttcatttgcttcgatgggggtgaccttgtgctttgtgaccgcaggggatgccccaaggcttaccatccttcctgcgttaatcgtgacgaggccttctttcgagctaaggggaagtggaattgtggttggcatctttgcagcaactgtgagaggaatgcatcctatatgtgctatacatgtacattttctttgtgcaagggatgcatcaaagatgctgttatcttacgtgttaggggaaacaagggcttttgtgagacttgcatgagaaccgtaatgttaattgaacagaatgaacagggaaacaatgtgggacaaatagattttgatgacagaaacagctgggagtatctcttcaaggactattacatagatataaaaaaaaaactatctctcacatttgatgaactcactcaagctaaaaacccttggaagggatctgatatgcttctttctaaagaggaatgactggatgaaacttttgatgccactaacgatggaggatcagattgagatagctgctatgagaatgcagattggaggggggctgaaag

SEQ ID NO: 28743 - DNA, 1419 bp, Glycine max
  Clone ID: TF_GmC5215_1
ctcgagccgcagacacagtccttcagtctgtctgtcgttctatttaattcccctctccaaatttcaacctctgtctcctctccttaacagcatcatcacatgcacccgcgattcctacgatcccttcccatggtctcttctctgcaccctcgccgtaccttctagaaccttccctcagatctcaattccccttccgctttctcctttcatggaaatggcttccactccccgcaccgtcgaagagatcttcaaggactacaccgcccgcagaaccgccatcgttcgcgctctctctcaagatgtggatgaattctacggactctgcgatccagataaggagaacttgtgcctctatggacatccgaatgaaacatgggaggtgactttgccggcagaggaagttcctccagagcttccggagcctgcactcggaatcaattttgctagggatggcatgaaccgcagggactggctttctctggttgctgtgcacagtgattcgtggttgctctctgtggccttctatcttggagctcgtcttaaccgcaacgaaaggaaacgtttatttagcttgatcaatgatcttcctactgtttttgaagttgtgactgacaggaagtccagtaaaggacaagcccactgcagacagtggaagcaagtctaggggcagcaccaagagatcaagtgatgggcaagttaagagcaacccaaagtttgcagatgaaggttatgaagaggatgatgatgagcacaatgaaaccctttgtggtagctgcggcggaaattacaatgctgatgagttttggattggctgtgacatatgtgagaggtggttccatgggaagtgtgtgaagattacccctgcaaaggctgagagcataaagcaatataaatgtccatcatgcagcctgaggcggggcaggccttagactgaacgatggaatgggtacatgtgaggtgagtgttgtttcatggctgacaagatactgtaattttgttacatctcttacagaagttaatgtaatgggcatagtatcgatgctcaagggcaaatttatcagggattaagtttgtttttccagatgaaccattggtgcatgccacagggtatagaatagaacatgacaaattttaattttatgattagtttatatttagtagaatatttgcttgaactttaaatattgtaatttttttatttttaacattgtttaagaaaacaaaccttttcaacagattattctaattgaactttcattaaaaaaaaaaaaaaaaaagggcggacagacaactaaagaaataaaaaaacgggggggccgattcttggggggttcttgaacccggaaataatttccgtaccgggacttgaaggagaccctgttttccttatggggatagcttttaaacttggggaaattg

SEQ ID NO: 28744 - DNA, 1306 bp, Glycine max
  unsure (1)..(1306): unsure at all n locations
  Clone ID: TF_GmC5215_2
cccacgcgtccgagaagacgacagaagggtacggctgcgagacgacagaaggggattgtagtttgatcaaattcccatggtctctctctctccaattaattcgatttagcttttccccaaatcccaaaccctttctttcgcttagatcccaatccaattgggttatggacatggcttccagtccccgcaccgttgaagagatcttcaaggattacggcgccagaagaactgccgttattcgcgctctcactcacgacgttgatgaattttacggcctctgtgatccagataaggataacctgtgcctctatggacatccaaatgaggcctgggaagtgactttgccagcagaggaagttcctccagagcttccggagcctgcactcggaatcaattttgctagggatggcatgaaccgcagggactggctttctctggttgctgtgcacagtgattcgtggttgctctctgtggccttctatcttggagctcgtcttaaccgcaacgaaaggaaacgtttatttagcttgatcaatgatcttcctactgtttttgaagttgtgactgagaggaagccagtaaaggacaagcccactgcagatagtggaagcaagtctaggggcagcaccaagagatcaagtgatgggcaagttaaaagcaacccaaagtttgcagatgatggttatgaagaggaggatgatgagcacagtgaaaccctttgtgggagctgtggcggaaattacaatgcagatgaattttggattggctgcgatatatgtgagaggtggttccatgggaaatgtgtgaagatcactcctgcaaaagctgagagcataaagcaatacaaatgtccatcatgcagcttgaggcgaggcaggccctaagccgaaggcaaaatgtgaagtgaataatgctgtttcatggccgacaaagatactgtaatattgttgtatcttttatagaagttcttgtaaacggtatagtatctatgtctgatcataatctttcagattaagttaatttcttctaccaagattaatcatcagtgtatgttatataattttatagaatagaattctatacattttatttttgtctattaatctatattttgcttgaatttacccggtgtatgtatggttattttaccttgtgtctgaattctgagatacaaggtagctggtaaaatactgaggtgagaactaccaccttttccggattgttcaaaaaaaaaaaaaaaaaaaaattataaaaaaaaaaaaatannnnnnnnnnnnnnnnnnnnnnnnnnnnnnnnnnnnnnnnn

SEQ ID NO: 28745 - DNA, 1351 bp, Glycine max
  Clone ID: TF_GmC37050_1
gtgacttataaatttgggcagggttgtttaaataaagaatagcgctatagaattgaatggagagaaaggtggttcattaggattcaaaataattgtgtgtttttggaacaagatcgatcaaaaaactgaagggttattggctttggggcattaatggtgcggtgcctatatagatgcgaaaggaagggacggatttaaaagttaaaacctattcgtgttgtgtgttggggcgtggcacgacacactttgtctgtgggtctcaactcaatgcaagcccttcgccttctcctttcccatttctgatccgattgggtggccattagtgtgttgactggatgagattgatggacatgcttctaaaagttcaataatctttaattccaaacactgttgccttgactctatctcaggggccctgtagcaacatacaacattttttctgaatttgattcaggtgataatgttaatacaaacttctgtccttagttcagttgaagctggtctatgttatgtatctgatgatgggaaagatgttctatgtgaccggatgcctagtggtgaaacttggcaggtgggtctgaaatgcaataagtaccctcttgactggtgtagaaaagctgaaccagtagaagaagataaaaggaatgctgatgatcctcgcgccgcatccgctcgaggtagctttggtcagccgtcaactgctagtataatgacagaaaatactacacctaatatggtatacaggagaaagaagctctgtaaggactcaaatttcgacctagggccaactaatgtgcaggcaagtgcaaactgcccttcagtcataagttccgctgcacatttatcatcagcggaggatcagccaactggttttcaagttaagcatgaaattgaaatggttaaagatcctaccatgccttcagtcttatttgatagagtagccaaagatagcacacataaaaacttaggtattaatagtgtaaatgatagttgctcctcttcaaagccaaatatggaaactgaaatggatgaaactggtgaatgctcctccagtataatagtcatggattgcacaagggaagaagtaacagaaaaggatttctgcattaatattttaagaagccatggacttcttaaagaagattcccctgtagataatgtggcttctggggaagatgctgttaccactggtaataactgctgttccaggtcatgcaaaatatgtggtgatttagacagttcattgaacatgcttttatgtgatcattgtgaagatgcatatcatctgtcttgctacaatccacgtttgaaaaaattaccaattgatgagtggttttgtcattcatgtcgt

SEQ ID NO: 28746 - DNA, 2156 bp, Glycine max
  Clone ID: TF_GmC1309_1
gggtcttccccggtatagatatgttaatgaagccgttagcggaacaatgaaaccatgagggttctgagaaattggatagtggagacaatgattgtatcaagaccaaaatggaaaataagtcagatatgggttcttcaactccacaagatcctcatggaagtgatgatattagttcaagtcttgctaatgagatgaatgatgaatgcagtgacgcttctcaagaactaaacaaccaagttttggttgatggcattatctgttccaaatctcattctggggaaatgatgtctgatccagtttcagataaatgtatttctccttctagaactagtcacagtgaactagaaatgaagaataaagtagtggctgctcctccttgtggtatttgtggagatggaggggatttaatctgttgtgatggctgtccatcaacatttcatcagagctgcttggatatacagatgcttcctcctggtgaatggcattgtccaaattgcacctgtaaattttgtggcatagccagtggaacttctgataaagatgatgcatctgtgtatatcctacagacttgcatcttatgtgagaaaaaatatcacaactcttgcactaaggagatgaatacccttcctaataaaatcaattcatcaagcctttctttttgtgggaaagagtgcaaagagctttctgaacacttgaagaaataccttggtaccaaacatgagctagaagccggtttttcatggtgtctcattcatagattagatgaagactcagaggcagcttgcagggggcttagccagagggtagaatgcaattccaagttggccattgcactgactgtgatggatgaatgttttttacctgttattgatcgaaggagtgggatcaatttaatccgtaacgttttatataatagtggatcaaactttagtcggttgagctatagtggcttttacactgctactttggagagaggggatgaaatcattgcttcagcatctatcaggttccatggaactcagattgcagagatgccattcattggaacacgccatatatataggcgccaggggatgtgccgccgacttttttctgccattgaatcggccctttgctctctgaaggttgaaaaactagttattcctgcaattgctgaactcacacatacatggacaacagtttttggcttcacatatctagatgaatcactcaggcaagaaatgaagtcactgaatatgatggtcttccctggtatagatatgttacagaagctgttagtggaacaaggaaaccgtgaaggttctgagaaaatggaaaatggaaacaacgattttatcaagaccaaaatgggaaataggtcagatatgggtttttcaactccacaaggtcctcgtggaagtgatgatgttagttcaaatcctgctaatgagacaaatgatgaatgcagcgatgcttctcaagaactatacaaccaagttttggttgatgggattatctgttcccaatctcattctgaggaaatgatgtctgatccaatttcagataaatgtgattctccttctagaactagtcacagtgaactaaaaattgaggtgatccatgtcccgcagaagaaaaccttgacaagaagtgtcactcgtccactgctatgaattgtgattcatcggccaggttggattctgaaatggcagtcaatactctgcctactaaagaggtttgtatgaatgacgctcttgaagttgttccccctttaagccccttttccttgctgactcttttttgagatttctgaccttttctttagggcaaactgcagaaacaatagaagttgggagagtgaaaggtttttcagttgcaattggattgaaagtccacccactttccagatctaccttagagaagtgagggaactaaggaaaattgaaaagatgttgacacttgacaagggactccttgtaccatgtgccttcattcaccactactccaacgaacccttcactgctcggtccgacgccttcttcttgccggcggcagcgaggccctcttcgccacgtccttcatcccggtcgaaacggcgccgcttgcgcctcctcgccagtcctctagcgtgcctggtaggatgcactccctcactggcttggtggacgcgatgatcc

SEQ ID NO: 28747 - DNA, 1326 bp, Glycine max
  Clone ID: TF_GmC121288_3
ccacgcgtccgcgacacgaactggagaagcagtggttgatatccaggatcgactacctgaagctcgtgttgtttattgctcagcaactggagcatctgaacctcgtaatatgggttatatggttcgacttggtctttggggagatgggacttcattcactgatttccgggaatttctaggagctcttgacagagggggtgttggagctcttgaactagttgccatggacatgaaagcaaggggtatgtatttatgccggacacttagctatgagggtgcagagtttgaagttatcgaagcaccattagaggataaaatgatggacatgtataaaaaggcagcagaattttgggctgaattacgtgtagaattgctgtcagccagtgccttcctaaatgacaaaccaaattctagtcaactatggcgattatactgggccagccaccaacgtttctttagacacatatgtatgtctgctaaagtccctgctgctgtgagactagcgaagcaagcattagttgaagaaaaatctgtagtcattggtcttcagagtactggagaagctaggacagaggaagctgtaacaaaatatggttctgaacttgatgactttgtttctggacctcgagaattgctgcttaaatttgtggaagaaaattacccgttaccagaaaaacctgaacttctcccaggtgtaagaggatggggtaaaagaactccaacggaagaaggcattctgcaactcccggtgtttcagtaaaaggaagggttagaaaagtagccaagtggcagcctcctagtgatgctgaaagtgatgaagaatctgaatctgactctggcattgaatctactgactctgatgatgagtttcaaatatgtgaaatttgtactacagaggaggaaaggaaaaaattgctacagtgttcctgctgcagtaagttagtccattccacatgcctgatgccaccaattggtgatatagttcctgaagagtggtcatgccatttgtgtaaggagaaaacagatgaatatcttcaagctagacaggcctacatagctgaacttcaaaagaggtatgatgcagcctcggaacgcaagacaaaaatattagacataattcgtgctctggatcttccaaataatcctttggatgatattgttgaccagctaggaggccctgacaaagttgcagaaatgacaggaaggagaggcatgcttgtgagggcttcactggaaaagggtgttacttatcaggctcgtaatacaaaagatgtactatggaaatggttaacatgcatgaaaagcagctctttatgggatgtaaaa

SEQ ID NO: 28748 - DNA, 1615 bp, Glycine max
  Clone ID: TF_GmC1708_1
taaaactactgcctgcaaggatgctgaaactaagaagtatgtttcagaattgaatgctgaggaggatgatgttgatggcaatggagatgaatgtcgcttgtgtggcatggatgggaccttgctttgttgtgatggttgtcctgctgtttatcattcaaggtgtattggtgtgatgaagatgcatataccagaaggggcatggtattgtccggagtgcaaaatagatatgattgggcctactattgcacggggaacatcacttaaaggggctgaagtattcggaaaggatttgtatgggcaagttttcatgagtacttgcaaccacttactggtgtatgtttaacttcttttgtgtttcttccactccttcatttgttatgctggatgattctggctcaatgtcaacagtgatggcttttgtcttaaatactacaatcagaatgacatacctagagttctccaagtcctttatgcatctgagcaacatagacctatatacaatggtatttgcatggcgatgttagaatattggaatatttcagaaaagttcttacccatttgtgtcagtagactaactcctatggtcgaagaagagcataaagctgttagttcggtgaaggaagaatacagtttaatgtttgggaatgggatttgtggtgataatttggtgccatctcttgatgcttcattggttacaactcgaagtcctgctcctggaagcagtggcaatgcaagaactactgtgaatctgaagcttaatgaggaaactgcaatggattcgactgtttcaactgttaaccatcatcactctgacccaaagtgccaaaattctgttaataggtcagctgcagtaagccctgtcaagtgctccttggtaagcagacaatttaataattatgggcacgcaaatgacgtagggttgcctatgaatttgtctttgcaaactaaaggcgaccaatctggttttggaaagtgcaaaggcagtttaactaatgattttgtgtacatgggttgctcctataaaccacagtcatatattaattactatatgcatggtgatgttgctgcgtctgctgctgctaacctggccgttctttcttcagaggattctagatcagaaggtcatgtgtctggcaacttggggaaagcaacatctggaaacacttatttgctagcaaaagcattctcccaaacagcttcacgcttcttttggccaagttctgaaaagaagcttgtggaggttccaagagagaggtgtggctggtgcatttcttgcaaagcctctgtttcaagcaagaaaggatgcatgttaaatcatgctgctataagtgccaccaaaagtgcaatgaaaatcctttctggtcttgctcctgtaaggagtggagaaggaatcatccctagcattgcaacatatgttatgtatatggaggaaagtttacgtggcttaatagttggaccctttctgagtgaatgttatagaaagcattggcgtaaacaagttgaacgagccaaatcatttagtgatataaagccccttttactcaaagtgagtgattgttattttgaatcaaggagatttattaatttttaatgtctggactattgcttgcatttg

SEQ ID NO: 28749 - DNA, 3160 bp, Glycine max
  Clone ID: TF_GmC256_1
ggctcgaggaatgctgattctccaaaggcacctggctgccaggatcttggcaatatgggaaatacaaattcgtctggtcagaagcctgctctgcatggcgacatctcagagtctaagaaattgacaagtgacttgagagcaccttctgcaagtgctgttggagttgcacattcaaatgaaaagcttagaactgtgagttattctacgaagaaccaaaacggatttactctcccaaggatcttagatgaaagctcaggcagagaaggcaacaactgtgataacaataaggttaaaagggctagtaagggtgtcaaatctatcagtgttgaagtttctgggaaaggaaatgattttattaaagaagatgagccaattagtttattgcctcaaaagaggataaatgaagcttcttttactaaattaaaatcgagaaagaagacttgtgtcccgtcagcaaatggtaaatctcaaggattaaaagtgacatctcaggttgatgagccacctgaagtcgatgactatttttctataggcaaagatggtataaataactcaaacacttgcttagttttgaaaccttcaggctctacctccaactcactggcatttgatgagcttttttcaagaaatgcaaacccagaatctgttcagtgtgataatgtctgtcagaattcaccaaaaacggctgttcagagcttaagtgaatctaaaattaatggcaagcctgatatcacagattctggaatgcaacaagttgatggggatgaagcagagcaacataatgtcactagaaatctagattgttcttctctgggaaacaaaaagtcatgtaatgtggaatctgctggttgtactaaattggatttaatcactgaagaaagtaataaactggttagaaactcaccccgaaagaagtcggttgccaagagaagtttgggttctaaacctaaattaggtgccactgctaaacagaaaaaatcactttccctgactaaaacttccctgcaaggtgaaggtgtaacttgttccagtggaagcaaagagattgcaacttgtgatgcgaagatgcatcagggatgtcccaaaatctttgatgttaataaaacaacagagcaagaaattgttggtaaaaatgcagaagatgctggtgacagaactgagtttttggacgatgaaaccgaggctccagatgacaaatgtgaatatgagttaggaatggcccttgatgaagacttggttcatctttcaaaaaagccatatacagcaaaagaagagaagtcagaagcaatctgccctgcaacaaaatgtgaagaggcaatgcctcctaagaaaggcacaaataaaactgaaaaacagaaaacatcttcactgccagtaaagcatcaagcaagaaaaggttctgcgggtaaagtcaaggccacagttagtaaatatgctgaagatgatggtgacagaactgagcttgtgaacgatgaaattgaggccccagatgacaaatgtgaatacgagttacgaatggcactcaatgaagaatctcatctttccaaaaagtcagatacagcaacagaagagaagtcggaagtaatttgccctgcaacaaaatgtgaagagacaatgcctcctaagaaaggcacaaaaaaaactgaaaaacagaagccatcttcactggtagtaaagaatcaagcaagaaaatgtcctgctggtaatgccaaggcaacagttgccaaggaattatcgaaatctaatatggcagtatcaggggagaagattcctaatgagactgggcatgagccagagatagaaaccatggaagaaatgtcccttcctgatgataaaagtgacgagtcagctgttcaaagaaataagtcagagaatttttctgaagagaaggagaataagccaattgatggagagcagggcagaagcaatggtaatccaactattaaatctagtgtaaggccagcaaagatcaagtctaagaaatcggggctcaatccatctataacagaatctaacacgagagtaaaaactgaagccgcatgttttatattaagtgggcatcgtctacagagaaaagagtttcaacaagtaatcaagcgtttaaaaggaagggtttgccgggattctcaccagtggtcatatcaggcaacacacttcatagctccagaccccatacgcaggacagagaaattttttgctgctgctgcatcaggaaggtggattcttaaaactgatttcctaactgccagtagccaggcaggaaaattgttggcagaggagccttatgagtggcaccagaatggtctcagtgaggatggcacaatcaatatggaggctccgagaaagtggcggttgttgaaagaaagaacaggtcatggagccttctatggaatgcgtattgttgtgtacggcgattgcattgctccacctttggatactctgaaacgtgtcatcaaagctggagatggaacaatattagcaacttctcctccttatacccgcttccttggtaccggaatcgactatgctgtagttagccctggcatgccacgtgttgacacgtgggtccaagagttcttaaaacatgagataccttgtgttgtagcggactacttggttgagtatgtttgcaagcccgggttctcccttgagagacatgtattatatggcagtcatgcttgggcagagaaatcatttgataaacttaaaagcaaggcagaagagattgttgaagaactcgttgctcctgaagattcccgtgatgatgatataatttgcaaagtatgtggatcccgggatagaggagatgtaatgctgatttgtggtgatgaaagtggttccgtcgggtgtggaatcggtacccatatcgattgctgcgatcctccactaacagctgtccctgaggaggattggttttgcccaaagtgcagtagcacccgaaactgctcaaacaaacccagtaaaaggaaaaagactgtcttatcttcatccaagtgtacgtaatatcatattccctcccccttttgagtcagtcatcgtttcatttagggaacatacctgaattgtgccaacattatccctggtccctagattaaagttgtaataataataataataattttgtacaatccttagtaattaacaaaataatgctgatttc

SEQ ID NO: 28750 - DNA, 2921 bp, Glycine max
  Clone ID: TF_GmC310_1
ggaactgcctgagaagttggggtcgaaatagagatttgtttcattggagttcatggacctgtcctctttgccggatttgtgaggcttgcagaaggactggtgatccaagtaagttcatgttttgcaaaaggtgcgatggtgcttaccactgttattgtcttcaacctccacacaagagtgtttgtaatgggccttatttgtgcacaaaacacgcaagatgtcacagttgtggatccaatgtccctggaaatggactaagtgtgaggtggtttatgtcatataccaactgcgatgcatgtggaagattgtttacgaaagggaactactgtcctgtttgtttgaaggtttacagagattcagaatcaacacctatggtttgttgtgatagttgccagctctgggtacattgccagtgtgacaatatcagtgatgaaaaatatcaccagtttcaattggatgggaatttgcagtataaatgtcctacatgtcgtggggaatgttatcaggtcaagaatcctgaagatgctgcccgagagatttggaggagaaggaatattgctgagagagatttgattgctagcttgagggctgcagctggtttgccaactcaagaagagatattttctatttcaccattttcagatgatgaggatagtgggcctttaaaactaaagagtgaatctgctcgttcctttaagttctctctaaagaatttggccaatgactcaccaaagaagaaatcttctagcaaaaagactgctaagaaaaaagactcacagttatttatgactagtaaaattgacacacacaatagttgtgaaggacatagtgatattaaatctttgcatagcttagatgatgataagaatgatgatatacaatcccagagaaatgaaggtccagatgtatactcatcccctgctactggaagcttgagtcaaactgaagcatcttttcctattaatcagccagggattttgaaacaaaagtttgttgatgaggtgatggtcagtgatgaagagaggaaaccaagagtagttcgaattaaaagcaacaaggcacttattccagatagtgaagaggaaagtggaaaacacagtcttaagactcagaatgtgaaagggaagaagttggttataaatttgggagcacggaaaattaacgtggctagttctccacggtctgatacttcaagctgccaaaaagatcaagatccggtgactgttaatggaaatgatgattcattttgttggtcttgtcactatatatttgcttgagaagttgtaattgtgtgatttgtgtaaaagtggtatggggctgatttttcagacattacttctttctgcccatgaaatcagtgacacattttacacattatccaggagaaaacatttaattatcctgtcaaataattactattgtgcaacaaaatttatagtaattgtataatttgtaactgctttttgtgtgtatgtatatgttcttgaatggtttgattgctttatttggttttgcttctttcctcttttatttttgtgtgatttttccaattcaaattttctttcaggaaatgaagatataagccaatggaggaagggagacaagtttgcattagatagacaagatgacacagctaggcatattgacggtaaaggaatcaaagttgattctgggcaatcaaaatttttcagggtttcgggaagagaagggaatttgattaagctgggaaaagttaagccagatgtttctgaattcaacctgacctctggtagaggcaatatgtctgatgggcggataaaacatagtattgatggaatgattaatcaggttggaataaaagccccatcaagaggtgaaaggacatatttggggaggcagtcagaaggcagctctgatgcatatgagacagatgacaataataatcgtacaccttcacattctttgccaaaagattccaaacctttactaagatttaaattcaagaaacccagcattgaaagtcaaaattctcctcatcaggaggaagagaagatgacaatcaagggccagaggtcaaaaaggaagagaccttcaccttttaaggagaaagcatcttttaatgagtctgaaggtgtaagtcaatcacgtcaagacagtgcaatggatgggataatggatgcaaactggatattaatgaaattgggcaatgatgcaattggaaagagagttgaagttcatcagacatctgacaattcttggcacaagggagtggttactgatgtagtggaaggcacttcaaagttatatgttgcattagacgatgggaaagtgaagaacgtggaactcaggaaacaaggggtccgttttgttcctcaaaagcagaagagatctaagacatgaactaaacttgtccaccctttgtgatcatttaatgtggatacttttcttaattgactttgaagatttttcatctttgaggcctcttactgaatttatgttcgtagctgctcacattgccgctgatttttgggtgaagcattcttgattggagcaaatttcagtcgaaagaattaaccatttacctcagtcctttttctgggctgcaggttcttgatctcgagttagatttttgttccttttctacatgtatctgatttcaaagtagattctacctgtgatgtataggttcaccatttctgtagaatagattagtaaaggccaaggtgttagctgtatgattaatattgctagtatatttgtgaattccaggtttcatgatttgagatattatcttgaaagatgaaattatcgtcaactttttagagttgatggttgttcctgcccttgcccccccccccaagattcaacccataaaaataggtgcttgggtatcaaggcggaacaaagcccggacatgtgttaataatagtgggtctgggatt

SEQ ID NO: 28751 - DNA, 592 bp, Glycine max
  unsure (1)..(592): unsure at all n locations
  Clone ID: TF_GmC126_7
tatcgtacggctgcgagaagacgacagaaggggattctggatttctttgtttctatttatcaatatgtgtcagccaatccaaattgaatgatgcaggggctgatttcttgtgctctgataagctttgacctaatttggctacaagaattcatccattgtaaaagattgttaaatttaaggagtatctgagaagtagtgctacttttatttattttttttctgtttgtgaccctatagattttatgaaagaaacactgttcaattttggtaggttttttgtaggtaccatcctgcttgcgtgggcatgactattgaagaagcaaagaaattggaacattttgtttgttcagaatgttcatctgatgatgacatgaagaaaccccatgctacattttctgtatcaccaggatctgatgtcaaggttgagccaaagcggcggaagagatgaccatcacgaagaataactcatcttgcgaatgcaactcttgctgaatttcgcgggctatgtggtagctgttgtgtgtgtattgtacagcttctaccagaggctataaacacatcattttatgtatttgactcangctatgtatgt

SEQ ID NO: 28752 - DNA, 1191 bp, Glycine max
  Clone ID: TF_701130201_FLI
atccacaccaccaaatccaaattccaatgcttcttcttccttcttcttatttcaatttcaatcactactacttcacgcttttgtttctccatttttaaaccctaaatctatctatctaatagagataagatagggcaaaaacaaaaccctagccaaagaaaaaccttgttgagcagcaacagcagcagcagcagagagagaggaatatggaaggagtaccgcacccaatacccagaacagtcgaagaggttttcaccgattttaagggcagacgcgccggtttgatcaaggctctcactaccgatgttgaaaagttttaccagcagtgcgatcctgagaaggagaatttgtgtctatatgggtttccaaatgaaacatgggaagtgaatttgcctgttgaggaagtgcctcctgaacttcctgagccagcattaggtataaactttgccagggacggcatgcaagagaaggactggctatcactggttgcagttcacagtgactcatggctgcttgctgttgctttctattttggtgcccgctttggatttggtaagaatgaaaggaaaaggctttttcagatgataaatgatctgccaacaatcttcgaacttgtgactggaagtgctaggcaatcaaaggatcaaccagctgcccacaacaatggtagcaaatgcaaatcaagtggaaagtcccgtcagtctgagtctcaggccaaggggatgaagatgtctgcaccacccaaagaagaggatgagagtggagaagaagaagaagaagatgatgaacaaggtgcgacatgtggtgcttgcggtgataattatggcactgatgaattctggatctgttgtgatatgtgtgaaagatggttccatggtaaatgtgttaaaattactcctgctaaggctgagcacatcaagcaatacaagtgccctagctgcagtaacaagagggttagagtttgaaagctctaaacctttgaaccaatcaccaattaaacagacaagatttagaatgtttgataacatttttacaagtgaaaattgcttcctgttcaagtcaatgatgcactttaatgactatgcagatggaatttcaagttttgctactgttcattactactgtctaatcttcttgggaattgtgttaagtagtcattggcaacaaggatattatataaatatattctgc

SEQ ID NO: 28753 - DNA, 1316 bp, Glycine max
  Clone ID: TF_GmC121_1
tgtttctctctcaactctcacaacccatctttcatatccaaattccaatgcttcttcttccttcttatttcaatttcaatcactactattattactctttcacgcttttgcttctcgatttttaaaccctaaatctatctatctgtctaatagataagatagggcaaaaacaaaacaaaacaaaataaaaccctagccaaagaaagaccttgttgagcagcagcagcagagagagagaggcttatggaaggagtaccgcacccaatacccagaactgtcgaagaggttttcaccgattttaagggcagacgcgctggtttgattaaggccctcactactgacgttgaaaagttttaccagcagtgcgatcccgagaaggagaatttgtgtctatatgggtttccaaatgaaacatgggaagtgaatttgcctgttgaggaagtgcctcctgaacttcctgagccagcattaggtataaactttgccagggacggcatgcaagagaaggactggctatcactggttgcagttcacagtgactcatggctgcttgctgttgctttctattttggtgcccgctttggatttggtaagaatgaaaggaaaaggctttttcagatgataaatgatctgccaacaatcttcgaacttgtgacaggaagtgctaagcaatcaaaggatcaaccagctgctcacaacaatggtagcaaatgcaaatcaagtggaaagtcccatcagtctgagtctcaggccaaggggatgaagatgtctgcaccacccaaagaagaggatgagagtggagaagaagaagaagaagatgatgaacagggtgcaacatgtggtgcttgcggtgataattatggcactgatgaattctggatctgttgtgatatgtgtgaaagatggttccatggtaaatgtgttaaaattactcctgctaaggctgagcacatcaagcaatacaagtgccctagctgcagtaacaagagggttagagtttgaaagctctaaacctttggatcaatcaccaattaaacagacaagatttagaatgtttgataacatttttacaagtgaaaattgcttcctgttctagtgaatggttcactttaatgactatgcagatggaatttcaagttttgctactgttcattactactgtctaatcttcttgggaattgtgttaagtagtcattgacaacaaatatattatataaatatattctgcagtttctggttttgatttgaataaatatttcatttatttctaaaaaaaaaaaaaaaaaaaaaaaaaaaaaaaaaaaaaaaaaaaaatt

SEQ ID NO: 28754 - DNA, 681 bp, Glycine max
  Clone ID: TF_jC-gmXLIB3563P058ah04d2
tgcagaaatatttatataatatccttgttgccaatgactacttaacacaattcccaagaagattagacagtagtaatgaacagtagcaaaacttgaaattccatctgcatagtcattaaagtgcatcattgacttgaacaggaagcaattttcacttgtaaaaatgttatcaaacattctaaatcttgtctgtttaattggtgattggttcaaaggtttagagctttcaaactctaaccctcttgttactgcagctagggcacttgtattgcttgatgtgctcagccttagcaggagtaattttaacacatttaccatggaaccatctttcacacatatcacaacagatccagaattcatcagtgccataattatcaccgcaagcaccacatgtcgcaccttgttcatcatcttcttcttcttcttctccactctcatcctcttctttgggtggtgcagacatcttcatccccttggcctgagactcagactgacgggactgttaaaaggtccaaaacaggaagaccaaagggactttccagacaagggcagtgatagaaatgtaaactaagaaacaattgaaaactgaataccacctttccacttgatttgcatttgctaccattgttgtgggcagctggttgatcctttgattgcctaacacttccagtcacaagttcg

SEQ ID NO: 28755 - DNA, 1392 bp, Glycine max
  Clone ID: TF_GmC3892_3
cgaggcctgggaaggagcttctttggcctaagttggatattcttcgacgcaaattgaagagtaggggtctatttcaaagtgtggattcattgtgtgccgaaggaaagtttccagaatctttgtttgattctgcaggagagattgacagtgaggatatatttttacggctgcgagaagacgacagaaggggcactaataatgatataattctttgtgatggtgtttgtgatcgtggatttcaccagctctgtttggatcctccgttgttaactgaagacattccacctggcgatgagggttggttatgcccaggatgtgattgcaaagatgactgcatggaccttgttaacgactcctttggaacaagtctttctattagtgacacctgggagagagtctttcctgaagcagcatcatttgctggaaataatatggataacaacttgggacttccttctgatgattctgatgatgatgattataatcctaatggttcagatgatgtgaaaattgaaggggatgagtcaagttctgatgaatctgagtatgcttctgcttctgagaaattggagggtggttcacatgaggatcaatacttgggccttccatctgaagattctgatgatggtgattatgatcctgatgctccagatgttgaatgtaaagtcaatgaagaaagttcaagctctgatttcacttctgactccgaggatcttgctgctgcaattgaggataacacagcacctggacaggatgggctcatcatgttcggcgaacacatttttatttttattgtgaagctcgcaatttgccatgaattttcactcaggttggcaaatggttcgacaatacacgttggagcttccggcattcatcacaaatggaaaccaattctggtagaaatgcttcaccggaagctaccgatggcagggctgaaaatgagggggagaagcaatgtgaatcaatgtctccggaggtcagtggaaaaaactctaaaaccacaagctctagaaaacggaagcatttgtcagaacccctatttgaagcacagctggatatcaatggcttagcaacaagttcaccaaatgttcatcaaacgcaagtaggcaataaaatgaagccaaggaaaaggaaatgatactttatgcaagagccctgtttaaccttttcctaaggcttcaaattacagtatccatccttttgtgagattgagatcccatgaaatgatcggctaggatctcgatggatttgtttccatttaggaaggtaatcataaaatatgtgccattgtattttttaaaaatagctttccaggtattgatctggtgagttgttttagtgttgcctctcttgcaaacactaaactaaaaatagttcagttattagttatcc

SEQ ID NO: 28756 - DNA, 2144 bp, Glycine max
  unsure (1)..(2144): unsure at all n locations
  Clone ID: TF_GmC931_1
aagtaaactttgaacctttaaaacggcccccccatatttttttgtaaaaatttattctttatttttttttttttattttttattttttttattttttttttttttgtttttttttatttttttttttnnatactttcgtgtagttctcacttctctcgctctcaaacctgaattcggttgtgatataaacctgcgttgcgctaaacgacaccgttttcactgtctctgagaatggaggcactaagtcgctccgtggaagaaatattcgaggatttccagggccgaagagccggcatcatcaaagcccttaccaccgatgttgaagatttctacagccaatgtgatcctgagaaggagaatttgtgcttatatggatttcctaatgagcaatgggaggtaaatttacccgttgaagaagttcctccagagcttcctgagcctgtcctgggcattaactttgctagggatggcatgctggaaaaagactggttatcattagttgctgttcatagtgatacatggttacttgcccttgccttttattttggagccagatttggatttgataaaactgacaggaaacgactattcggtatgatcaatgaactaccaacaatatttgaagttgttacttgaagcaaagaaacaagttaaagagaagtcttcggtttcaaacaacagtggcagcaaatctaagtctaactctaaagcgataatttgtgttcttatcaaattgctggctggtggagcagcgggcttccgaaacccagggcagacaatcaaagccattacaaccaaaattttgcacttgcacaatttttgtgtcagagacacagagaggaggcaacgccacaccacaccattttatttttgtcactttaaacaccgaaagtacatgttttattatagggtacactagtgagcagctagctcttattcactagaaagttacaagacgatacaacaaacatgtagtcacagtttgtagtagccaacagccatagtgcacttacgccctgtcatctttgttttcagcaacaacctcaactctttcaaggcagagtgtaaggtccacacttgtaaccaacagggcgattagccaggttgcaacgcttggggatggtgacagcaacttgagggttgacaccagccattttggctgtgttggagagcagaactgcacagaggcagcttgggttctgcccaattttcttcacctgagcacagcaactctgagaaacactagcattctcatcttgtgctgctgaggcacatggtgcaagcttataagcctcattatctggggtggtagatttcccacattcaccagcactctccacccctgcaatagtactcacaagcaccacaaacccaacaaggcatagcaacttcacacaataagtacaaccctccattatttctcaatattatgcttatgtctctctattagtgaaatgtttctctgttgatttcacaatgccatcatacccattgcgataaaagatgaggatgaagaactagaagatcaagataatgatgaacatggagaaaccttgtgtggggcatgtggtgagcattatggtactgatgagttctggatttgctgtgacatctgtgagaagtggttccatggcaaatgtgtgaagatcacccctgctagagcagagcttatcaagcaatacaagtgcccatcatgcagtaacaagagagctcgctaagcaaatttccatcagggacaataaaccatttgagtcttaacgaatctgattaatattttttttttctagatgtagctgatggatagtttttatgtttgacacatgtagatttcttgtctttctgtgggatttatgctgtgttggttgtctgggggaagttcattctttttccaagccttgtcctagctatggatccacatcggcataagcttcatatgaatggggttgaaaccataatctcatcaatgcttagaagcttagggtttttcatcatattaaattagtatcagctgcaattcagttgatgccttcttggatttgatcaatttttagtttatgcattgttgacttgggaaagtgaagtcttttccttaatgtcactctaaaactaggttaatgaaacaaatttatttgaaatggatgtct

SEQ ID NO: 28757 - DNA, 2291 bp, Glycine max
  Clone ID: TF_GmC259_1
gtcgatccagcgtccgcgctgtcgtcttcaccgtataagaactatcgcctggttctgaacagtgtgtgattcggattccgacgaggatgtcgtcgttgggttccccgaagaagcggctgagatcccaaacagcagaagagaataaggaagaggtcgtttgttgcgggatttgctacgctgagcgtggggtttcgattacaggggaaatcgattgctgcagccaccacttctgcttcgtttgcatcatggaataggcccaattttccgccaaaggttctcctacgttcgctggctccctatgcatggcgtcttttcttcctccagggacgttaaggtttatcatcctcatggaaatatggcaactggtccggctgattcttatactgaaaccaaatgtggtgtttgtcatgctggaacagatgagcatcttctactactttgtgatctatgtgatactgcttcgcacacatactgtgttggcctgggctatactgtttctgatggtgattggttttgtcacgattgtgctatttcccgggagaccaatatcaatgaagaatcagaccaacaaaaattttgcgcaacatgctgagccaagtgtaaccatcaatatctttgatattgtgagggaaacaggcagccgtgtggttaatagacctagggcatctcctttacaacagaacctatcatctcctgttattcctttacctgattggttaagttacttaagtagattaaattgaaaaggttttgtcttaagtgtcaataatatgcagcggaagtgaggcttttttagttaaaactcgaattctttaaaaaggggttcatcttagttccgttgagataaatctaaatagggaagcatagttagtgaaaaacaatgttctggttccttatcatatttcaaattggatggttggcattctatggctaccacaagcccataacaatatactggccaaggtctgccttctaacaaaatgttgaatgagagagtctttaaagatgctgactaggcatggaatatgatggacaggtcaaagaggatacaacgcctcatcatagaacaggcagcattataggggtgtgaatcttgttaatgaacaaaagagattggataaaagctctgaggatagaaaaacaattctccgaactgaatgatcaacatttcaaagcattagtcttgaggaacactaaaatggagaagcagtgtgactattctagtctcaaccagaatttggaaaatcgctctactctaaatttggaagagaaaaagcaaagtagggttacatgtgagggaccatactactcactcaaaaggatattgtgaacgtccattgttatcaaatttctttttttccttcatatctacatgatcattgtaggctgaaatatttataggtgttttgtgtaccctttttacaatccaaacctgatctttaattaggttgagtgtgtgtctagttcagcttattttggagaaataataggttatttttgtcaatgtctggagaaaacttttgaaaaataacaattgttttcttaaaaccatttccaaacatgcatcaaatgcattaggtttgcattcaacatttagcatatcaaccttatatcatatttctgttcattcgatgcgaggtggagagacagagtgcacctctatgccaggcacaaattctatccctcattacaaaaagtgttcatgataaatttctaatgttgtttttcctgtatgtatgttgtaagctgttaaacaggttgcatgtaaattccaaatggtaactgttacttgaatgaaagtaatttcacttcaagctattatcttgatgcaggtgttgataccttcaaggtagttgcaaggcaggccactcataccatcttggctacttgcagttctgatcagcaaaagtctagtacatcctcctctagctcagtatgcagccatgccgacaatactcctcagtttcagaaatctactttaatgcctaattgttgcaggcaatgcttttatgactttgtaaacaatgttgtcaactctaccatattggagaaagtgggttgcgcttgatctacattattttttttttctttggagagtgcatcatgtatttctcttgctgtgattattgttctcatgcacctactctgtaaaaaatgttacttcgtggcccaggtaactgcattgtaaaatttatgtcgtaggtaggggatagcagtgtaatgtaatctatttatttttcacctgaagggaatagttgaggatataaatggaaaattagagtattttgttt

SEQ ID NO: 28758 - DNA, 1283 bp, Glycine max
  Clone ID: TF_GmC1473_1
ctcgcgccgctctgcagcatccatggcttcttcactgggtcgaagaagaacccacgctcccaaatcatcctccaccctaaacgacgacgtttcctgcgaggaatgcggcggtggccactctccttcgaagcttcttctctgcgacaaatgcgaccgtggctaccacctcttctgcctccgtccaattcttccctctgtccccaaaggctcttggttctgcccctcttgctccaatcacaaacccaagtctttccctcttgtccagaccaaaatcattgacttctttcgaatccaacgctcccctgaggcattatcaaatcaagacacgcggaggaagcgaaagcggggtgggggcttggtggtatcgaagaagaagaggaagctgttggcgttcgtgccgagtgaggatcccaatagaagattggaacagatggcgtcgctggcgacggcgttgaccacaactaaaacggagttcagcaatcagcttacttacatgcttgggatggcaccaaggtccgctaatcgtcctgctcttgagcgcggtggaatgcaggttttgtcaaaagaagacaccgagaccttaaacctgtgcaagcgtatgatggaaagaggagaatggccaccactcatggttgtttttgatcctctagaaggcttcactgtagaagcagatagatccatcaaagatttaaccataataacagaatatgttggagatgtagactttttaaaaaatagggaaaatgacgatggagatagcataatgacacttctctcagcttctgatccttcgcggacgcttgtcatctgtccagacaaacgaagcaacatagctcgattcattaatggcatcaataatcacacgccggaagggaaaaagaagcagaacttaaaatgcgtgaggtttgatgttggaggtgaatgccgggttcttttaattgccaatagagatattacaaagggggaaaggttatactacgactacaacggagatgaacatgaatatccaactgaacattttgtctgattgcgttcaaatataaattataagcaaatcaccctaacagggagggattgtaagctcgtgattttttcatttctaagttgatttggtcaccccttaatatggttgccttgtcactaccccacatgtatcatgtggatactcaatatatttcacagtagacttgtggtttatatcatattgttcaattatttttttaattgtttattgattagattaattttctcacatatgcaatggccaatgcatatttttagcc

SEQ ID NO: 28759 - DNA, 1296 bp, Glycine max
  Clone ID: TF_GmC727_1
gcgtgcggctgctagaagactacaattcggcacgagtgtaggtgtgtgtgttgttgcacactctccacacttacacagagagaaaagagagagaaagaaaaggatcaaatagttaaaacctttggttctttccctccatagttccatttttccattcaacaacacaacacctcagacagacatcatggaggcaggttacaatcctcgtaccgtcgaagaggtctttagggatttcaagggtcgcagagctgctttgattaaagccctcaccaccgatgttgaagagttctaccagcagtgcgatcccgagaaggaaaatctttgcctttatggatttccaagtgagcagtgggaagtcaatctgccagctgaggaggtgccccctgagcttccagagccagcattgggcattaactttgccagagacgggatgcaagaaaaggactggctgtctttggttgctgtacacagtgatgcttggttgcttgctgtggctttttattttggtgctaggtttggatttgacaaggctgataggaagcgactatttaatatgataaatgatcttccgacaatatttgaggttgttacagggatggccaagaaacaaggaaaggaaaagtcatcagtttcaaatcatagcagtaccaaatctaagtcaaactctaagcgaggttctgaatcaaagtatacaaaagcaatgcaatcaaaggacgaggatgatgagggtggtgcgggtttgggtttgggtttggaagacgaagacgaagaggaacatggagataccttgtgtggggcatgtggagagagctatgctgctgatgagttctggatttgctgcgacatctgcgagaaatggttccatggaaagtgcgtgaagattacccctgcaagggctgagcatatcaagcagtacaaatgtccttcttgcagcaacaagcgagctcgaccttgacaaacatggctaggatggtggtgactataatcttggcaattttatgactactaatttgtttagtaggtcaagtttattagtcttgctgtgaatttcaggtatattgtttcagatgttacattaggtatattatgagctgctgtcgattcatctaccattaggatgtttatttcataagtggacttgaatgttgttctgttatgtgtttctttaaattttatgtagctgtgtaactgtgttgtgtccatagcttattatctgccgtggtgtaattctgctctattttttttttttttgggatacatatatatattttttaattcaagttctaactcatgttt

SEQ ID NO: 28760 - DNA, 1276 bp, Glycine max
  Clone ID: TF_GmC727_2
tacggctgcgagaagacgacagaaggggacgctatgttaatgtagttgtgtgtgttgtgttgcacactctccacactccacagagagagagaaaagggtcaaatagttacaacctttgcttctttccctccatagtcccattttttttatttttttttccattcaacaacacaacacaacaccgcaacctcagacagacaaacatcatggacgcaggttacaatcctcgtaccgtcgaagaggtctttagggatttcaagggtcgcagagctgctttgattaaagccctcaccactgatgttgaagagttctaccagcagtgcgatcccgagaaggaaaatctttgcctttatggatttccaagtgagcattgggaagtcaatctgccagctgaggaggtgccccctgagcttccagagccagcattgggcattaactttgccagagatgggatgcaagaaaaggactggctgtctttggttgctgtgcacagtgatgcttggttgcttgctgtggctttttattttggtgctaggtttggatttgacaaggctgacaggaagcgactatttaatatgataaatgatcttccgacaatatttgaggttgttacagggatggccaagaaacaaggaaaggaaaagtcatcagtttcgaatcatagcagtaccaagtcgaagtcaaactctaagcgcggttctgaatcaaagtacacaaaagcaatgcaatccaaggacgaggacgatgaaggtgtgggtgtggaagaggaagacgaagatgaacatggagagactttgtgtggggcatgtggagagagttatgctgccgacgaattctggatttgctgtgacatctgtgagaaatggttccatggaaagtgcgtgaagattacccctgcaagggccgagcatatcaagcagtacaaatgtccatcttgcagcaacaagagagctcgaccttgacaacatcatggctaggatggttggtgactataatcttggcaattttatgactactaatttgtttagtaggtcaagtttattagtcttgctgtgaatttcaggtatattgcttcagatgttattacattaggtatatgagctgctgtcgattcatctaccattaggatatttgtttcataagtggacttgaatgttgttttgttatgtgtttctttaaatttaatgtagctgtgtaactgtgttgtgtccatagcttagtgaagtttatattatcccccgtggtgaaaaaaaaaaaaaaaaaaaaaacaccccaa

SEQ ID NO: 28761 - DNA, 1721 bp, Glycine max
  Clone ID: TF_GmC86936_1
accacgcgtccgaacaaactcatttttcttttccccatttttctctttctttttatttattttttttcattttcttttccccttcgcttcgtctccacagttcacaccattctcgtctccctctccaacaaaccgtttcctcgggaattgagaattccaattctgcccctcgcggctccgcgaatttacctatccgagccatggctactgccaccaccaattcttcgccctcggctcagcgccacgtcggcttcagccgccgcacgcaggcgccgcgccagctggacgacgactcgccgccggtgaacaagtaccggctgctgtcggagataatggcgcgcgcgccgtacgcggtgctggagagagaaacatacagcgacctcttgtgcgaccaatgcggctccggcgagctgccggaggagctgcttctctgcgacaaatgcgataaaggcttccacatgaaatgcgtcaggcctatcggcgcgagggttccgattgggtcgtggctttgccctaactgtcagggagggaagagagtgcggactttctctcacaagaagataacttaagagtaccctttacaaattaacattaagaacatgatgtcaaagcattatcatataatatctgattggaacttttttttcttgatttatctgttctgaacttctagatgctaaaaagcgtaagaaatgttcacgacctctggtattacataagaaaaagaggagattgttaccatttgttcctacaaaagatcttaaccggagattgaaacagatgggttctcttgcttctgctttaacagccttaaatatggaattcagtgatcacctcacatacttgcctggaatggctcctagatgtgcaaatcaagccttacttgaaaatggcggcatgcagactctttccaaggaagacatggagaccttagaacaatgcattgctttgtctaaaagaggcgaattccctccctttatggttgtttatgattcacgtgaaggctatactgttgaggctgatgacctaatcaaggatatgacgattattgctgaatacactggtgatgtggattaccttgacacacgggaacgtgatgactgtgacagtatgatgacccttcttcttggagcagaaagttctcaaagtcttgttatttgtgctgataaacgaggaaacattgctcgctttatcagtggcataaataatcacacacaggaaggtaggaagaagcagaattgtaagtgtgtgagatacaatgttaatggtgaatgcagggtctttttggttgccattcgtgatatttccaagggagagaggctatattatgattataatggtcatgagtatcaatacccgactcatcattttgtgtgagtggaagacaaatacatcctaaacagcctagggtggttgggacacaattttacgacctagagtggttgggacgcaattttagatcctcgggaaaggattttatttatattcttgaaagtttcaactaattgtagcagattcaacaattttgcccctaaattatcgccatgggccattcattgtaatttatgctgtagagctgcccaattatgtggctttagagatgaatagagtaccttagaaaaaccttgttcatgtaggttatgtctcagaagatgagatatacattttttttttcaatacagtttcaaggaatttaaaagattctcagatttttactttgt

SEQ ID NO: 28762 - DNA, 1416 bp, Glycine max
  unsure (1)..(1416): unsure at all n locations
  Clone ID: TF_GmC1161_1
agaaaatactctgcaaaggacaatgatgatctatgcattgtttgttgggatggtggtaatctattgctttgtgatggatgcccaagagcatttcataaagaatgtgcagctctatcaagtattccacgtggtgactggtactgccaattttgccaaaacatgttccagagagaaaagtttgtggcgcacaacgccaatgctgtggcagctggaagggttgaaggagttgatcctattgaacagattgccaatagatgcattcgcatagtcaaagacattgaagctgatcttagtagctgtgctttatgcaggggtgttgatttcagcagatctgggtttggtccacgcacaataatactctgcgatcagtgtgaaaaggaatatcatgttggttgtttgagggatcacaagatggcatatttaaaggaactgccagaaggtaattggctttgttgcaatgattgcacaagaatacactctactttggagaatcttttggttaagggggctgagagactccctgaatctctcttgggtgttataaagaagaagcaagaggaaaaaggattagaacccatcattgatgtaagatggaggcttcttaatggcaaaattgcttctcctgaaactagaccattgcttttggaggctgtttcaatctttcatgaatgctttaatcctatagttgatgcagctagtggacgtgaccttattccagccatggtttatgggaggaatgtgcgaggtcaggagtttggaggaatgtattgtgcattactaatagtcaattcatctgtggtatctgcgggcatgcttagaatttttggctcagatgttgctgaactccctttagttgcaacgagtaatgggaaccatggaaagggctacttccaaacactcttctcctgcatcgagaggctgctggctttcttgaatgtgaagaatcttgtactgccagctgcagaagaagcagaatcaatatggactgataaatttgggtttagcaagatgaatccagatgagctcaccaactatagaaagaactgccatcagatggtaagtttcaaagggaccaatatgctgcataaaatggtaccttcgtgtcgggtcatcaataatcaatcatgacatttttttttatagaaacgaaatcaatcgtgaaaggggaaaacccctagctttctcgcttcctttttccctttcttctggttttgtatatattaaacttttggctatttgaagccattgttgaagcgttcctgccatttgtttaaacatttataatgccatgtattctatttttattttaattttaattttagtaatatacaagtttagaagttcttgtctcggacaagtactcgaatataaaatatctttacccganaaaaaaanaaaanaaaaaaangggggggg

SEQ ID NO: 28763 - DNA, 1994 bp, Glycine max
  Clone ID: TF_GmC6778_1
gaaatattttacttgcaaaaattgcagagggtgtttcccttcttccaatgtggaaagagtggggcttttatgtctatcttgcgtggaatcaaggaaatctgaaaaaagttctattcatgctgttggcaaaagaatcaggtcccctcggccagtattattctcccgttcatgttcatgttgtgcttctgaatctgaactatgtatcactcctcaaactaagaaacagtggaagacaagaacaaagtcatcaaaactgtcggtaaaattgaagactgcaccaattacttcaaagtgtttatctccacaaaataaaagtcagtggaggatctctaaaaggtatcaacgattacataaattaatttttgaagaggatggattgcctaatggagctgaagtagcttattatgcacgtggacagaaattgcttgagggtatcaaaacatgctctggaattgtctgtcgatgctgcaacactgagatcagcccctcacaatttgaggtccatgcaggctgggcttctcgcaggaaaccttatgcattcatctacacgtcaaatggggtgtcactccatgagttagcgatatttctctcaaaagatcacaaatgcactacaaagcagaatgattatgtatgtgttgtttgttgggatggtggaaacctgttgctttgtgatggatgtcctagggcatttcataaagaatgtgcatctgtatcaagtattcctcggggtgagtggtactgtcaaatttgtcaacacacattcctcagagaaaggcctgtgttacacaatgccgatgctgtggcagctggaagggtagaaggtgttgatcctattgagcagattgccaagagatgcattcgcattgtaaaagacataggagctgagatgggtggatgtgttttgtgcaggagttctgacttcagcagatcaggatttggtcctcgcacaattataatttgtgatcagtgtgaaaaggaatatcatgtgggctgcttgagggatcataagatggcatatttaaaggagttgccagaaggggattggttttgttgcaatgattgcacaagaatacattctactttggagaatctcctgattagggtggctgagagacttcctgaatctcttttggatgttataaagaagaagcaagtgggaagatgtttagaaccccttaatgaaattgatgtacgatggaaacttcttaatggaaaaattgcatctcctgaaactaggccattgcttttggaggcagtgtccatgtttcatgaatgctttgatcctatagttgatccagctgccggacgtgaccttattcctgccatggtttatggaaggaatttgcagactcaggattttggaggaatgtattgtgcattattgattgtcaattcatctgtggtatccgcgggcatggttcgaattttcggtagagatattgccgaacttcctttagttgcaacaagatataagaaccgtggaaagggctacttccaaacacttttcgcgtgcattgagaggctgctggcttttttgaatgtgaaaaatcttgtgctaccagctgctgaagaagcagcatctatatggacagaaaaattcgggtttagcaagatgaaacccaaccagcttaccaactacagaatgaactgccatcaaatcatggcattcaaagggacaaatatgcttcataaaacggtgcctcaatgtcgggtcatcaatactcaattgtgagaaatttgtatacaaaaaagtgaatcgtgaaaggggaaaaccctagctttcttgtcgccatctttttttcattcaacctagtctgtacatgtatcgactttaggttatttgtagccaatcctgagccgcctatacttgatatttgtttgacgtttataatgtcattttcctattttaagttttggttagtcttgagcatcctcgagttcttgatcttggaccttgtgctttgctgcggtataatataatgctgttttatata

SEQ ID NO: 28764 - DNA, 2319 bp, Glycine max
  Clone ID: TF_GmC1266_1
ctcgagccgaatcggctcgaggaagaaagaaaagtgtgaagatgaggataattttatggataatggcacaaccatcgggacaacgactgggagaaagcggggccagaagagaagaagggtgcttctttcagattcagattatgcatcttctggatcatctgattttgagtttaccatatctgaagaagagagagaacaggtgagagaagccaagagattgtgtggaaatttgagaaataacttgaggagttcatcccatccaataaataagaagaggttggagtccatgagtatcaacatccgcagcggaagcctccagctcggaagggtaaggaaaagatagaagaacctctgggaagaaagggtaaggaaaaggtggaggatttaaaaagtaagggaaagcaaacatgtggaatttgtctatctgaagaagataaaagaagagtaaggggagtactaaattgttgcactcacttcttttgttttgcttgcattatggagtgggcaaaggtggaatctcgctgccctttgtgtaaacagagattcaaaacaatcagcaagcctgcacggtcaacgacggggattgatttaagagaagtggtgatacaagttccagaacgtgaccaggtttatcagccctctgaagaagaactaaggagctatattgatccatatgaatatgttatttgttcagagtgtcatcaaggtggagatgatggcctcatgctactctgtgatatctgtgattcccctgcacacacatattgtgttggtttggggcgggaagttcctgaaggtaattggtattgtgatggatgtagaccagttgctttgggacttcaagaagtccaaagaagggaaggtgtggctgatccaagggtatctgtccagagccatcctgttagaccaccccctgttctacatgtacgagaaagtatagacctcaacttgatttcgtcaccccgtgctgcttttaatcaaggttttgggcatcttccatcttctagatttagtggcagaagtgctgaaggagcctctcctgtatctggaggggcaccaactttatcagagagacgctggatacaccgtcagattcaacaactactttcaatagataggatggcctctacacctggcagaaccaatggtatttctgctaccagttcaactagtaacttatatagctctcactttgatcaaagtaggggaaccaccactctgcatgcaaggacacaggatgtgggaacatcataccacacattttttgatgagagattatgcaacaattcctctccattaatgcagaatggggcattatggcctggacttatggggacaaccccagtaccagattgtgaactagctcatcagttcagtagatcaaacattgttcctgatagtggcttatcccctgctatcagagaagaaagtaactttcacattgcaaaggagcaattgcagtcaatggttaaaagccacttgaagaacttgtctcaaaatattgatttagttaagtatattctttcttcttgtggtcacagatattgtaatagttaccttttctctttgccttcatcatacggggagggacgtattgtggcgacatttgggactcaaaacacataaagtgggtccttccccaacctttagagacacggtacatgtctatgaaaccacaaggcccggatcattacaaaaattgaggacaggctttcttgtctgtgaagagaaccttcgtagaggtacctgtgcgttaatccttttctaatcaagccttggaataattttccaacatgatatctaatagggaaattgcatcatggttccattgaagtgttttttgctcattttactgcagtcataaaaaaaattcaaaatgccttttatcttttttattcaggccacaatactatcaaggatattgcaaggagttctatgcacaccatactagcagcttgtgatcttgagcacatgaagagtgaagtttgcactgtgcctcctccatctgcctgttcccatatggagctaatggctggtgggcaaacgagtctaattaaaggttgctgctcatcttgctttgattcctttgtaggagatgtggtgaagaggattttggacacaagaatttcgtcacagtggttacgattaggtctttaggcataaaatcattgttatgtgtccaaagacaccttttttgttagttcagaaagacaaggaacatttcatttacttgtttatacataccatatgaatatgatttcactacaactgaacagaaaggctgttgcttctaacattttatttgtttaattgatacag

SEQ ID NO: 28765 - DNA, 2137 bp, Glycine max
  Clone ID: TF_GmC38836_1
ccctcgcgtccgcccacgcgtccgatgccattggaaaacataagttgcggcaggagcaagtgcaacatttttttggtctaagccctagagaacgttctttgtcttccatattgcagctcaaggaacatggagataccattgccttcagttgctctgaactggatttgattttatctgaagttgagaaggtggaaaattggaagactagatgcatggataaattaagaatgttggtccaaaatggaaattccctacttcatgcactggatgaagataaaccagactctagatagatcattgtttatgtatgacaaattgcaagatctgaaggaacaaaatctatgtatatgctgctatgatgattctgaagatcaggaatttcttacttgttccacttgtatggactgctatcatgtgcgatgcgttggactaacagaaaaagacgcaggcattgaaaactacaagtgcccttattgtgaaattttgaggggtgaattccattatcagaatggaggtgccctcctgaggtttgtgaagaagcgtgttgaattgaaagttcttactgaactcatgtctcatgctgagcatttctgtttatggattgatgaaaaagattttttgtgccaacttgttgagaaagccctttcatgcaaatcttgcttgagagaaattgtgatccttgcatcagctaatgttgatgaagatattagcattgtctccgaaaaattggccactgctgtaaaggctagcaaagtggctattgtctatgatcagcatgatacttgtgaccttgagctgactttagcaaaaaacttttggaaaattcaagtcagtagattgttaaatggtgtacctaagcccactagccctttcatgcaaatcttgcttgagagaaattgtgatccatgcatcagctaatgttgatgaagatattagcattgtctctgaaaaattggccactgctgtaaaggctagcaaagtggctatcgtctatgacccgcatgatatttgtgaccttgagctgactttagcaaaaaacttttggaaaattcaagtcaatagattgttaaatggtctaccaaagcccactatccagcaaattcagaagcatctgaaagagggactggctatggacatatcacctgaagatcactatatgttgaaacttacgaatgtgaattgcttgggtttacagtgggcagaactagccaaaaaggtggcaactgattctggggcactcagcctggataaagtttttgaacttgtggtggtaggtgaaaacttgcccgttgacatgaacgaggaactaaggatattaagggcacgatgcatgctttattgcatttgtcgaaagccctttgatccagaaaggatgattgcatgttatcactgtaatgagtggtatcactttgattgcatgaaattgccttgcacagaagaggtctacatttgtcctgcatgtaatccgtgtaccgaaacgtgttgaacttagaagtgtttgtccatttctatgcatactacgatagctaaacatacggagaaatcattggtcattaaattgattcaaatgatttttatggtgtcatctcggtcatttttaatccatcttaatgcgaaaattccatttttaatttcttgttcgcatttcaccatttgaaggcttgagttattaggataaagatggcgtaaattaacgtaggaagcattagttttatacagctgacaaaagtaggtaggattttttttttaatagaattcagttagtttttaactttttatggtggaaattagataaaacagtggtaacaatcattcatccattgttggattaaatcttcagtgtctgtaaataagatgatgtttacatttattttctaacaaataaattgtctccctttagttgttgtttaaaaaaaaaaaaaaaaaaaaggcgaagttttatacagctgacaaaagtagggaggatttttttattttattttataggatttagttaatttttatgggggaaactaaataaaacagtggtaagaatcattcatccattttttttttttggattaaatgtttggtttctgtaaataaaaaaatgtttacatttagtttctaacaaataaattgtctccttttagggtcc

SEQ ID NO: 28766 - DNA, 2654 bp, Glycine max
  Clone ID: TF_GmC4485_1
aattcggctcgaggaagaaggaagctgtagataatggggtggcggttgaaggtggagatggtcttgctgaaggtgaagaagttcaggacttgaagaatgaaactgtaaataatgggatggaaactgagggtggaaatggtgttgctgaaggcgaagtttggaccttgaagaatggcgttataaatagtggggtggcaattgctgatgggagtgctgctgctgaagatggagaggtttcaggctcaaagaatgaagttaacggggtggcatttgctgatgggaatggtgttactgaacatggagaagtttggggatcaaagaatgaagctgtaaataatgaggtggcaattgttgatgggaatggtgttgcttacggtggagaagttcatggctcaaagaatggagctgtaaataatgaggtggtcattgcagatgggaatggtgttactgaaggtcaagaggatcactgcttgaagaatgaaactgttaataatgtagtggcaaatgcagatgaagggaactctggtgcagttgagtgttttcaaacatacaagaggcgcaagcatgcaaagtcaagttcagaatttaaagtccaggagaacagcagaaaacatatgggagctgcaagtcaactgttggcggtgaggaaaccatttgatttagctgttggcaacacttcaaaagatcattcacatgaccattgggggaatgttgtactaaagcatttatatcattcattaggcaatgacaatggtggcatgaagtggtgtataagggaagcactcatgagctgtcctaaaattagttgtgcccctacaatgaaggaaactcttaaaattgtcaaagatggtcaggagtgctctccgcaattagaaagtttgttttatagattacagagtgaagctaatggacatgaaaatgttgtgcacaacggattttctagtgagtcaaatggccgtgatacaactgaggggtgtcagcgtgtgttccgcgatatcttagcctctgaaaagttcagttcattatgtaaagtgctacttgaaaatttccaaggaacgaaacctgaaactgtatttgactttagtttgataaactcaaggatgaaagggcaagcttatgaacaatcgcctacacttttcctatctgatgttcaacaggtttggcgaaagcttcaaagtactggaaatcagattgttgctatggccaggagtctctccaacatgtcaaaagcttccttctgtgagcaggtgggaatttcagcgcagagttcctttgaagatgaaaaggaagtgctctgtaaccaggaatccatctctcacatgaaaccagagcagacagtagaatgtgttgcattcagacttggcacttgctggcattgtggagacaaagcagatgggacagactgtttggtttgtgattcatgtgaggagatgtatcatctgtcctgtattgagcctgctgtgaaggaaataccctacaaaagctggttctgtgccaattgtactgctaatggaattggatgtcgacacaagaattgtgtggtgtgtgaacggttgaatgccctgaagaccctggatgatattgttggtgaggaaaacatccctacaaatgaggaaacactgaatgaattagaagagaattcaaattgtacttatgatgggattcaaatttccacagataggagaaactcatccgactgcaaaatttgtaaaatggcggtggatggtgaaaaagtaaaaatctgtggtcactctttttgccctagtaaatactaccatgtaagttgtttgtcaagtaagcagctaaagtcatatggtcactgttggtattgcccttcttgtatatgccaagtttgcctcaccgacaaagatgacaataagattgtactctgtgatgcctgtgatcatgcataccacgtctactgtatgaaacctccacaaaattctattccgaaagggaaatggttctgcataaaatgtgaggcagggatacaggcaatacgccaggcaagaaaggcatatgagagtaacaaagggaaagttggtcagaatgattcaaagccaaatgaagatattgacaagaaatggaacaaaaagcgaggacgggaattagacaatgttggaggaatgatggacatgcttataactgctgcaaatactctgaattctgaagaggacttaaatgcaatgctgattgactcaaagaaagcattaacatgagggcgtgtgtgctaactgctaatacctaatgttttctatttcctgcatttgtttaagtctttagataactgattttgttaccgttggagagaaaggattatagaggccaaggagcaaaaagcatcaatagaaaaaaaactgtgataagtgaagtatgggatattttgcaggccagatactgatgcaatatgtggttgatatgaaatttaataggttgctttgctccctgcagtatataatgttttggattgtcatgattacttaagcgaagacttcaaattagaataatatcgatttccaatttgtggataatcaaaagggatgatgttttaccctttagatttcaatgtttcagtgccaattttgcacaagccttgaacagtattctgttcttgattttcttatccgttcaatgaatgactctgggagtgtttg

SEQ ID NO: 28767 - DNA, 676 bp, Glycine max
  Clone ID: TF_GmC180828_2
tttttagaacaaagttgtcacgtcgattcatatttttcgttgagcttgataaaacctagctgcacttaccctggcctaagctctcaaaaacagagacttgcaaaacaatcgacttcttctggcctcatttgctattaacataaaatcctagccgaagacaaccaaaaactatacagatacatacaaaagctatacactcaacgtacaccaaaattcacagctatgttacatgaaaccgttgcacactcccttgctactgcctcatctctgcaagatgtggtgaatttacaggtctcgttagcttcctcaccaggtgttggtaattttttagtctcctcacggtacgagttgacacatctcatacaaacaaacttagacggcattccatcagtattattatcaattccagcacatcttgtgtgctgccaaacaccacaggtatcacatgctaacattttctctccatcgtcatccttagccccgcaaatgcaatccaccttccacacctctgttcctcgttccattcggaatcggcttagcccatgtttagctggacatctaccttgaatttgaattgatccacttgttccaagcaagaactttatggtgagcgaatcactgattgatccataccctaggagttcctcagcttgaaacctcttatacattgcatata

SEQ ID NO: 28768 - DNA, 1167 bp, Glycine max
  Clone ID: TF_GmC7106_1
ggaaatcctaaaagcacacccccttaaactatctctgtttatttcttcactcccttttttcttcttcaagggcaatggacagtggaggacactacaacccccgcaccgtcgaagaggttttccgggacttcaagggccgccgggctggcatgatcaaagccctcaccactgatgttgaggaattttaccagcagtgtgatcctgaaaaggagaatttatgtctgtatggattccccactgaacaatgggaagtaaatttgcctgctgaagaagttcccccagaacttcccgagccagcactgggcataaattttgctagggatgggatgcaagaaaaggactggctatctttagttgctgtacacagtgatgcatggctacaatcagtggctttctactttggggcaagatttggttttgataaagctgacagaaagcgcctgttcactatgattaatgatttgcctacaatatttgaggttgtaactggatctgcaaagaaacagacaaaggagaagtcatcagagaacaatggcaacaaatcaaagtccagttcaaaagggcgaggatctgaacccccaaagtattcaaagcaagtgaaggatgaggaggagggattggacgaagaagacgatgacgagcatggggagaccttgtgtggagcatgtggggagaactatgcatctgatgagttctggatttgttgcgacatatgtgagaagtggtttcatggcaagtgtgtgaagatcactcctgcccgggctgagcacatcaaacactacaagtgcccctcatgcagcaataagagaccaaggccttgatatcatagggatgtggggttagttatcacggccctgtaaatcatgctggactgctaactagttagtggcttaggcattctgtattgtgccatgttggtgcatcgtaggtattcactagtttggtcttgtcaacttcttaatgtggatagaattatttaatatttgatggtttctgattctgaacgtctctaacatttgtcctgcattgggatatttatgttcttagtacctgataacatattcgtgcagcaggcttcatttgtgcttggtatattgatagtttgcaggttttgaacaaaaaaaaaaaaaaaaaaaaaaaaaaaaaaaaaaaaaaaaaaaaaaatga

SEQ ID NO: 28769 - DNA, 656 bp, Glycine max
  unsure (1)..(656): unsure at all n locations
  Clone ID: TF_LIB4164-036-R1-K1-G5
ccacgcgtccggtgatgttgatggaaatggagatgaatgtcgcttatgtggcatggatgggaccttgctttgttgtgatggttgtcctgctgtttatcattcaaggtgtattggtgtgatgaagatgcatataccagaaggggcatggtattgtccagagtgcaaaataaatttgattgggcctacaattgcacgggggacatcacttaaaggggctgaagtatttggaaaagatttgtatgggcaagttttcatgggtacttgtgaccacttactggtactcaatgtcaaaagtgatgacttttgtcttaaatactacaatcagaatgatattcctagagttctccaagtcctttatgcatccgaacaacatagacctgtatacaatggtatttgcatggcaatgttagaatattggaatatttcagaaaacttcttacccctctgtgtcagtaaacttcctcctatgattgaagaagaacataaagctgttagttcggtgaaggcagactacagtttaacgtttgggaatgggatttgtagngataatttggtgccatctcttgatgcttcattggttacaactcgaaatcctgctcctggaagcagtggcaatgcaagaactactgtgaatcttgaacttcacgagggaaact

SEQ ID NO: 28770 - DNA, 766 bp, Glycine max
  Clone ID: TF_uC-gmflLIB3275P110a05b1
ttttccccttcgcttcgtctccacagttgacgccattctcgtctcccttttccaacaaaccgtttcctcgggaattgagagagttctaattctgcccctcgcggcttcgcgaatttaccaatccgagagtcatggctccagccaccaccaattcctcgccctcggctcagcgccacgtcggcttcagtcggcgcacgcaggcgccgcgccagctggacggcgactcgccgccagtgaagaagtaccggatgctgtcagagataatggcgcgcgcgccgtacgcggtggtggagagagaaacttacagcgacctcttgtgcgaccaatgcggctccggcgagctgccggaggagctgcttctctgcgacaaatgcgataaaggctttcacatgaaatgcgtgaggcctatcgtcgtgaggattccgattggatcgtggctttgccctaactgtcaaggagggaagagagtgcggcctttctctcagaagaagataatcgatttcttcgggattcggaggagttctgatgatgctaatgataagcgttcctctcaggatgctaaaaagcgtaagaaatgttcacgacctctggtattacataagaaaaagaggagattgttaccatttgttcctacaaaagatcttaaccggagattgaaacagatgggttctcttgcttctgctttaacagccttaaatatgggaatcagtgatcacctcacatacttgcctggaatggctcctagatgtgcaaatcaagccttact

SEQ ID NO: 28771 - DNA, 3750 bp, Glycine max
  Clone ID: TF_GmC1724_1
ccacgcgtccgcccacgcgtccgcccacgcgtccgcccggacgtgttgccgtagaaaaaccggattggatagtcggcgataggtccgaattttgtaagtggagagagagagatttgttctggcattgttttgagtctcgttctgggtagacccacgcggccgcctcgatcggtcaaaagaacacgcaaagcaaacccaacccagccacccccaacacaacacaaaccgtgtgctaacaatagtatagtgggtgtgaacccccaaaccctaatccttcgtttctatgcatgcgctagcttcgtcgtcgtcgtcatcgattttccggtttgtgattctcgtgattcttctcgggccgaattattgggtttgacggcatggatttggtaccgagcgtcaaggaaaagttgaactattttcgtataaaagagctcaaagatgtgctcactcagttacacctttcaaagcagggaaagaagcaggatcttgttgatcgcatattatccgttctctcagatgaacaagtttcaaaaatgtgggctaagaagaatgctggtggaaaagaacaggtggcaaaattagtggatgatacatataggaaaatgcagatatcaggggccactgatctagcttctaagggacagggtgcatcagatagcagtagtgtaaaggttaaaagtgaatttgatgatgcttttcaacgagatgtaaagattcgctgtctatgtggaagtagattggaaacagaggatttggtcaagtgtgatgatccaagatgccatgtgtggcaacacaccagatatgaaattattaccgagaaacctgccaaagacatctcagatgttcctgatactttctcctctcctcgctgaagtatgttcagtacggccccgcttgtagctttccattgaataacctttgcagcataggtcgtacattacgtccagtaaatcttcggttgtattaaccccagatttcagatttagaaaaattgtagaacgttgtgaggcatttatggtcctcgatgaaatggcaattaatacataatgataatgggtctgaggcatctcatggtggaacagagctacaaattaccctgtgccaaaatgcttgcacccaccccctttggcaaagatgttgtggccgtaatgattctttatgcttgatatctaaattgtccttgtggcagatgttgatagatggactttatcagccaaaaactctccattatatctgctaagagctattatctcccgttaattgtttaggggttcgtattgttaaaaggcgcagcatgcagcagatcctaaactcaatcccaaaggagtctgatggagtttcaaatgaagaagctcttgcacgtgtctgccgttgtgttgggggaggaaatgcagctgatgatgctgatagtgacagtgatttggaagtggtttcagatactttcactatcaaccttcgatgtcctatgagtggttcaagaatgaagattgctggaagatttaaaccctgtattcacatgggttgctttgatcttgaagtttttgtggaaatgaatcagcgatcaagaaagtggcaatgtcctatatgtctcaaaaactatgctttggagaatatcatcattgacccttatttcaatcgcatcacttctatgatgatgaactgtggcgaagaaattgcagagattgaggtgaagcctgatggttcttggcgtgttaaggtaaagagtgaaagtgaacgcctggaattagggaatctagcacagtggcgccttcctgatggaaccctctgtgtgtcaactgctggagatgtcaagagagtggatacattgaagcaggttaaacaggaaggtgtttcagacagtcctgctggtttaaaacttggcataaagaagaattgcaatggagtttgggaagtcagtaaacctgagggcacaaacacctcttctggtaataatttgaaaagggtttttggaaatcccgaacaggttgttattccaatgagcagcagtgccactggaagtggtcgggatggtgacgatcctagtgtaaatcagggtggtggtgggcatattgactattccactacaaatgggattgagatggattctttgtgtctcaataatgttgatttagcatatgaatatactgcacccaacacttctgcccaggtgggtggtgcagaagttattgttcttagtgattctgaagaagacaatgatctgttggcatctcctgcaattgcatataagaacaacagaaatgatgctacagatggttactctgtaccaccacctgtaattgttgattcatatactgaagatcataatcttggtggaaattcatgcttgggactctttcctaatgatgatgaatttgggatgtcttccctatggccattgccttctggaagtcaggctggtcctggattccagttatttggttctgatgcggatgtgtctgatgcgttggtccatctgcagcatggtcctatgaattgctcctcgtcactaaatggttatgcattggctcccaatactgctttgggatctggtagtatcttgcaagagtcctctgctggtcggtcagatgctgatttgaatggtggtttggtggacaatcctttggcctttggtggagatgatccctcacttcagatttttctccccacaagaccagcagattcatccatgcacaatgaattgagagatcaagcaagtgtggctaatggtgtctgcactgaggaggattggatatcccttagtcttggaggtggtgctggtggtaacaatggtgatgctcccactcaaaatgggttgaattctagacatcaaatcccaaccagagaaggcgccaagaatactttggatgatactgcttctttactccttgggatgaatgatgttagatctgacagggcaagaaggcaaagatcagatagccctttctcctttcctcggcaaaagcgttcagtaaggccccgcttgtacctttctattgattcagattcagagtaaaggtcagaccttgtgtctcaagaactttaggtactcttaacatcagatttcgtatttagaaattgaagaaagttgagaggcatttttggtcctcatgaaatggcagttaatacataatgataatgtggtctgaggcatctctggtggaacagagctacaaattaccctgtgccaaaatgctttcacctaccccattggcaaagatgttggccctaatgattctttgctcttgatatctaaattgtccttgtgacagatgtttgctgggggtatagtgctggtttgttgtatagttaatcattcaaatctgtagttcaaactttcaaatttggtggtatattatttctgcatttttgtctctgctgagagcaataacctgtaaatgttttagccacatatcagatccaacagtgaaatcaaagatattgtttctggccatttttctagaatactatgttgtctcaagtatcatgcctcatgatcggccaagatagacgcccatttcataacacctggacgttgatatttatttaacatgtttaggcacctatgatgcctccccgtaaggatctatctatatttcttgcctggctaagtatttggtttcagatgagcttcttgtcattatactttgtttgcatagtcgaatagagacaagagaaaagagcccctaaacgttattgattagcctactattattgacaattatcaagaaccaggaaaagtgaactgcttctagg

SEQ ID NO: 28772 - DNA, 505 bp, Glycine max
  Clone ID: TF_LIB4164-031-R1-K1-A11
ccacgcgtccgctattgcaagccttgtgcaaagttaataaaatcgaaacaatactgtggcatttgcaaaaagatttggcaccattcagatggtgggaattgggtatgctgtgatggttgtaatgtttgggtgcatgctgagtgtgataaaatttccagcaaacatttcaaggatctggaaaatacggattactattgccccgattgcaagggaaaattcaactgtgaatcatcaacatcacaaacatacaagtcaaaaaatatatcattggagactggcccaaaacctgcattacctgagaatctaggggtggtatgcaatggcatgaaaggaatctatattccaaatgatcatatgattatgtgcaagtgttgcttgtgtggttcaaggacgcatacacttactgactgggaaagacatgcaggttccaaagccagaaaatggagatatagtgtgaaagtagaaagcacaatgcaaccgctcaaagaatggatcgatgaacaca

SEQ ID NO: 28773 - DNA, 1283 bp, Glycine max
  Clone ID: TF_GmC38836_2
gtgccaacttgttgagaaagccctttcatgcaaatcttgcttgagagaaattgtgatccttgcatcagctaatgttgatgaagatattagcattgtctccgaaaaattggccactgctgtaaaggctagcaaagtggctattgtctatgatcagcatgatacttgtgaccttgagctgactttagcaaaaaacttttggaaaattcaagtcagtagattgttaaatggtgtaccaaagcccactatccaacaaattcagaagcatctgaaggagggacaggctatggacatatcacctgaagatcactatatgttgaaacttacgaatgtgaattgcttgggtttgcagtgggcagaactagccaaaaaggtggcaactgattcatgggcactcagcctggataaagtttttgaacttgtagtggaaagtgaaaacttgcctgttgatatgaacgaggaactaaggacattaagggcacgatgcatgctttattgcatttgtcgaaagccctttgatccagaaaggatgattgcatgttatcattgtaatgagtggtatcactttgattgcatgaaattgccttgcacagaagatgtctacatttgtcctgcatgtaacccgtgtacagaaggattgccttcaaaccatgacagattaactagtggtaaatttgaggagcctaaaaccccatctccgaggcattcaaatcctagaaagaaacagaagagagatgtgcccagtctcacttgcaacatattcgctagcaggaatcaagataagcttaggtattcgagtgggatagaatgtctaaggtggcaaaatcgaaagcctttcagacgagcagctaagaaacgtgttgaacttcgaagtctttctccatttctatgcatacaacgatagctaaacataggagaaatcattggtcattaaattgattcaaatgatttttatggtgtcatctcggtcatttttaatccatcttaatgcgaaaattccatttttaatttcttgttcgcatttcaccatttgaaggcttgagttattaggataaagatggcgtaaattaacgtaggaagcattagttttatacagctgacaaaagtaggtaggattttttttttaatagaattcagttagtttttaactttttatggtggaaattagataaaacagtggtaacaatcattcatccattgttggattaaatcttcagtgtctgtaaataagatgatgtttacatttattttctaacaaataaattgtctccctttagttgttgttt

SEQ ID NO: 28774 - DNA, 1172 bp, Glycine max
  Clone ID: TF_GmC1740_1
ccccttttgtctgaacaagcaagttttcctcataggctcgcaatcggaaaccctaaccctaaccaattgcgataatctttccccaaaatggcaattgcacgcactggagtctacgtcgacgactatttggagtacgcgagcacattacccgctgaacttcagagactgctcaacactgtccgggaacttgatgatcgatcccaatctatgataacgcagaccaggcagcagacgaagtacactatggggttctcatcacatggctccaagaagggtaatcacagttataataacaattatgggaatgaggacgatgatgcagctattgagaaaatgcggaaagaaatcgaggtgaatcaggatagtgcattgagtctttgtactgagaaggttttgttggcaagacaagcatatgacttgatagatagccatataaaacgacttgatgaggatttaaacaactttgccgaagatttaaagcaagagggtaaaatagcaccagatgaaccagcaattctgcccccgttgcctatagtccctaaacctgaaaagcgtaaacccatatatgtaactcctcaatcaaagagaattgattacagggatagagattgggatagggagcgtgatagggactttgagctgatgcctccaccaggaagtcataaaaaggagtatgctaccccgatggatgttgaccaacccattgatccaaatgaaccgacatactgtgtttgtcatcaggtatcttttggagatatgattgcttgtgacaatgaaaattgccaaggaggtgaatggttccactattcgtgcgttgggctaacgcaagagacaaggttcaagggaaagtggtactgtccgacttgcatattactcccacaatgtcaacgatgaatctttgcacgaactaaattacattcataaatgaccactgtttcaatagaattgtcactttttagtgaattatttgtcttctatatcgcttggtcatttgtgcttggcaaagaggccaagtgggctctatcaggcctcatgtataaagtcttctaagatttgagagaagtgatttcagatatgaattttggagaaagttaattacatgtgaaatgcagaagtaaaaaaaaaaaaaaaaaaaaaaaaaaaaaaaaaaaagggcggcggcttcaaggcaa

SEQ ID NO: 28775 - DNA, 729 bp, Glycine max
  unsure (1)..(729): unsure at all n locations
  Clone ID: TF_GmC1740_2
atttaaagcaagagggtaaaatagcaccagatgaaccagcaattctgcccccatgncctatagtccctaaagctgaaaagcgcaagcccatatatatanactcctcaatcaaagagaattgattacagggaaagagattgggatagggagcgtgatagggacttcgagctaatgcctccaccaggaagtcataaaaaggagtatgctaccccgatggatgttgatcaacccattgatccaaatgaacctacatactgtgtttgtcatcaggtatcttttggagacatgattgcttgtgacaatgaaaattgccaaggaggtgaatggttccactattcatgtgttgggctaacgcaagagacaagattcaagggaaagtggtactgtcctacttgcatattactcccacaatgtcaacgatgaatcttcgcacgaactaaactacattcataaatgaccactgtttcaatagaattatcactttttagtgaatacataatatgtcggttttgaattatttgtcttctatattgcttggtcatttgtgtttggcaaagaaaccaagtgggctctaccagaacttgtataaagtcctctaagatttgagagaaatgattctagatttgaattttggagaagattaattacatgtgaaatgcataagtataggcgcgtgtggctgtataagaatgaagatattttgttgaaaattcttccaggtgagagagg

SEQ ID NO: 28776 - DNA, 726 bp, Glycine max
  Clone ID: TF_GmC180828_1
aattgatgctgtaaataattgcaagttagcacaaacatagaacaaagttgtcaagtcgattcatatttttcgttgagctcgaaaccaagctgtactgaccatagggcctaagctcttcaaaagagacttacaaaacaatcgacttgttacatgaaactgtacaaatacatacaaaagctatacactcaacccacaccaaaattcacagctatgttacatgaaactgttgcacagtcccttgctacagcttcatttctgcaagatgtgttgaatttacaggtctcgttagcttcctcaccaggtgctggtaattttttagtttcctcacggtacaagttgacacatcccatacaaacaaacttagaaggcattccatcagtattattatcaattccagcacatcttgtatgctgccaaacgccacaggtatcacatgctaacattttctctccgtcatcatccttagccccgcaagtgcaatccaccttccacacctctgttcctcgttccattcgaaatcgacttagcccatgtttagctggacatttaccttgaatttgaattgatccacttgttccaagcaagaaccttatggtgagcgaatcactgattgacccgtatcctagaagttcctcagcttgaaacctcttgtacattgcatacacctcttgaaatgcactagtggcttcactcctgaggtcaagcacggtagcattcaaaggcagc

SEQ ID NO: 28777 - DNA, 605 bp, Glycine max
  Clone ID: TF_LIB4280-014-R1-N1-B5
cagtattaagggaacaacttttttaatcaattacccttcttatataaccaattaaaataccggagaaaaaataaaaagaggggagcccaacaaaacccgttccaattaaacgagggggtaattgcattttgacccctaaaggggaaaaccaacaaatccaaaaattgcagcagtagggcctccgggaatgaaaaaaaaaaaccagcaaattgctagagtttatcaatcagggtgggccatttaaacccgtctgattggaaagccaatccctgacctgagtaaaaatggaaggggggataagaaaatggacgggggtaataatggcaacccatcaaaggggcccaaaagcttccttttggggaccccttcccttttttttgggctaaattcacccctaacctcctttgtgggcatgaaatccttaaaacgcttaacataaaaaaacttcactggcttcactataaaatcctttgcaccctcctccaaacatttgtttatgcggggaaaaacgttttcaaatgacataatacccacaggcgtttccttgaaagaaaaggatcccttgattctttggagaaattaataaccggtcattccgggcatac

SEQ ID NO: 28778 - DNA, 591 bp, Glycine max
  unsure (1)..(591): unsure at all n locations
  Clone ID: TF_LIB4164-020-Q1-K1-C11
ccacgcgtccgatggcattgatcttgtcctaacagaggtagctatgcctattttgtctggaataggtcttttgtgcaagatcatgagccacaaaactctgaagaatattcctgtgattatgatgtcatctcatgattctatgggtatagtctttaagtgtttgtcaaaaggcgcagttgattttttagtgaaaccaattcggaggaatgaacttaaaaacctctggcagcacgtttggagaagatgccacagttctagtggtagtgggagtgaaagtgcgacccacaccagaaaatttgcaaagtcaaagaagtaatgatgcatgtgaaaacaatagtgacagcagtgatgagaatgactatggaagcagaaacttgagcgttcgagatgggaagtggcactcagtctagtggtagtgggagtgaaagtgcgacccccaccaagaaaaatttgcaaaggtcaagaaataatggatgcatgntgaaaaacattagntgacaggcagtggtggaggaatgaactattgggaagccagaagacttggaaccgttccgagattgggaaagtgggcaccttcaagaggttcattgg

SEQ ID NO: 28779 - DNA, 1015 bp, Glycine max
  Clone ID: TF_GmC429772_1
gcacgagtgcgccagttgctcagttccatgttctggccgttgttcttcgccttgctgccggatggcggagtgagccgctcctcaactcctctccctttcccggtactgccgggctttctgctgctgaggctgtgcagggtcctggtttcgccgtggagatgtgtagtcgggtgcctcccccctgtgttgctcttctttccctgctggatctagttgttatcccgatcatatctgtctcctgttcccccgcaattcctggatttgcgtacatcataaaatttttcccaaattataaactaaatgtgattactgtggtgctccgggtatccagtattgtacctgaaataatgggatctgacctcagagataacataatcaaatgagatctttgcccacctttcatgacaacatctcacaccctgtggccgctgtcgttgcaaccttcaattacttgtatatcttccctggtttgattttagaaaaataataacatgaagttattgatttgcaggaatctaaatctcttaaagacataccagtggtgattatgtcctcagagaatgtcccagcaaggattaacagatgcctagaagagggagctgatgaattctttctgaaaccagttcaacagtcagatgtaaacaagctgaggccacatttgatgaaatcaaaagttaaggatggggaagaccaacaaatcagtaacaaaaggaaagaaacagaagaaagccattccccagataaaactaggacaaaaatggagcctcaaaaagtggttaatttcagttaaaaattgattataattgatacatcatagatgttccctagaaaattttcctatcctctgtctcaccaactaactagtgagaagagtagatggcatctcaatcatactaaagaaatgtgtagtataggcccctgacattaaacagaatttcatttcaaattcaattttgtctgacatataaattataaattgtttcagctcttaatcttatgtgactaatgcaaaaaa

SEQ ID NO: 28780 - DNA, 470 bp, Glycine max
  Clone ID: TF_LIB4165-030-Q1-K1-D7
ccacgcgtccgatttattacgcgtccttctttctctctcctttcaccatgtaaataaagcccaccattttccatttccatgtatctgtgtactttctattcttagaagaaagaagaaaactcacttttgtagagttcgagttcttattctcatggctattaccggcgaaattttccgacagagcataaaggaaatgcttgaggagtctccttccggtgcgccggaacttcaagttctcgccgttgacgacagcctcgttgatcggaaggtgatagagcggttgttgaggatttcttcctgcaaagtgacggttgtggagagtggaacgcgtgctcttcagtatctggggttggacggagggaacagttctctcgggtttgatagtgttaaggttaatctcataatgacggattattccatgccggggatgactggatatgaattactcaagaaaatcaaggagtcttctg

SEQ ID NO: 28781 - DNA, 476 bp, Glycine max
  Clone ID: TF_LIB3242-109-Q1-J1-E12
cggctcgagcgattcctgagttgcgttggtcttgggggggttacaaactcagcagcagaagaagaagctcctcaattggttaacctcaaattcgagtcgaactatgtaaacgccactttcggggcggggttggtggctctggtttggtggttgggctggtactggtccttaagtcgggttttcccagcctggattttaaccaccggaaggggtccctggtaacggcttctgggaggggtggttttaaattccgggaaggccgtttccgaccagtttcgggggggtttccgggttttggggggggacgatgacccacctggtttaaggatctttgagaagatgctccgaccgtccctttacgaagttccaaaatgcatcgagcaaaaactgctctctcactgcttagagagaacaaaaatgggtttgacattgttataagcgatgtgcatatgccggacatggatggattaaacttt

SEQ ID NO: 28782 - DNA, 664 bp, Glycine max
  Clone ID: TF_GmC161_2
cggtccggaattcccgggtttgacccacggtccgatcatcacagactattgtatgcccggaatgaccggttatgaattactcaagaaaattaaggaatcctccagtttcaaggaaactcctgtggtgattatgtcctccgaaaatgttttgccacgcatagacagatgtttggaggagggtgcagaggatttcatagtgaagccagtgaagttatcagatgtgaagcgtttgaaggatttcatgacaacaaaggaggttataaggggtgaattaagccaagaagaaagggaagggatcaacaagaggaagctattagacacctctgatgtgtcgccatcatcaccaccgtccatttcctcatcaccactcccatcgtcacccagctcagtgattgattctccaatcagacggcttaaaatgaccggcactgattgatattctctagcaattaatttgctgttttccttaattttctcattcctgtaggcactacagctgcaagcctgcaatgtctatctttataattataaatagtagtgtttttttcttcttctttggatttgttgttttactcttttagggttgaaattgcaaaccgttaattgtaacggtttttgttgcgcttccctcttcttaattatctaagttattttaattgtttaa

SEQ ID NO: 28783 - DNA, 1674 bp, Glycine max
  Clone ID: TF_GmC1062_1
gctcgtcatggagaagttattggaaaagctgcgctgtcgcactttgacagttaccaacgggtctgaagctatacggtatgccatgggcgaagtcaaatttgatgtcatcatgatggagtttcgactacctcaggtcaacggcgctgacgttgctcgtatgatacgagatacgaagaatgccaacacccataccccgatcgttgctgtcactggatatctcaaggaactacaggcgcctcactactttgatgcactcattgaaaaaccacctacagtcgccaagcttacggatacgctgagtaggctttgtcagtggaaagcgccgccgccgggctggacaccgaaccaagtttacccatcaatgatgccctcgggacttcgacaggagtcttcgcgtcaagaagatagccccacaacctcgaactcttccggctatccacctgtgccttctgccagctatcgaggctctagccgcgaagattctattagctccagcttctttggcgacaatgacagtcgtgcaggcgaggatatgtcggtgagagtgcacaacgccgacgattggagggagcgcgacatcgcgcgagccatgagtggtttgggcatctcggatgacgcagctaatgccgatcacaaaggagctattcctaaccgtatcggtgcacctgacctaccccacggagaatctgcaccagccgttcttgaagaggcaacgatccgccgtcagcgatcggcggagcaagtaggcgccaaacgtcgcatattagagacacgtaaacacgagtcagcagaatctggagatgacgaggacgatgagttaggtcacgcccctgttcgcacacgcagtccaaagacaagaccgaaatccacgtccaagcttggcattgagatgatgcgaacaaacagcagaggcagtgtgatttctgttgaagatgttgggcaagcggactcggcattaccctcatctccacctccaatgatcacagaagatcccgctgcggaggaacatgaaagcaatcttgacgcacccaccgtcgctccggtgcttcttacaccgccagtaatgttccctgaagaacctggcgacgatgttgccgactttgtcattgaaacacctaagtcgcacaaggatgcaactagtccagatccagatcctacacccaaagcgaagtctgccagaacaccagactctgaacccacaggactcgacagtgcgacagacacctaggcggtgccacgcctggcgtttggtacctgttcagtaaattgtacatttgatttcaaagcttaaacacacttttcgcagcaaggcgttggcggtgtgttcactgggtagtgtaccgggaaagtgccattccagcaagcccttgatgttatttcttatcctccacgctctgactagctgcccttagcagccatttgtgggctgtgtcgagcgcttctttttccaaattatgtctacatactcagcgttttctttcctttacacgtcaggtgtgagtttacgcttcgagagggggaactctcatcattcgctttcaacattgttacccagcccacacacgaagtgctcgttgggtccagactgtcgctcgtttctcagatcctgcttgtactaagtgtactactattgaatcaaatatctagaggccctcaggctctcgtgcattctac

SEQ ID NO: 28784 - DNA, 930 bp, Glycine max
  Clone ID: TF_GmC942_3
ccacgcgtccgggaaacacatgtaatttttttttatagaaaaaaatggtaagaaatgagggtagatttggaaaatgaaccatgattgaccatagtgagagactctttttctgcatattatgtggttcgtcaggagcgatggcaactgttcagtagtcacagacacccttcaacgaccgtagttaaacctcctaactcacttccccttccctcactctatttgctttgtcgagcttcaatggaataagagcagaaagaaaagaacacaactttgggcagagtagttggtggggcattttcttttcagccaaggtaatagctaggaaacaataaaaaaaaaggcttggaaaagaaccactttccgtgtgcatgctgattctaccttgattcatgtgttcagttttggagaaaagggatccagtgttgatcagcaatattgatctgttacttaactaggggaccgagtaagaatgccaaaccagctatggtttgcactgccaatgatttacaagaatggaaagatttcccaaagggacttagagttcttctgcttgaaggagatagtagttctgctgctgagataagagaacaacttgaggccgtggactataatgtttccactttctacgatgagaatgaagccttgtcagcactctcgagtagtcctgaaggcttccatgttgctatagtggaggtgagtacaagctgtagccttggaggtttcaaatttcttgagaattcaaaggacttgcctaccattatgacttcaaaggaccagtgcctgaacaccatgatgaagtgcattgcgcttggtgcagttgagtttctcagtaaaccactctctgaggacaagctcaaaaatatttggcagcatgttgttcacaaggcatttaatgctggggcaaatgtcctgtctgaatcactaaaacct

SEQ ID NO: 28785 - DNA, 477 bp, Glycine max
  Clone ID: TF_jC-gmro02910075c01d1
atgaaatactagataggcttataaattgggccttctgcacattgcacttctctatgcacacacaatagagcactagtatagctactaaatgagagtaagagtcaggaaaattggattacatttctagaatgcatatgtcaagctatgatttcttttatgtttatataataatatgcggaaaacttctatacatttctagttgcctgagccaaccctttgttagtttgatgggccttatgagagagaagtcaagatgttcttttagtgagtgaaagaatggtggacaccatcattttgaagtcaattggctttgttaagtaagcatccatgcccacctccaggcatttggcttcatcacatgacattgcatgtgctgtaagagcaacaatgggaatgtgcctgcttgttcccacttctgatttcctgatagcttttgttgcctcatagccatccatctttggcatctgacaatccatt

SEQ ID NO: 28786 - DNA, 478 bp, Glycine max
  Clone ID: TF_GmC103_3
gaatgccttaacgtcattggacctgctggttcttcctttcaagtcattcttttggatcttcacatgcctgagcttgatgggttcgaagttgcaacgaggattcccaagttcagaagccggaattggcctgtgattgttgccttgactgcaagcacagatgatttgtgggaaagatgcatgcaaattggcatgaatggagtcataagaaagccagttttgttgcatggaatcgctagtgaactcagaagaataatattgcagggaaatagtgtcatgtgaggattcatgctgcaagttaaagcacttgcaacatatcaagaaattaagttataaaaaaaattccagtcacatattccatagaatttggtagctcaaagaactctttggctcctattttccagcaatattccagcttagagatgttgtgttatagccctactttcataagaaaattaaatggtatacaaaatagttcctt

SEQ ID NO: 28787 - DNA, 528 bp, Glycine max
  Clone ID: TF_GmC1391_1
tataaacctgattataacagattactgcatgccaggaatgactggctatgatctgctgagaaaaatcaaggaatctaaatctcttaaaaacataccagttgtgattatgtcctcagagaatgtaccatcaaggatcaacagatgcttggaagagggagcagaagagttctttctgaaaccagttcaacaggcagatgtgaacaagctgaagccacatttgatgaaatcaagagcaaaggaagagcaagaccaacccttcaataacaaaaggaaggacatggaagaaatccattccccaaataaaaccagaataaaatgtagcagttaaaattggtttcaaattaaaaataaaaaaattgatgaaacataggtagtgcctataacattttcctcttctctcgcttgcttggtagtgaaaagttaggcagtcaataatcatgcaaaagggataaagagtacaagtcatttatgtaaatagcctgagaaagaattccattcaattttggtcatcaaatatcatttcatttt

SEQ ID NO: 28788 - DNA, 409 bp, Glycine max
  Clone ID: TF_LIB5118-045-A1-PF1-E9
tggagacgagtcggatgcgcaacagcgaagaggtgcgcctcctttcgaatgatccgcgttctcgtcatcgccaaagagggcggcgaagccgatcgcatcatccagagtctgcgggagctcccggggattgcgctcgaagctctgcacgtgacgtcgctctcggacgcaaggtcccacctgcgtgagacgctgttcgacgccatcgtgctcggtctcgagtcggccgatccttcgggcctcgacgacctgcaccggctgctcgagcgcgccagcgctcccgtcctcgtgctcaccgacagcgacaggcccgagctttactccgcggccatcgaggcgggcgctgcggagtgcatcggcaagggtgattcgccgctgaccatcttgtcgcgagcgctgttgcagcgtgtgc

SEQ ID NO: 28789 - DNA, 946 bp, Glycine max
  Clone ID: TF_GmC48369_1
aattcggctcgaggtgttttcctgcaaccattttcttccttcgtcggttgattggtgatgttgctggtgaccccagaagaaggggtagtgttgaatattatagttaagctttgaactttgaagtagtggcagaaatcattgacccttttttggcagacttacttgtttgtggtccgaaactgctgattgcaactgttcagtggtcacaggaagcaccaccctccaaagccagcacttaaaacctttccttctcttccgtctctcttctttacccttctgttttattaacaattcaataagaggagaaagaacactcagtttaattagcaatggaattgaagaagcattttcttttatgccaagaaggaattggatgctgataagtggtatcgattgatctgttattttctgtgggagactgagaaacgatgccaagccagctatggttttctctgccaatgatttacaagaatggaaagattttcccaaagggctcaaggttcttctccttgagagagacaacatttctgctgccgagataagggcaaagcttgaagccatggactacaatgtttctacattctgtgaggagaatgaagccttgtcagcaatctcaagtggactcgaaagcttccacattgccatagtggaggtgagttcaagcagtggccagggaggtttcaaatttcttgagaatgccaaggacttgccaaccattatgacttcaaacaatcattgcttgaacaccatgatgaagtgcatagcgcttggtgcagttgagttcctcagaaaaccactatctgaggacaagctcagaaatatctggcagcatgtggttcacaaggcattcaatgccagggcaagcatcctgtctgaatcacttaaacctgtcaaagaatctgtagtgtccatgttgcagctccaaacagacgatgaacaacatgaa

SEQ ID NO: 28790 - DNA, 1529 bp, Glycine max
  Clone ID: TF_GmC413_2
ctcttgggttctgatggttgttcttggatatgggttttggcagtgacggtggtggagagtggaagcagggctctgcagtatctggggttggatggagaaaaaagttccattggtcttgatgtgagcaaaatgcaaacttggcttttgaattgttaaaggcacttctttttagtgttttaaacaataggtcttacttggaagtgatgcttatgttgttattttgatgactgtttcggcagagtgtgaaggttaatttgataatgacggattattccatgcccgggatgacaggatatgaattgctcaagaagataaaggtgagaaatgagacatggtcgttcttgttttaatttcttgtcgaagatgaatgtattagaagagagaattgttaatgttttcctgatttcatagtggtggtttccccccttttctccttgatttttaattcttctatctgttaatatctgcaggagtcatctgtttttagagaggttccagtggtggttatgtcgtctgagaatatcttgaccagaattgataggtaagctcttgattaagataagatgctgtttggttcttctttggttttaggagatagaagcctttatttttctggctgatttctttgataaaattgcttgatttatgtgatgatatttactagattgtgatgatgtttgttgatttgcctatgctaatggtttggtgagctaaaatatcagaaagttgatgagttacacattgctgcatccgtatcttgttttcccggacttgattcacatctagacttgaattgcattgatgaaagacatgaatatgtttttggatatgattagatcacgtagggtttggacaaaataggtgtattttgggattaaagttgagagatcttaaaagtacttttaattcaaaagcaacaaatttttccttcatatgtttatacattggaattcacaaaagtacttttgtaactttaatccaaacatatatgagatcactgagggcttgaagtttggacacatcgatagatcacatggtgtttagtcatgcgaaaaagggagggagagtggagacaaggatatctgaggaaattatttaaagagtccaagggaatattatggtgaataattttgattttattagaggtcaatgatattgtgtatcctgtgtagttgatctcacctaatgggataaggttattgatgtcgtgttagatccccatgctttctcattataggttggttctagtaaaattcatctgttaagacttgattcatcaataatctcatcatgttagtcacatgcagcgttttggaaacatgttacttccaacttgcaattgtggctacaaggattgaaacatgatgaaatccagatttcctcttgcctaatggtcaactgttgtaaaggatcctgttggcatggcagcaattattgtcactataattgccacataattatacatctaatcaatacttctattcatctacacatgaaattattggccaacaccgttaggttgtgttcag

SEQ ID NO: 28791 - DNA, 894 bp, Glycine max
  Clone ID: TF_GmC1752_5
caaaaccaatcgttaacaacaagaaatcctgctggaagtggacttggcctggcaatttgtaggaggtttgtaaatcttatggaaggacatatttgggttgaaagcgaagggttagcaggacagtaacaaagggacttcttatgcatttaggatgtgatgtaaccacagcaagctcaagtgaagaatgtctgcgtgttgtttctctggaacatgaagtggtcttcatggatgtttgtgcagggttagatggttatgaacttgcaaatccgtatacatgaaaagtttactaaacatcaagatagaccactaatagttgctcttactggaaacaccaaaaaggtaacaaaagaaaactgtatgagggttggtatggatgcccttatattgaaacctgtttctgttgacaaaatgaggggtgttttatcagaactattggagcgccgagttctgttccaaagtgtttaccctgttagattgttgtacatagctatatcaaatttggagaagagcccaaacttatgaagcaatgaggcaattgacattagttgtcatcctttttgctgttttgagatcccggcaaaaggaacaacgattgagtctgcgttgttaaataattttttgtgaacacaagttcgtatatgttgtgtattctgcattttatagcagactttcgatgttttgcaatggcggtaaaattgcatttatactgtcctagactgttttgattaattgatttaagtttaattacttgttagatctctatacctgtatagtctttgttttagtctctacattcaaaatatttggtttagcccctacgcatatgtacctccgttcctatggataagacttttttcattttagtttttgtccctctttataagattatctacg

SEQ ID NO: 28792 - DNA, 573 bp, Glycine max
  unsure (1)..(573): unsure at all n locations
  Clone ID: TF_jC-gmfl02220070e12a1
ggctcgagctcgagccgaatcggctcgagaaaagattcaggatcaggaattaatccactagatatcccaaagatattcactaagtttgcacaaaaccaatcgttaacaacaagaaatcctgctggaagtggacttggcctggcaatttgtaggagggttgtaaatcttatggaaggacatatttgggttgaaagcgaaggtattgataaaggatgtacagtcacttttattgtaaaacttggaatcccagaccgatcaaatgaatttaagctaccttttgtacctaaagtaccgggaaatcatggatctacaaactttgctgggctcaaagttcttgtcacggatgacaatggggttagcaggacagtaacaaagggacttcttatgcatttaggatgtgatgtcaccacagcaagctcaagtgaagaatgtctgcgtgttgtttctctggaacatgaagtggtcttcatggatgtctgtgcagggctagatggttatgaactagcantccgtatacatgaaaagttactaaacatcaagattgaccactaatagttgctcttactggaaaca

SEQ ID NO: 28793 - DNA, 610 bp, Glycine max
  Clone ID: TF_GmC3451_2
acgtttgctaagccacgcctcgaggtggttgtgggcgaaagctgcttgccagaaactgagcaaagaagcaagtaaagggcggtttggaaattgttactattattttctctcttacatgtgttgaggatgatgatgaagtcaatttcattcactctgttttcttcttcttcttccttgtggccgattagggttattattctttctggctgtggaacgaaccatgctgttgttcgagaatggatgagttgaactgcgcgatgacgacgacgacgacgggagaatagcaatgcggagctggttcaatgggagaggtttctgccgcggatggtgctcagagtgctgcttgtagaagctgatcattccacgcgccaaatcatcgccgcgcttcttcgcaaatgcagttacacggttattgcagttccggatggattaaaggcatgggaaacattgaagaagaaggcatctgagctagatctcatattaacagaagtggagctaccagcaatatctgggatttgctcttctttctttaatcatggagcatgacatttgtaaaagcattcctgtcataatgatggcttctcatggatccgtttacatggcgtttgaa

SEQ ID NO: 28794 - DNA, 438 bp, Glycine max
  Clone ID: TF_14999708
ctttctaatcccccccctctctctctcacacacatcacgcattgtgtgtaatgataaatataaacgaattttcaagtagataagttagctaacaggttaagaagattgtttatctgaacactacgtactgagatggagcttgtgaatagccaaaagctaaaacaacatgagcagcaacagcattttcatgtgttggtggtagatgatagtgtcatagataggaagcttttggagaggctcctaagagattcttcatgcaaagctacctttgtggattctggagacaaggctttgaaatttcttggcctgcttgatgatgaccttgataattcttcctcaacttcttcggaatcattgcaactaaacggaatcaaagtgaatatgatcatgacagactactgcatgccaggaatgagtggctatgatttactcaaacga

SEQ ID NO: 28795 - DNA, 652 bp, Glycine max
  unsure (1)..(652): unsure at all n locations
  Clone ID: TF_GmC597_3
actcaattcagccaacttttcagatattttcactgctcaacttaagactaagcatgagccgcaacttgtttgaaaatgggtgaagtgccggctgtattcgatgcagacgacgcaaggggaacagagcaacaatgcctccgctgttcattgggagcgctttctgcctcggatggtgcttcgggtcttgcttgtcgaagctgatgattctactcgacagatcattgctgcacttctccgtaaatgcggttacaaagtgatgtcttctcatgattcagtaagcatggtgtttaaatgcatgttaaaaggtgcagctgattttcttataaaacctgttcgcaagaatgagctaagaaacttgtggcagcatgtatggagaagacacgccataagcaggcctcctcaaaatttaacactgccggagattgaacttggttttgctgcagaaaaccatgctgcaagcaatgactctagtggttctgtggcttctacaccaaaagatgatgaatgcagtgagaaaacangtgaggctcatgatatattgcagctgaagagctcttcaaatctgagcaatattgacacagtgaagcatgaaaactctaccaaatgtgaaagggagtcagactagcataatgatgaagcttgagagaaatca

SEQ ID NO: 28796 - DNA, 403 bp, Glycine max
  Clone ID: TF_LIB3087-003-Q1-K1-B2
cactcttttattattattattattattattattattattattattattattattattttgggtttgactactttcatgatgccagtttcaaccatgtgaagttgttgtgcgtgctgtgtttgttgttgtgtactgttttggacctttataaccaaccatgaatctcagcaacggcaagggatccacttttagttctcctctgaaagccggagattctgtctctgaccagtttccggcgggtctccgtgtgctcgtggtggatgatgactccactcgcctcatgatccttgagaggatgctccgtgcttgtgtctattaagtgactcaatgccagctagctgaggttgcattgtctctctagagagagaacaataacgggtttgatatcgttttaagcgatgtg

SEQ ID NO: 28797 - DNA, 956 bp, Glycine max
  Clone ID: TF_GmC161_1
gaggattccttcgtctctgtctctgtctttcttactctctctctctctcccgtctttctctctctgttcactttttctatcctcgaagcaagaaatggactctaacagcgtcgtttcttggccgaggatgccagaaaacatcaacggtttcggcctcaaacagaaccaatccgaagaggttcatgttttagccgttgatgacagcaccgttgatcgcaaagtcatcgaacacttgctcaaagtcttagcctgtaaagttactgctgtggatagtgggctgagagcactgcaattgcttggactattggacgagcagaaaataccctctgaaactaatggttttgtgggtttgaaggtagatctaatcatcacagactattgtatgcccggaatgaccggttatgaattactcaagagaatcaaggaatcatctactttcaaggaaacgcctgtggttattatgtcatctgaaaacgttttgccacgcatagacagatgtttggaggagggtgcagaggatttcatagtgaagccagtgaagttatctgatgtgaagcgtttgaaggattacatgacaacaaaggaggttaggggtgaattaagccaagaagagagggaagggatcaacaagaggaagctattggacacctctgatgtgtcgccatcatcaccaccgtccatttcctcatcaccacttccatcttcactcagctcagtgattgactctccaatcagacggcttaaaatgaccaacactgattgatatactctagcaatttgctgtttttcttttctcattcctgtaggcactactgctgcaatctttggatttgttgtttttcccttttagggttcaaattgcaattacctcctcgtttaattgtaacggtttttgttgcgctcccctcttcttatttttagtcagttattttaattgtttatatatgaagggttaa

SEQ ID NO: 28798 - DNA, 2089 bp, Glycine max
  Clone ID: TF_GmC1876_1
cggaattccgggtcggaccaagccttccggtggctatgaagaaaggagtagatattgtgttggacccttgcaatggttctgtactcagatattcgcgcacgaaaggccacagaggaaaactcaaacaagttttgtgcaatttactgagcaatgctgttaaatttaccgaggaggggcacatagctgttcgagcatgggctcagaagccaagcttgcagagctcaatgattgctactcaccaatacgggtccagtagacttttgtcgcgcttgtgttgccgccaaaatgaagcacgtgatgacgtggaagacttgaacatccaacaagatccaaattgtatggattttactattgaagtggatgacactggcaaaggaattcctaaagagaagcacaagtctgtttttgaaaattatgtccaagtcaaagaaactactcttggccaagaaggaactggcttgggacttggtattgttcagtcactggtacgtttgatgcatggagatattgaaatcatggacaaggatattggtgaaaagggaacctgctttaggttcaatgttctcctcactgcccatgagacacagatgaatgatgacacaagagatgaccaagttggatcaggtaacaaaaatcaatctcatggactaaccatgagtcccaagttatctatttggacccgtagtcctagatccgaggcttctcgagttgttttattgattcaaaatgaggagcgtcgagggactacgcagaggttcatggagaggttagggatcaaagttaaggttgtgaaggagtggagacaacttcattacactctgaagaagatcatcaaacaaaagggtctccatccaaatagctcaagctcgccagagtcttcagattctccctctgcatcaagctgcacaaacggagtccctttgagtgcacaagatggaactaattacataagttcaatcttcaagagaacagatattgaagcttcgtcgggttttgtcctgattgtgattgatgctaatgcaggacctttttcagagctttgcaaagtggtagctgagttcaaaagaggcctttgttatccttgtagggtggtttggttggagaatccacttataccttctgtggacaacaaaatccttaacaaggatgtttctaattctaatgacattgtcttgtctaagccacttcatggtcatcgtttattccaagtcataaggattctccccgagtatggaggtgtttggccatgcaattctagtgaaacaaagaaagaaaagggtcaagtttccttaactaatgaaggtgcaattcgacgtgttgaactacaagagtgtggcagctcaagcgttacacagcaatcttatgatagatctagagcaagaaaatctcatatccaccaaggagaaatacaagaatgtgaagagtcaagcaatgaaaaacccttgtggggtatgaaatgtttggttgttgaggacattgttttgttacgtaggataactaagtctactcttgatcggcttggtgcttctgtcatggaatgtgagaatggtgaacaagctgttcagacagttgaagagggtctaactaggaattcttccaatcgtccatgtgatttcatcttaatggactgccagatgccggtaatggatggatatgaggcaacgagacggataagggagattgagaagtctcatggtgttcacattcctatctttgcattaacagctaatacagggaaagaggcaatattgtccattgaagctggaatggacgatcacttaatcaaacccatcaacaaagaggctttacttaaagccatcaaaagaatatatacttaagagtgaacagtaaatcttatcttttttaattgctttatatgattgttatcaagtttttaaattaaacaatgacaggagatatctttttacaccactaactagcctatatataaaacagaaatagtaaataaataaataaagcattcatgtgtcattgtttaatttgacaatttgatggtaatgacattaaaaaaaatatttttaagtattgtccttttctttaattgtttatagattttttttgttttttt

SEQ ID NO: 28799 - DNA, 2947 bp, Glycine max
  unsure (1)..(2947): unsure at all n locations
  Clone ID: TF_GmC1752_1
ctgcttttcatttctttacttctctctctctctctgttctgctcttgtcctgcttttccatccatttatgtgaaaaaggaaaaattgcctgaggtggttcaatcactatggaatcctgcaattgtattgacccacaagtgccagctgatgacttattgatgaaataccaatatatctctgatttcttcattgcccttgcttatttctcaatccctttggagcttatctactttgttaagaaatcagcagtatttccatatagatgggtccttgttcagtttggtgcttttatagttttatgtggagcaacacatctaattaatttatggacctttagaattcattcaagaactgtggctgttgtaatgaccactgctaaggttttaactgctgtggtatcatgtgcaactgccctcatgctggtacatattattcctgatttattaagtgttaaaactagggaattatttttgaagaacaaggctgcagagcttgatagagaaatgggcctgattcgcacacaagaagaaactggtcgacatgttaggatgttgactcatgagattagaagcactcttgatagacacacaatattgaaaacgactcttgttgaaatgaggtagaactttggcactagaggaatgtgcgttatggatgccaacacgaactggtttggagcttcaactctcttacacattgcgacagcagaacccagttggatacacagtacccattcatcttcctgttatcaatcaagtatttagtagcaacagggcagtaaaaatttcacctaattgtccagttgctagattacgaccttatgctggaaaatacatgcctggggcagtagtagctgttcgagttcctctcctacatctttctaatttccaaatatatgattggcctgaggtttcgacaagaagttatgctttgatggttttgatgcttccatcagatagtgctagacaatggcatgtgcacgagttagaactggttgaggtagttgctgaccaggtagctgttgctctttcacatgctgcaatcttagaagagtcaatgagggcaagggatcagctcatcgagcagaatgttgcattagatctagcaagaagagaagcagaaactgcaattcgtgctcgtaatgactttttggcagttatgaaccatgagatgagaactcccatgcatgcagttattgcactctcttcattactacaggaaacagatttgacagctgagcaacgactgatggtggagacaatattgaaaagcagcaatttgttggctaccctcatcaatgacgttttggatctttcacggcttgaagatggcagtcttcaacttgaagcagcaacatttaacctccattctttgttcagagaggtccttaacttgattaagcctgttgcatctgttaaaaagttatcactcacttcacatgtagcctcagatttgccaatgtatgccattggtgatgaaaaacgtctcatgcaaactattctgaatgttgttggtaatgctgtgaagttctcaaaagagggttgcatttccatcactgctttcgttgcaaagcctgaatcctttagagatgctagaattcctgactttcttccagtgccaagtgataaccacttttatttgcgagtacaggtaaaagattcaggatcaggaattaatccacaagatatcccgaagttattcactaagtttgcacaaaaccaatcattaacaagaaatcctgctggaagtggacttggcctggcaatttgtaggaggttcgtaaatcttatggaagggcatatttgggttgaaagcgaaggtattggtaaaggatgtacagtcacttttattgtaaaacttggaatcccagaccgatcaaatgaatttaagctaccttttgtacctaaagtaccaggaaatcatggatctacaaactttgctgggctcaaagttcttgtcatggatgacaatggggttagcaggacagtaacaaaaggacttcttatgcatttaggatgtgatgtaacaactgcaagctcaagtgaagaatgtctgcgtgttgtttctctggaacatgaagtggtcttcatggatgtttgtacagggttagatggttatgaacttgcagtccgtatacatgagaagtttacgaagcatcaagatagaccactgatagttgctcttactggaaacaccaaaaaggtaacaaaagagaactgtatgagggttggtatggatggccttatattgaaacctgtttctgttgacaaaatgaggggtgttttatcagaactattggagcgccgagttctgttcgaaagtgtttaacctgttagattgttgtacatagctatatcaaatttggagaagagcacaaacttatgaagcaatgaggcaattgacattagttgtcatcctttttgctgttttgagatcccggcaaaaggaacaacgattgagtctgcgttgttaaataattttttgtgaacacaagttcgtatatgttgtgtattctgcattttatagcagactttcgatgttttgcaatggcggtaaaattgcatttatactgtcctagactgttttgattaattgatttaagtttaattattttaatattactaaataaattaaattgttgtaaatcaagagagtttaatttaattggttgaacgtagtgtatgaacctccgttcctnnngataagacttttttcatttnngtttttgtccctnngnnaanaaaaaaaaaaaaaaaaaaaaaaaaaaaaaaaaaaaaaaaaaaaaaaaaaaaaaaaaaaaaaaaaaaatatgatttaaaaaaatataatattaattattatgagaaagaaaataaaaaaaaaaaaaaataaagggggcgcccctttttagagaaccaagtttaaatacccgggcatggaaaagtaaaaatttttttttttgggcccc

SEQ ID NO: 28800 - DNA, 829 bp, Glycine max
  Clone ID: TF_GmC123982_1
aaaaaacatactgagagagagagagagagaggtaaacgaggacacagtagtaccatttattcctctgcttatttattagctatcagcaacgcttcgcatggctgcaggttcttcttcaaattgggtcatggaaagtggtgatgttcctcatgttttggccgttgatgacaaccttattgatcgcaaactcgttgagaaactcctcaggaattcttcttgcaaagttacaactgcagaaaatgggccaagggcattggaattattgggcttaacaagtggtggacagaacaccatgaacggtagatccaaagtaaatatggttatcacagactattgcatgccagggatgacaggctacgagctacttaagaaaatcaaggaatcgtcggtaacgaaggaggttccagtagtgatcatgtcatctgagaacataccaacacgaattaacaagtgtctggaagaaggagctcagatgttcattctaaagcccctcaaacaatctgatgtaaaaaaactgacatgtcagttaatgaattgagaaagtgagatttgacttttaagagagtataagctaagcaagaaggcaaactctatgagatctgtggtctggtaatgtgagcagcattccagaaccctgcacttgtcatggctgtctattgctaaaatctatattatataggccttaccctctaattttagtactagttcaggtgtaggaatgcgtttcattgttttgaagatgctttactttctttctttcactctttcttgtattgacctacatattccattttattttcctagaaaataattcatgttcttttttttc

SEQ ID NO: 28801 - DNA, 446 bp, Glycine max
  Clone ID: TF_GmC191_3
attttcaccttttcacaaatggggatggctgcagagtcacagtttcatgtcttggctgttgatgacagtctcatagataggaaactcattgagaggctcctcagaacctcttcttatgaagttactacagttgattctggtagcaaggctttagagtttctggggttgtgtgagaatgatgagagcaacccaagtacaccatatgtttgtcccaacaaccatcaggaggtggaggtgaatcttgttataacagattactgtatgcctggcatgacaggctatgacttgcttaagaaaatcaaggaatcttcatctttgagaaacataccggtggtgattatgtcatctgaaaatgtgccttcaaggattaacaggtaagaaggagaaatatttcagtactttttttaaaaaaataaaattggaaataaaaacaaaaaaaagggcgg

SEQ ID NO: 28802 - DNA, 699 bp, Glycine max
  unsure (1)..(699): unsure at all n locations
  Clone ID: TF_GmC690067_1
ctcgagccgtgaatttagtctcagaattttgagaaagagttctcattcagtggtgttaggggacctaaaaaagttacggaatggcacatcaaaacttgggcaccaaattaacagcacttgtagtagatgacaataaaatcaaccgaaagattcatcaaaagctgttggagagtgttggaatgaaaaatcaaggagtggaaaatggccaagaagcagtggacattcattgccatggacaaagattggacctgattctcatggacatggatatgcccatcatgaatggcattgaggcaacaaaggaacttcgctcaatgggcattggtagcatgattgttggtgtatcatcacgctgtacggaagcagaaatacgaaaatttatggaagcgggactgaatgactaccatgagaaacccttgaacaattctaagcttagttcacttcttgataagatcaaccccagttttactcgtaattagtggaaatttcaaccgggtaatgtatgaaaaagcaaagaagaaaaaaacttaaccttacccgttccttgtttccaaattccatggctagtttttcctctctttttttctttttcttttggtgattctgtagttctttttttactatggtgaagtgtgtgactacgtannngnntaccaatgttacacaaaaataaagaannnannnnnnncataactcctg

SEQ ID NO: 28803 - DNA, 1840 bp, Glycine max
  unsure (1)..(1840): unsure at all n locations
  Clone ID: TF_GmC1886_1
aggaaaagacatgcnnnntggttttnnncatagnttnnnnnatgaaangaanattttgntnnncgatgacaatggggtaannnnnngagttgcagcaggtgcactgcacgagtttggtgcctctgtgctgtggggaagaaagggtgctagttcatgtgaggaaaattgggatatgcttgcatggacttggggaaaccatctaaatagaggctacacattttgcagatttgaagcaaccagccgaattcggatgatggagagcaaggcaaatgaggagatgaataatgggaatgagtggcatgtgcctatactggccatgacagctgatgtgatccatgctacatacgacaagtgcatgaaatgtggcatggatggatatgtctcaaagccatttgaggaagagaatctgtatcaggaagttgcaaagtttttcaaatcaaaaaccatgtcagattcatgacaaatgtgcttccttacttggcaaccaactagatgattggatttggagacaacacattttagtttgatcactgctagcactttcatgtcacatgtaacttgttacttttgctttcttgcatagagtaacacttgtttttgcaacatatttgagttgagttcgttgagggatcattactattactaatcggctgcagtttggcattattagagtaaaatgtataccacgccacaccccccaattgtgtacagattctggctcagggatgactggagtggagggcattttcaatatatgaaacacaatggtcgtacgcttaagatgcctaaaatgatccttctggcaaccaatattagtagtgccgaatttgataaagctaaggccacgggttctactgatactgtgatcaagaagcctcggagagctagtatggtggctgcttgtcttcagcaagttttgggtatggggaagaagaggcagctagggaaagacatgcctaatggttttctacatagccttctctatggaaagaaaattttggtggttgatgacaatggggtaaaccggagggttgcagcaggtgcactaaagaagtttggagctgatgtgaagtgtgctgaaagtggcaaagtctcttgaaatgctgcaattgcctcacaattttgatgcttgcttcatggacatccaaatgccagaaatggacggatttgaagcaactagtagaattcggatgatggagagcaaggcaaatgaggagatgaatggcagtgagtggcatgtacctatactggccatgacagctgatgtgatccttgctacgtacgacaagtgcgtgaaatgtggcatggatggatacgtctcaaagccatttgaggaagagaatctgtatcaggaagttgcaaagtttttcaaatccaagaccatctcagactcatgacaatgtgctttgaacttggcaaccaactagaagattgattggagacaacacattttagtttttttattttatcattactagcactttcacatgtcacttgtaactagttacttatgcatgctctcatgcctagagtaatgcttgttttcctaacatctttgagttgagttcgttgagggatccttacaattaccaaccggctgcgtttggcattattagagtaaatggtataccacgctacaccccccaattgtgtacagattttgggtaagggatgagtgaaattatgtaaattcaatgtttttccccatctcgttacttccccatcagaaggtttttatagcaatagctttttgtgtaaaggcatcttgtattgtaatagatttggtcattatgttaaaaaatgcatgcttatgtgtagtgtagcatatctttggtgcatg

SEQ ID NO: 28804 - DNA, 714 bp, Glycine max
  unsure (1)..(714): unsure at all n locations
  Clone ID: TF_GmC73999_1
tggccgcagacagagagaaagacactttcactgaaattctaaaagaataaaagatttgtgttttgtatttttatgttgaattgaatccctcgttgttttttgtcagtcactgtcatagtccaatttgtgcggttggttttgttaccctccctctccagcctttttcttgagtttctctatctctctctcactcctttttaatttttaataatttgtttgtctgttgcgtgaaagaggccctgaaaacaaggtttctgctgtcaagtttggagctttttgctctgtgattggtngtgttctccaaacaatgcttcattcctccaaataatgcttcattcctcatctgggtacttggttctggtttaagatgggggtgggtgaccgttttccggtgggtatgcgtgtacttgccgttgacgacgacgaaacgtgcctctcagttttggagaacctgcttcgcaaatgccagtataatgtcactacaactaatcaggcaattaangcgctagaaatgttgaggaaaaacagaaacaagtttgaccttgntattagcgatgtaaatatgcctgacatggatgggtttaaacttcttgagctagtgggacttgaaatggacctacctgttattatgttgtcangataccgtgataaaagagcgggtgatgagaggtgtatacanggtgcttgtgactacttaaccaaccagntcgaatt

SEQ ID NO: 28805 - DNA, 2884 bp, Glycine max
  Clone ID: TF_GmC360_1
gcgagatattgtgtgcttgcttagagaggttttggttccgcagaagattctgaattctgatgctctagtgcgattccatgggagaggtggtcatcatgagtggagagaagaagtcagttagagtggagggggtggagaaggaagatagtggtggaagtgggagcaaggctggtgaatttaaggggttgatgaggtgggagaagttcttgcccaagatggttttgagggtgctgttggttgaagcagatgattccacaagacaaattattgccgcgcttctcagaaaatgcagctacaaaggttatgtgatggggatctgggttcaatgaaagtctaaggatctaatggctcctttccacttgctttaagagtcttggcagtctggaaactacaggcttacatgatagtgatacaattattttcttacatgatatgattattttcagttgtctatttgccataaagaatttctattattgacctttgttcttgtatgaaacttttaatgtgagaaaatgaagtacttgaaactaatttacacaatattagaacttcaaaataactttgctcatctgctttgagcagtggttgctgttcctgatggcttgaaggcatgggaattactcaagggaagaccgcacaatgttgatctaattctgacagaagtggatttgccatccatatctggctatgcacttctcacattaattatggagcacgagatttgcaaaaacatccctgttataatgatgtcttcccaagattcaattagcacagtatacaaatgcatgttgagaggtgctgctgattatcttgttaagcctattagaaaaaatgaactgaggaacttgtggcaacatgtttggagaagacaatcatcaaccactggtattaatggcctccaagatgagagtgttgcacaacagaaggttgaagccactgcagaaaataatgctgctagtaatcgttcaagtggtgatgctgcttgcattcagagaaatatagaactaattgagaagggaagtgatgcacagagctcttgtaccaagcctgactgtgaagctgagagtgaccctgtcggtaacatgcaggaattttctctgctgaaatgtggggaagcatatccaagtggaacagagacacaacaggttgaaacaagctttcgcttaggccagacattaatgatgcatgactgtcatgctggaggattaaatgtgagtatccgcaaaaatggtgaggcaagcacgactaatgacaaggatactgatacagagcattttgggaatgctagcatcagtggtgaggctcatgacaatccctatgttcaaattaactcttccaaggaagctatggacttgattggagcatttcatactcatccaaactgttccctgaaaaattccacagttaattgcacaggcaactttgaccattctcctcaattggatctttctttgagaagatcttgtcccggaagctttgagaataaactcactgaagaaaggcacaccctgatgcattctaatgcttcagctttcaagcggtatactaccaggcaattgcaaatatcaatgcctgcagtgttaattaacttctctgatcaacaaagagaacagataacaaattgtgagaaaaacatctcacacatcgctactggcagcaactcagatagttcaacacctatgcaaagatgtattgtgtctccaactacagtccaatcaaaagaatctgaacttgcaacctcacaccccccgcaaggacattctctcccaattccagtaaagggtgtaaggttcaatgatctatgcacagcctatggttctgtacttccttcagtgtttcatacacagtcaggtccaccagcaatgccaagtccaaattcagttgtgctccttgaaccaaactttcaagtaaatgcattttatcagtcaaatatgaaagagagtagttcagagcagctttatgaatctcgtggtccaaatggaaacaccacccaaaaccacattgtgtacacacaggagcacaaatcagaacatgcagaagatcgaggacatatctctcctacaactgatcaaagtgtgtcaagtagtttctgcaatggaaatgcaagccatcttaacagcattggttatggaagcaactgtggaagtagcagcaatgttgatcaagttaacactgtctgggcagcttcagagggaaagcataaagacctcacaaataatgcaaactctcatcgatctatccaaagagaagcagctctaaacaaatttcgcttgaaaaggaaagagagatgctatgagaagaaggttcgatacgagagcagaaaaaaactagcagagcagcgtcccagagttaaaggacaatttgttcgtcaagtgcatcctgatcctcttgttgcagaaaaagatggcaaagaatatgatcattcagatttctgactcactggagaggagagcatgaattccttagagtatatagttgcttcaaaattttgttttcctgaatccttaaataccagaagcacttaatctgtatatgctttctaaaaccgtttttcttatttgcccttactgtagatcgtgatatataatatacctgatgtattatatcattgtaattttacagtcttatagggatcttcgtgcatcattatttatttatttatttatttataaggagttgtttacttacaacttacaagttacaaggaccgactgatttatcttgtaagagtttttacatagtaccatagcattatgattttttataataactgccactaccagttaacttttatattttattcaaaatttgcacctttattttcaagggagggggggggggggggggggggggggggggggggggggggggggggggaggg

SEQ ID NO: 28806 - DNA, 685 bp, Glycine max
  Clone ID: TF_GM342L02.C273.o1.fg
gtatcataattattgggagctagagaccctaagagaagaagacgatttagtgattgctgaaagtttagctaatgagctatctaaatggaattatgaggtgcatgtggttgataattttgaaaagataatggaagattttcgccgagtagaaccacaactcgtattattagatatcaatctaccaacacttaatggcttccattggtgccaagaaatgcgaaaagtatctcatgtgcctattatgtttattagttcaagaacagataatatggatcaaattctggctatccaaatgggtggcgatgattttatcgagaaaccatttaacttgtctttaacagtagctaaaattcaggcactattgcgtcgcacttatgatttatcaatagctcgtgatgaaatagctgttaaaggttgtaaactaattgttgatgaggccaagcttagcaaggataatgaacatgttcaactttccttaacagagctacagatattaaaattgttatttcaaaatgaaaataaatatgtaagtcgtacagctttaattgagaagtgttgggagtctgagaattttattgatgataatacgctcgcagtaaatatgacacgattacgaaaaaaattactttctatcggtgtcgatgatttaattgagacaaagaaaaatgtaggatacagggtttga

SEQ ID NO: 28807 - DNA, 2940 bp, Glycine max
  Clone ID: TF_GM459L07rgnA2.C1.o8.ma
atgggtggtggaggtggtggtggtagcaagatgtggcacaaaaaatggtgggagaagatctcagggcagggttgcaaaatccaccaacagtactaccagtatattggctccaagaaagttaagagagcgttgtggaggaagcttttgctgacatgggtagtgggttggttcatagtatctttgcggatcttctgctacatgagctcgcaaggtactgagaagaggaaagaaactcttgcaagcatgtgtgatgaaagggctaggatgctgcaggatcagtttaatgtcagtatgaaccatatccaagccatgtccattctaatctccactttccaccatgctaagagcccctcagccatcgatcagaaaacttttgcaaagtacacagaaagaacagcttttgagagacctcttacaagtggtgttgcgtatgctgtaagggtgctccattctgaaagggaacaatttgaaaagcagcaaggttggactatcaagaggatggatactctagagcagaacccggttcataaggacgattatgccccagaggcactggagccatcccctgttcaggaagaatatgctcctgtcatctttgcacaggatacaattgcacacgtgatttctgttaatgtgctttctggaaaggaagaccgtgaaaatgtgctgcgtgcaagagaatcaggcaaaggggttttaactgcgccctttaggctgctcaaaacaaatcgactaggggttatcctgacctttgctgtttacaagagagatctcccatcaaatacaaccccaaatgaaaggattcaagcaactgacgggtatcttgggggagtctttgatgttgagtcattagtggagaaattacttcagcaacttgctagcaagcaaactgtaattgttcatgtatatgatactacaaatcgtactcatccaattgccatgtatggctcaaatgaatcaggggattttttctatcacgtcagcactcttaactttggagacccttttaggaagcatgagatgcactgcaggttcaagcagaagccaccatggccatgggtggcaataactacttctattggtatccttgttattgcactccttgttggatatattttccatgccactgtgaatcgaattgccaaagtagaagatgattaccgtgagatgatggaacttaaaaaacgagctgaggcggctgatgttgcaaaatcccagtttcttgctactgtttcccatgagatcagaacaccaatgaatggtgttttggggatgttgcatatgcttatggacacagatctagatgtaacccaacaggaatatgtcaggacagcacaggaaagtggaaaagctctggtgtcacttataaatgaggttttggatcaggctaagattgagtttggtaagctagagcttgaggctgtgctcttcgacatacgggcaattttggatgatgtattgtctctattttctgagaagtctcaaggaaaaagagtagagttggcagtttatgtgtcagatcatgttcctgaattacttataggtgatccaggaagatttcgacaaataattaccaatctcatgggtaactcaattaagttcacggacaaaggacatatttttgtcacaatccatcttgttgaggaggttgtccgttcaatagaggttgacaaagaatccaactcagaaaataccttgagtggttcgcccgttgctgatagtcgccggagctgggaaggattcaaggctttcagtcaagagggacctcttggttccttctcatccccctccaatgatcttgtcaatttgattgtatctgttgaagatacaggtgaaggtattcctcttgaatctcagccactcatcttcaccccattcatgcaggtaggttcatccatctcccgaaagcatggaggaacaggcattggcctaagcattagcaaatgtttggttggcctcatgaatggggaaattggatttgtgagcatacccaagattgggtccacattcacttttactgctgtattcaccaatggacaccgtagttcaagtgagtgtaaaattcagcaaatcaacaaccaacctcagtctgcatcttcagaatttgaggggatgactgcattaattattgacccaagatctgttagagcagaagtgtctggatatcacatccaacggcttggcattcatgttgaaatggtttcagatttaaaacaaggtttgtcaaccataagcaatgggaatgtagttgttaatatggtcctgattgagcaggaggtttgggatagagatttaggcttgtcatctcactttgtcaataacacgaggagaattgatcatggggttcctccaaagctgttcattcttgttaattctagtagttcttttaaagctagcgtaaacttgggtgttcataatcctactgtgatcaccaaacctctgagagcaagtatgcttgctgcctcactacaacgagccatgggtgtccaaaacaagggagctcctcatagagagctccaaagtttgtctcttcgccatcttcttcgtggcaggaaaattctaattgtagacgacaatggtgtgaaccgtgcagtagcagctggtgcattgaaaaagtatggagcagatgtggtttgtgttagcagtggaaaagatgccatctcttccttgaagccaccccatcagtttgatgcctgtttcatggatattcaaatgccagaaatggatggggagatggaagatagtgtgaacagagaagtatctatggatgactttgagaatattacaaactggcatgtacccattttagccatgaccgcagatgtgatacaggctacacacgaggaatgcctaaggtgtggcatggatggatatgtttcaaaaccatttgaagctgaacagctgtatagagaagtctcacggtttttccagtcatcttga

SEQ ID NO: 28808 - DNA, 725 bp, Glycine max
  Clone ID: TF_jC-gmXLIB3563P009ca05a1
caacaaccaacctcactctgcatcttcagaattcgaggggatgactgcattaattattgacccaagatctgttagagcaaaagtgtctagatatcacatccaacggcttggcattcatgttgagatggtttcagatttaaaacaaggtttgtcaaccataagcaatgggaatataattattaatatggttttgattgagcaggaggtttgggatagagatttaggcttgtcatctcattttgtcaataacacaaggagaattgatcagggggttcctccaaagctgttcattcttgttaattctagtagttcttttaaagctagtgtaaacttgggtgttcataatcctattgtcatcaccaaacctctgagagcgagtatgcttgctgcctcactacaacgagccatgggtgtccaaagtttgtctcttcgccatcttcttcgtggcaggaaaattctaattgtagatgacaatagtgtgaaccgtgcagtagcagctggtgcattgaaaaagtatggagcagatgtggtttgtgttagtagtggtaaagatgccatctcttccttgaagccaccccatcagtttgatgcctgtttcatggatattcaaatgccagaaatggatggatttgaagctacaaagcgagttatggagatggaagatagtgtgaacagagcagtatctatggatgactttgagaatattacaaactggcatgtaccca

SEQ ID NO: 28809 - DNA, 2155 bp, Glycine max
  Clone ID: TF_GmC103_1
ggctcgagaataatctataatgtatataggttttctttatagattttgttaacttatttggttaatcattttttaatgtctcaggagggatgtttactgatttttctaatttgttcaagccaaggtcctttaagtgccaatgatcagtatactatatatatcccaggaacagtgaaagtactagtttctatgctcccaattttttttttctctccattgattttgtgctttgcttgtctactatgttactgccagttgatgcaagggaacatatggttagtaccaaatgctcaaggttttcctcaagtcatggccctttttcttcggtttcaactgcggcggtctattgccgtatccatctctgaacctggggaaaattctgagccatccaattcaaattctttctttagaggtctgccaggatgcttgtttgtccatgtttttcatagcttggtgtgacaaaaataactgaatttggttattttgtttcgggttttcattgttcatcttctcgtccctgatctgtttggggcccagctctggggagtggggggggaggcgcgctatcgtgctttgctaccccctacaagggttgctttgttcgcttccccggcacgtcctgcatttcagaaagtccattgcgaggattagagtggagctttccactctctttaggcattgcttctaggttcctttagcattgactgtattctgggcttttttttgtctttccttagtttgtttctaaatttctgtctattatgttttgttatatgcagttcatgcaggggaacatatggttagtaccttgtaatcatggttttcctcaaagcatgacacttcttcttcggtttcaattacgaccgtccattaccatagccacctgtgtgtctggagaaggttcagtgtttagggattccaaattcaatgctgagaagtctgcatggtctttcttgtggacaatgtttttgtaaatatagcagttacgaaaaggatgcttcagaaactgcatcgtggtgtaacaagttcagaagccggaattggcctgtgaacgttgcctggactgcaaggacagacgatttgtgggaaagttgtaggcattttcgcgcgtgatatagacggcttcgaagttgccaccaggattcgaaagtttagaagtggaaaccggcctatgattgttgccttgactgcaagtgcagaagaagatttgtgggacagatgcatgcaagttggtattaatggagttatccgtaagccagttttgttgcatggaattgctagtgaactcagaagaatcctgatgcagggaaatattgtcctgtgagaatggaatggagggtgcaagttgtaatactttagcatctcaagtattattttaaatcacaatattggaagaattccaatacaatgctcagtggtctgcaagttcttttagtcgaaaatgatgatgtaaatagagcagtgacccaaagattgcttcagaaactaggttgtgttgtaactcctgttgcttcaggatttgaatgccttactgtcattggacctgcaggatgttctattcaagtcattcttttagatcttcacatgcctgatttagatggctttgaggttgccacgaggattcggaagtttagaagtggtaatcaacctatgattgttgccttgactgcaagtgcagaagaagatttgtgggaaagatgcatgcaagttggtattaatggagttatccgcaagccagttttgttgcatggaattgctagtgaactcagaagaatcctcatgcagggaaataatgtcctttgagaatggaatggagggtgcaagttgtaacacttaagcatctcaagtatttaagttattattttaagtcacattcttggtagaattagaacacagcactctttggctcccccttgctagcaatttttagcttagagatgttattatacaaacgattttcataaggaagaaaaaagatggtatacagattagtttcttttcaatgtcttcacgttgttattgtcttgtatgtagcttcaaatccaatacatgcgtcctcccacgtatccatacaatcagaagaatgaaataaaaaattatctttgtttttttcaaagaaacaagcacccacgcgaagacaaagaaaagagagggg

SEQ ID NO: 28810 - DNA, 4316 bp, Glycine max
  Clone ID: TF_GmC433_1
agttgttcagggtggaagagtccacggcaagtgccacaacggacttagtcaattaaccgctgcatcattaatcacccccaataataattctcctactttgccatattcccaaacaaatgttgagaaaaaagttaaggtaaatgaaacccaatatctcagcatagaacaagaaattaaattcccacctcatctacctaatcacaatacattagaaagtagaaaaaaaaaggacatgtcattgcatcttatatacattaatgaaaaaagaccaacttactcaactatggagaacttgcatcaaaggattcatctccttttgatctatctccacaggaaacaaacactactaatggtggcacgatgagagaagaggatccgaggttcctctcagcgcaaatataaccaatgtttctcaaccttgacacataaaactaacaggctgaagtgtagtaactaaatttcttgcagctgacatgatcactccgatcccaaactgctctcatctcatcaagtatcttcttcttctttcggttttctttcttctttttcaatgtaagtactagtagtaaatccaaccaacccacttaccccaagaaaaaaagaaaaagaaaaagtagcagaaaaacaataaaaacaaaacctaagcctaaagggaccaaaagatgaccttaattaaacgagggagagagactttcttcttcttcatatgtagctttttgaaaacgatgcttcatctttttctctagaacgccgtgtttttttttttttggtgtgagcgatttaaagtaacgatgcatcgtttctggttctggatgttcatgttcgagcaaagatcttttgtgtgtgtgcagttactgctttgacgttttggattttcagtaagtaaaatccagttagcttacttagggtttggaaagtcacttcatgtagggattagtatttgcactatcctggttagttttgaataatttctaaggttggatttgaagtgaatggttttagaaagggatactctgctagagtgggatatatggtcagggcatttgtttgtcttactttatttcttgctattttctttttgactagtgattttggttctatgtgctcattttctttatgacgggttaatcatggcatctgagctcacttctcgccttaatcacatcacttagttgcagatttttagtttttttctttccagtctttttttactcaccctaattaaacttaacctaattttatattattcccacttttattttttgtatttatttcttttaatattatttgtcttttatggttttcattatagtcgttttcttattatctcctgtggatatattaattataattctttgatgtattttagaataaggccatattatacgttgactatgttaatgttcgggataagatcttttgtgtagagttattttgtgatttgacgatttagattttcacgttgtccagataagtgttgatagcagacagcaaagagctgaaagaactgaatcagcgcttacgagatgggaagaagattgctggtggggagcatggtttatgcgaggaagtgaaatgtaatggaattgctgaagaagttaaggttgaacagggggggactgtggagtcctcctctgtccagcagcatataccacagcctcaaggggcaataatttgttgggagaggtttttgcatattagatcccttaaggtcttgcttgtggagattgatgactctacccgtcatgttgtcactgcactgcttcgcaattgtagttatgaagttattgaagcagcaaacggattgcaagcttggaagatattggaggatttaaccaatcatattgatcttgttttaactgaggtggcaatgcctggcttatcaggcattggacttctatacaagattatgggccacaaaacccgcaaaaatattccagtagttatgatgtcatctcatgattctatgggtttagtctttaagtgtttgtcaaagggtgctgttgactttctagttaaacccatacggaagaatgagcttaaaaacctgtggcagcatgtttggagaagatgtcacagttctagtgggagtggcagtgaaagtggcacacaaacccagaagtctataaaatcaaagagtcttgagaagtctgataataattctggaagcaatgacgaagatgataatgaaagtataggcctgaataatgtggatggaagtgacaatggtagtggcactcagagctcatggaccaaacgtgctgtagaagttgatagtcataaaccagtttcccagtgggatcaaatagctgagtgccctgacagtacctgtgctcaagttgttcactccaatgctgaaatgggtgggaacaaggtggttcctctagctgcaaaggattgtgcagaacagaatgaacaacttgtcaaaactgcaggttctcaacatagcaatgcacctgatgtcggcccctctaaattcagtgagcaaattaatagaggacaactggaccttaattgtgaaaatcaatctagcaagctaaggtgcaaaggtttatcactgtctgatgccattactagtacttgtgattctcagatgcatagtggagaatttgaagccctaaataaaaaacccaagtcctcagatattgaaaataaaggtactaataatgatgaagaattgccatctcttgagctcagtttaaagaggcttagaggagttgaagatgctgatattacaattcaggatgaccggaatgttttaagacgttctgatcagtctgctttctcaaggtacaatgcagcctctaacactaagaaatctcccactggatgtgttggaagcaattctccttataataatagcttagaagttacaaagaaagattcatctcgtgatattcaatctcattcttgcggcaatcctcctaaccaaaactcaaatggtgctagcaataacattgatatgggttccactactaataatgcttatgctaaatctgcagttatgagtgagccagcaggggcatcaacaacaaaatgtttgtaccaaacatctgctttccagcctgtaaaaaacagccttgtttgtacctctcaacaagttgtcttaaataatactgaagatatgtcggcaacaattctggcaccacctaaactagacagacataaagattctgcagctctggacttccatctccattgtgaaaaccataactgtattgctgacaacatgaagcatcagctgccacctgatcatgatgctgaatctataaagaaaatggctactgctgctccacattgtggatcatcaaacgtggaagaagtgctagttgaaggtaatgttggaaaccacagtatcaatagaagtgtttcaggcagcaacaatggaagcaatggacaaaatgggagcagcacagcagttaatgctggagggacaaacacggaaagcaacaatggactcactgggaatagtggcagtggtgatgctagtggaagtggaagtgccaacagagtagatcaaaacaagacttctcaaagggaagtggccttaactaaatttcgccaaaagagaaaagagagaagggagaggtgctttcataaaaaggttcgatatcagagcagaaagagattagctgaacaacgacctcgatttcgtggacaatttgtgcgacagacctctaacgaaaatgcaagtgaggcaacaacagatagctgattcagagcattggccacaatggcataatgatggggatatgcgaaaaaaggttgaggagtcttcatgtagaatttgggaattattctgtgtgttgtgttaatgtataaagaccctggttattccaacttgttcatttggaacctgaatcaatttatgtggaaagagattgttatgccgattgatgctcggataacttactgtaatttaagttactttttcctcgatcttgtgcttggaatcaaatgctttttcacattatcgtcttgttaaggtataatgactctggttattccaacttgttcatttgaaacctgaatcaatttatgtggtgagagattgttatatgctgattgatgctcggatatgggccttcacacacaatgtggctaaaacagatggagcatgtgggtttgaccaccaccaccattgttgttgttgttgttattattattgctccactcaaacctgttttgtccttcacctttcacttcttttgagccaatattattattactatccccttccactcgcaacccttgtagcggtgccaagccatggaaagtattgtcaccttgatcatgatcacgacccttcaaccaac

SEQ ID NO: 28811 - DNA, 684 bp, Glycine max
  Clone ID: TF_GmC1886_2
gaagaaagggtgctagttcatgtgaggaaaattgggatatgcttgcatggacttggggaaaccatctaaatagaggctacacattttgcagatttgaagcaaccagccgaattcggatgatggagagcaaggcaaatgaggagatgaataatgggaatgagtggcatgtgcctatactggccatgacagctgatgtgatccatgctacatacgacaagtgcatgaaatgtggcatggatggatatgtctcaaagccatttgaggaagagaatctgtatcaggaagttgcaaagtttttcaaatcaaaaaccatgtcagattcatgacaaatgtgcttccttacttggcaaccaactagatgattggatttggagacaacacattttagtttgatcactgctagcactttcatgtcacatgtaacttgttacttttgctttcttgcatagagtaacacttgtttttgcaacatatttgagttgagttcgttgagggatcattactattactaatcggctgcagtttggcattattagagtaaaatgtataccacgccacaccccccaattgtgtacagattctgggtaagggatgagtgaaattatgtaaattcaatgtttttccccatctcgttacttccccatcagagaaagtttttaatttttatagcaatagctttttatg

SEQ ID NO: 28812 - DNA, 361 bp, Glycine max
  unsure (1)..(361): unsure at all n locations
  Clone ID: TF_LIB3109-012-Q1-K1-E5
gatgttgaagtacatagcacgtgataaagagtttcgcagaatccctgttataatgatgcccgcacaagatgaggtatccattgttgttaagtgcttgagacttggagcagcagactatctagtaaagcctttacgcactaatgaactattaaatttgtggacgcacatgtggagacggaggcgcatgcttggacttgtagagaagaacatcttgaattacgattttgatctggtagtatctgaccctagtgatgccaacacanacagtaccaccttgttctctgatgacacagatgacaagtccaagagaagcactaatccagaggcaggaatatcagtccaacaggaacaagagtctact

SEQ ID NO: 28813 - DNA, 365 bp, Glycine max
  Clone ID: TF_LIB3242-581-P1-J1-C12
caagaagtaccatatacctatattggccatgacagctgatgtgattcacgcaacatgggatgagtgcgtgaaatgtgggatggacggatatgtctcaaagccttttgaggaagagaatctgtatcaagcagttgcaaagtttttcaaccccaagcctacctcaatacaacaaaatgccagaactggaaaagcaacttaatgttaattgcaaagtttttcactctctcactactgccatttttcctagttggctgctaaatggtaatttcaatgtgcttttttcaatcagttggttttcaagatatctgaggatatgcatgcaatgcaacttgatacacacaccacgcatatgcagtgatcatttt

SEQ ID NO: 28814 - DNA, 1541 bp, Glycine max
  unsure (1)..(1541): unsure at all n locations
  Clone ID: TF_GmC3283_9
attttacaaaatcaatgatgtgccctgatatatggtgtggcaagctatacaccgaatttgatttatgagccacttttttcttgtcaaattcgaatagcatacacaattacacaggaagttgcccattcttttccccacgcgtccgatcatggccgacaataattctactactgatcattatgatatgggcatggaagatgctgaactgtctttggctgaggttaaagaaacttgaaaggcttctgagagaacaccgccttcaaggcaactcatacacgctaattgttggggactttcccaagttcggcaagatgcgaaatgaagccttatccanacccatgaatctcttctctcatgacatagtaaagcgagctgttatcctttatacccatcactgtctacaagcatgccgttggtacttttatctaagcatgagctctgttcccaatatctgaaaaattaatgagatatgcattttttttatcgctcatacctgacaatccattaggatcaagtcatatggacggcaagtcgagaatctctgtttgagatgatcttgtgtttctttccttctggagtgattctcttatacagtcttcagcagtgaacatgcaattgagagcatctactgcctgttgtccatcacctacagctacaacatctgctcccattttttcaagcattatggtagcaaccctttgaagtactggtgtatcttctgcaagcaaaatctttaggccctcaagagatttctttccatctactactgctttacttgagctggtgaccctatttgtgtccccacattcagaatcttcatcctgatcttctgttgaaatggatgatgattctttggtggatagtgatttaggttggttgtcttcagtggcagaactggagctgggactagaagattcttctttcctcaaattatgttcttccaaacattcattttcatttgttaatctaactaggcagttattcatatggtgtggtgatgatggatgagagttttctagcttctcaactggtttatctccattagcactaacgggattagaaccacttatttctgatatgtcagaatcatcagagctagcaccatcaaaatgagtggaatcaatctcaagaaactcatgcaaatcaccctctttcattgtggtccttggagctatcatgtttttcttttgtagctcaagatttctctcatttatgacagcttccaagatatgaatcatttttgctttgtaaaggggtttgttaaccataagtatatgccctttcctacggagctccatttttatggtattggaagtgtcatggtttaacatccatacaaactttgctctaccaaagtacctgtggaggaagttaaactgttccttccatatatctgtactcaagtcaagtagtccaatgtcaacaacaatgacaaaacccgggttcctcatatctcttatgttgagtagtttagacttcaattcctcttttgctggatagtgtgcctcaaagtcagtattattgaacctgaacttcctgca

SEQ ID NO: 28815 - DNA, 1128 bp, Glycine max
  Clone ID: TF_GmC46877_1
tacggctgccagaagacgacagaaggggaccacagttttttctctcatgcacctactaatagcaaaaaaaaaagctaagagggataattacattccacctctccttcccattctcactctctctctctctttctatttctctctccgtgcgtgaccttgaattactgatattttatattttaaccagctatatatattacaagaaaacatagatagtgtgtgttcatcagcttattctcaaacctgatatggagtttgtggataccagaaaactacaattacaacatcaacaacaactgcaacaacagccgcaacattttcatgtgttggcagtggacgacagtgtcatagataggaagctattggagaggctccttagaggttcttcatgcaaagttacctgtgtggactctggagacaaggctttgaaatatcttgggctaatagatgagcttgatgatacttcttcaacctctttagaatcagaatcttctcatcctccacctcaaccattacaacgagagggaatcaaagtgaatttgatcatgacagactattgcatgcctgggatgagtggctatgatttactcaaacgagtcaagggatcttcttggaaagatgttccagtcgtgattatgtcatcagaaaatgtaccttccagaatcagcatgtgcttagaagaaggggcagaagagtttctattgaagcctcttcagttatcggatttggataagcttcagccgtactttctgaaatccgttgataattcctgtgaaaaagaatctgctaacagttccatagattcagacaatgacaatgtcatcaacaacaacagcaataacagtaacagtaacaataacaacaacaatagcatcagcaaaaggaaggccatgtctcctgagcctcatcgggaggagagatcaagacccaaaatgaaagagttagcggtggtgtaaaaaaaaacaacactatagagagaggttgatggatgcatgcataggtattatatattatagtttatgactatgatcctaattatggatatctcctctactctaagagcttaattaatgaattcccagtgcgtactaatgttgttcacagttaccatttaccttcaaaaaaaaa

SEQ ID NO: 28816 - DNA, 441 bp, Glycine max
  Clone ID: TF_LIB3242-407-P1-J1-C7
gatgattcgacacgccatgttgtgcgtgctctgttacggaattgtagttatgaagtcactgctgtttccaatggtcttcaagcgtggaaaggcgctggaagatccagaaaatggcattgatcttgtcctaacagaggtagctatgcctattttgtctggaataggtcttttgtgcaagatcatgagccacaaaactctgaagaatattcctgtgattatgatgtcatctcatgattctatgggtatagtctttaagtgtttgtcaaaaggcgcagttgattttttagtgaaaccaattcggaggaatgaacttaaaaacctctggcagcacgtttggagaagatgccacagtaaaaagtgatctgaaatgctttctccaaagtcagatcccgcaaacccaaattgttattgcaaccctctttttggatcgtgagacagctc

SEQ ID NO: 28817 - DNA, 2568 bp, Glycine max
  Clone ID: TF_GmC413_1
ctcttgggttctgatggttgttcttggatatgggttttggcagtgacggtggtggagagtggaagcagggctctgcagtatctggggttggatggagaaaaaagttccattggtcttgatgtgagcaaaatgcaaacttggcttttgaattgttaaaggcacttctttttagtgttttaaacaataggtcttacttggaagtgatgcttatgttgttattttgatgactgtttcggcagagtgtgaaggttaatttgataatgacggattattccatgcccgggatgacaggatatgaattgctcaagaagataaaggtgagaaatgagacatggtcgttcttgttttaatttcttgcgaagatgaatgtattagaagagagaattgttaatgttttcctgatccacggggtgggcccccaactactccttgatttttctatatctgcaggagtcatctgtttttagagaggttccagtggtggttatgtcgtctgagaatatcttgaccagaattgataggtaagctcttgattaagataagatgctgtttggttttaggagatataagcctttatttttgtttgaattctttgatataattgcttgatttatgtgatgatatttactagatttggatgatgtttgttgattttacctatgctaatggtttggacatgattcacatctagacttgaattgcattagtgaaagacatgatgaacatacttttggatatgcttagatcacctagggtttggacaggattagggcacccagatcacatggtgtttagccatgtgaaaaggggatggagagaggagacaatgatatctgaggaaattattaaaagagtcaagggaatattatggtgaataatttggattttgttacaggtcaatgatattctgtattccgtgtagttgatctcacctaatggaataagattgttgatgttgcattagatccccatatactttctcattctaggttggttctggtaaaattcatctgttgagacttaattcattaataatctcatcatgttagtcacatggagtgttttgggaacatgttgcttccaacttgcacttgtggctacaatgattgaagcatatgaagaaatccagattcccacttgcctaacggtcaactgttgtaaaggaccctgttggcatggaagcaattattgtcactataattgccacataatcatacatcttatcaatacttctatgcatctatacatgaaattattagccaacaccattaggctatgctcaccctcagtgtttcaattgattatgaatatagtttgttaataattacttcaacatttgaacaaagttcataccatattctttatctttacctctcaaatttgataattattttgacttgtagacccaattattcatttttttttttttttttacttttactgcttctttcattttataccattcttcttatttctttttaccaatcactacttattcaatccaaggatggcttccgccggcgatcttttcaggcatggtttgccggaagttggtggtgccgggaagttacacgtgcttgctgttgatgacagccacgtggaccgcaaggtgatcgagcggttgctcaaaatctcgtcttgcaaagtgacggtggtggaaagtggtagcagggctctacagtatctggggttggatggagatcttgcaaagtgtcggtggtggagagtggaagcagggctcgcagtatctgaggtttcaatgacgaaaaagttccattgggcttgatagtgtgaaggttaatttgataatgacggattttccatgcccgggatgacaggatatgaattgctcaagaagataaaggagtcatctgtttttagagaggttccagtggtggttatgtcgtctgagaatatcttgaccagaattgatagttgcttggaggaaggagcagaggagtttctgttgaaacctgtcaagttgtcagatgtaaaacgcgtaacagatttcatcatgcgaggtgaagggatgaaaggagtaaaaagatctaaaaaaagaagccgatcagatgattgcattccatctctatcaactgcattctcatcagtttctcatccatgtgatctatcatcacctccatcaccatgtgtatcgcaatcgaagaaatctagattgagcatatagattgagcagcaatgtttatgtctccatttttgcctaaccattgttcatattcaaaagcctctgatgtaatttgcgtttttacactaaacattgctgacaacgactactagaattaggaatgaggaagaggatgacagagtcattttgttctttagttcggtcgcttacatatttttttgctgattttgctgctgtacagagaaagttcattaaattaatgaaaccctctattttgaggggtcttcaaatttttgtttcttctgtctctttatatttcactaacaacattctggaatatgttcaaattttggaccctttacttagcctatgtttggatgggaggttgaataaagaaggtagaacctgaagttgatttttaagtg

SEQ ID NO: 28818 - DNA, 2773 bp, Glycine max
  Clone ID: TF_GmC3451_1
attttacggctgcgagaagacgacagaagggggccacgtcatgacgagagtagcgatgatctagtgaggagattttggtgggaagatattttcgacgattttcgcggttgtgggcgaaagctggctgccagcgatagtgaatcagaatcgtaagctcgacaaagaagcaagcaaggttattattctttgtggttgcggaacgaagcatgctgttgctgttcgagaatggatgagttgaacggcgccatgacgacggagaatagcaatgcggaggtggttcgatgggagaggtttctgccgcggatggtgctcagagtgctgcttgtagaagctgatcattccacgcgccaaatcatcgccgcgcttcttcgcaaatgcagttacacagttattgcggttccggatggattaaaggcatgggaaacgttgaagaagaaggcacctgagctagatctcatattaacagaagtggagctaccagcaatatctggatttgcacttctttctttgatcatggagcatgacatttgtaaaaacattccagtcataatgatgtcttctcatgattcggttagcatggcattgaaatgcatgttaaaaggggcagttgattttcttataaaacccattcggaagaatgagcttaggaacttgtggcaacatgtatggagaaggcacgctattagcactcctactcaaaatacaatcttttcaccgaaaaaacttaaaactgcctcagaagacaattctgcaagcaataaatctagtggttctgtggcttcctcaaagaaaaacaacgaatgcagcgagagattaagtgaggctcaaagcacttgtacatcaccaattttcgaagctgagagtacatacgtggaaaatatgcaggatgtgccccagtatgtacattgccaagttatgcaaactcttgtgcagagcacttgtacatcccctatttttgaagccaagagtacatatgtggaaaatatgcaggatgtgcccccgctgaaaagttctaaactgaacaaaattgatatggtgaagcatgaaaagtttgcccaatttgaaagggaatcagctgagcataatgatgaaacagaagataaatcagttacaattgtatcagatgctgcaaggtgcgacaaaacttctgaattaacagagttaaggccagaacaagactgtggtgttgctgaacctgaaactgaaaacgaggatgaaatcttaaaatctgagttagacggagacaattctcatgttagtatgatgcaaggatgcagtgctgagcgggtgaaaccttctaaaggagctattgacttgattgccacagttggaaatcttccaaagcaccttgatgaaaactgtagtctcaatggtggtaatacaaccaagtttgattgtgaaacgcaattggaactttccttaagaagtgattttcctggcagctcaggtaatcaagcaagtgaagcaactgaggaatctcaaagattgaaccattcaaatacttctgccttttcttggtatagtaatagtaaattgttgcagcctcatttttcaacaccatcgattacatttcctgaagtaaacaacctcagttgggattctcatgaatcccataaattatctggaattacttctggaaattgtcagtatggtggctcaaatcagaacctggagaatatgatcggtacagtcatttgtcagtatggacaagttacaccaaaattatcaaacagtcaatgtggactcttacctgtttctggggttatctccaaccttaagtctgagggacatggtaatgttttcacttctttgttctatgcacaatctggtattcaccctatgtcgagtccaaaacctgtctgccagaatgagagttctccctttcccacaagtacctccacccagtcctatcctgaaagccacaactcagatcaactacatgactgctccaatgatgctacttgtcttaatcaaaatgtaaaggataatactgattcagatcacgcaaggcatgattctcctgttgctgatcagagtgctggtaatagtttatgccatgatgctgcaaatcatgtcaatagtagtgcatatggaagcatggacagtggaaatgatggaaatgctacttcagctatagtatccaagaacgccccagatggtttcagtgatagtggttgtcataattatgatggatttagagtgacagatcctcatcgctccagtcaaagagaagcagtgctagtgaagtttcgactgaagcggaaagagagatgcttcgagaaaaaggttcgatatcaaagccggaaaagactggcagagcagcggcctcgggtgaaggggcagtttgtacgtcaacatgatcatcctgtcgctgaggctggtggtgattcatgaactttgttctttttaggtttcgtgtagtattaaattacagctgactgtaacactgattgtgtcaacaaggattagctgtagggtggtgtctgtgtatgtgttgttggaatctgtttatccattaggcaaaagaagagtaggccagtagggagatttatatttggactgccacttacaaatttaggattgcaattatttagtgggtttggtttggattttacctgtgtatatgttttcttggttgaatactaatatgggtctgtaaaaaatcccctctagaacctctggttttgcaattgagtgatctttctttgcattcgacagaaaagaaaaaaaaaaaaaaagtaaaaaaaagaaaggattcgatatgacagtttcg

SEQ ID NO: 28819 - DNA, 1572 bp, Glycine max
  Clone ID: TF_GmC6773_1
tcacaatttcccaaacaagtcctccctcaacaaaacatagccaaaatccttaaccgaagttaagaaggtttctgtcataaattctttgacgttctgtttcggtgacaatcatgtgtaaagagttctaataagtgaacaaaacttgccattctcccaaaaattatatgcatttgtattgacatattaagcgcttttggtgatataaaactattggtaattcatcaaattttattaaaacatgacatcatcttctccacctagcaataatgtgtgcttctatttggtaatgagcgcttcttctatgcatgtttcttaacagctcattcctactaattcggctggagtggaggtggcataatcgcttgtcatggatttgcaaagatctctcagatttggatcctccgaatctatcgcctttattattttctttaaccctttacttttcatctcaccatttattatttattacgcgtccttccttctctctccctttcccatctaaataaaacccaccattttccacttccatctacttgtgttctgttgtgtactttctattctcataagataactaactcactttgtgtgatagagttctcattctcatggctattaccggcgatattttccggcagagcataacggaaatgcttgcggagtccccttccggtgcgccagaacttcacgttctcgccgtcgatgacagcctcgttgatcgcaaggtgatcgaacggttgctgaagatttcttcctgcaaagtgacggttgtggagagtggaacgcgcgctcttcagtatcttgggttggagggagagaacggttctcttgggtttgatagtgttaaggttaatctcataatgacggattattccatgccggggatgacaggatatgaattactcaagaaaatcaaggagtcttctgtgtttagagagattccggtggtgatcatgtcatcggagaatgttttgacccgaattgataggtgcctggaggaaggagcagaggattttctgttgaagccagtcaaattgtctgatgtaagacgcttaaaagatttcatcatgaaagggaaagtgaaggaaggggaaaatatctaacaaaagaatgaggtcaattgattgcagtccacctctaactgcaacatgctcaccagtgtctcttccatgcgatcctccatcatcatcctcatcatcattactctcaccattatcctcaaagaaggctagattgtgatcagagattgagtagtagtagtgtgctatgtctccaattttgcctacactagtgttcaaatcaaagcatgtagtgtattttgcatttgtttaccaatctctataccttaggaacgagaaagctaatgtcagagtcactaattttttggcctcttgtttgtctactgatcttgcttatgtacagaggaaatttatcaaaatttataaaatagggcgttattttgaccaaaaaaaaaataaatataaaaaatattttgcggccgctctataggatccaagcttacttacgcttgcattctacttcataactcttctatagttgcacctaaattcaatt

SEQ ID NO: 28820 - DNA, 319 bp, Glycine max
  Clone ID: TF_GmC3283_34
gtcaagctatgatttcttttatgtttatataataatatgcggtaaacttctatacatttctagttgcctgagccaaccctttgttagtttgatgggccttatgagagagaagtcaagatgttcttttagtgagtgaaagaatggtggacaccatcattttgaagtcaattggctttgttaagtaagcatccatgcccacctccaggcatttggcttcatcacatgacattgcatgtgctgtaagagcaacaatgggaatgtgcctgcttgttcccacttctgatttcctgattgcttttgttgcctccggacgcgtggg

SEQ ID NO: 28821 - DNA, 367 bp, Glycine max
  Clone ID: TF_LIB3242-550-P1-J1-E10
gtgaataatggagtggaagccgttcgtgcagtgcagcgccatacttatgatgtcattttgatggatgtttacatgccagttatgaatggtcttcaaacaacaaaactgattcggtcttatgaggaaacaggcaattgggaagctgcaagagaagctggaattgaacaatgttcaccagcttcaaatgaatgttctgtaccacttaaaaaccggatccacatcattgcgatgacagcaaacacaatgtcagagagtgctgacgaatgttatgcaaatggtatggactcatttgtgtcaaaacctgtgacattccaaaaactgaaagattgtctagaacagtacctgaggtgaggtgaatcaatccatg

SEQ ID NO: 28822 - DNA, 2622 bp, Glycine max
  Clone ID: TF_GmC597_2
ttaataatagaacacaagtagttaattcaataacaacgttttcaaaaattcacttctccttcaacgaggaaagcagcgtttcctgtttttgagttgtcgcattttgtgacggcttaaaggcatgggagacattgaagaacaaaccatctgacatagatctcatattaacagaagtggatttgccatcaatatctggattctcacttcttactttaatcatggagcatgacatttgcaaaaacattcccgtcataatgatgtcttctcatgattccgttagcatggtactcaaatgcatgttaaaaggtgcagctgattttcttataaaacctgttcgcaggaatgagctaagaaacttgtggcagcatgtatggagaaggcacgccataagcaggcctcctcaaaattttacactaccagagattgaaattggttttgctgcagaaaaccatgctgcaagcaatgactctagtggttctgtggcttctacagcaaaaaatggtgaatgcagcgagaaaacaagtgaggctcaagatatatcgcagctgaagaggtcttcaaatttgagcaatattgacacggtgaagcatgaaaattctaccaaatgtgaaagggaatcagataagcataatgatgaagctggagagaaatcactgtttgtatcagaagattcaaggtgcaacaaaacttttaaaccaacaggtttaaggctaggtcaaggctatgaatgctgtgaaacgagaaatcaagatgtagttctaaaaatagagttgatcaaatccaatcctgaaattaatacagatattcatggatgcagtgatgaactggtagatccttatactggggccattgacttgattgctacattcaagaatcttccaaagagcactgatgaaaaatgtagtttcagtagtggtaacactgccaagtttgattttgatacacaattggaactttctttaagaagaagagattttcctggaagctcatgtaaagctgcatctgaggaaaggcaattattgaaccattcaaatgcttctgccttttctaggtatagtagtagtaagttgttgcagcccctttttccaacaccatcaactatctctgctaaattaacaaattccagtctgagttctcatgaatcccataaattctcagaaaatgcatctacttctcatcaatatggtggaaaaaatcaaaatcaggagaaaattatcactccagtcattggtcagtctggacaagttgatccaaaattaccaaacagtcaacttggatattttcctgctacaggggttacttctgatcacaagtctacaggaaatggaaatgtcttcccttctatgctttatgcagaatcaggtgtccatcccatatggactccaaaatcagtgtgccagaaagaaagttctccatttcccacaatcacttcatcccagtccaatcctcaaagtcacaactcagaatgtcatctctggtcggaagattcaacccatgcttctgataaaaatttaaatgatcaaattaatttggattgtgagacacatgactctcctgatgctagtcagagtgctggtactagttttttccacgacacagcaaatcataatagtagcggtgtatacagaagcatgggctgcagaagtgatggaaatgctacttcagctaaggtagccaaggagagccatggaagttttattgatagtggtcactgcagttatgatggattcatagggacagattctcatcgcacaagccaccgagaagcagctctgacaaagtttcgactgaagcggaaagacagatgctatgagaaaaaggtgcgatatcaaagccggaagagattggcagagcagcgcccccgggtgaaagggcagtttgttcgccaagtacaagatgatcatccagtagcagatgtgggtggtggttcctgaaattgttttgtttcaagttaccttcatcattgaattacagtctgacttccaaatctgatttgcctttctcgacaaggattaactgtagggtctagtttgtctggtgaaattatgtttcctcttagcgttgttagtattttcttctggcttgttatattggctgtttcttagaatgtaggattgtaagtattttgtaggtttgttttgaagttttgattttacctcgtgtatatgctttcttgattgaatactaatatagggctactatcgttatataggcagtatgcttgtgtcttgaaagattgaatttttatttttttttatctcggcaagcatctctggtttgcaagcaaaactgatttgcctctcttgccaaggattacctggaggatatagtttgtctggccaaattatgtttaataaaggcattgttagcattttcatgtggtttgtacaccgcgctgtctcttagaatgtaggattgtatttgtcactaggattgatttgaagttttggttcaacccagagaatttgttttcttgataaaatactaatatgggggtaatcgccgcatagacagtatgggtatgtcttccaagcttcaaaaaccatttatataaaaaaaaaaaaatcacaacaagcaaaaaaaaaaaaaaagggcgacggccggccaccggctagtagctcg

SEQ ID NO: 28823 - DNA, 481 bp, Glycine max
  Clone ID: TF_GmC353_2
cccacgcgtccgcccacgcgtccgcaagcagtcaaaatgagtatgtacatataaaatttgattttcagattactgagagttctcagtcagacaaagcaatttcaacaatacattatagtagtaggaggcagtactacaacaatgaacctaaggagggcctgagcttcagcatgtgcaaaaagttggtacagatgatgcaaggtaatatatggatatcaccgaactcccttggtttggtgcaaggcatgacacttcttctcaagtttcagataggaccatcacttggaaaatccatatttgcacctaaagattattcaagctcacagttcagaggccttaaggttttgttagccgaggatgatggtgtaaacaggaccgtgaccaagaagctacttgagaagcttggttgtcaagtaattgctgtttcatcggggtttgagtgcctgagtgctataagtgggggctggaactcattcagaat

SEQ ID NO: 28824 - DNA, 552 bp, Glycine max
  Clone ID: TF_GmC62872_1
gggcttaccgttcgtccggctgatgatgatgatgtaaacaggactgtgaccaagaagctgcttgagaaactggggtgtcaagtaactgctgtttcatcaggattcgaatgtcttggtgctataagtggctctggtaactcattcaaaattattctgttggatcttcacatgcctgaaatggatggttttgaagttgcaagaaggattcggaaattccaaagccataattggcccttgatcatagcttttactgcaagtgcagaagaacacatcaaggagagatgtctacaggtgggaatgaatggattgattcgaaaacctatcctccttcgtgagatagcagatgaacttggaacagtcttgcaacgtgcaggtgaaaaattgtgacaacaattttaaatatctcaaattttttaggttcctcaaaattcattactttgacattttgaaagagaacctgaaattgataacaaactaaatatactagatactaggtacattttgctaaccatttttctgtatgatctttttaccgtacaatgaattatggat

SEQ ID NO: 28825 - DNA, 446 bp, Glycine max
  Clone ID: TF_6667475
gccaccaagggctcattttcaccaatggcgcgcaagccgtcgaggtgtttacccgcgagcgcccgcaattggtgttgatggacgcccttatgccggtgatggacggttttgaagcggcgcggcggatcaaacagttggcgggtgaggcgctggtgccgatcatcttcctcacctcgctgcgcgaaagcgaagccctggcccaatgcctggatgccggtggcgatgatttcctgcccaaaccctacaacccgctgatcctggccgccaagatcaatgccatggaccgtctgcggcgcctgcaggccacggtgctgcgccagcgcgaccagatcgcccggcaccacgattacctgttgcatgagcaacgcgcggccaaggcggtgttcgacaaggtagcgcattcgggttgcatcaatgccgcgccgaacattcgttacctgcaatcg

SEQ ID NO: 28826 - DNA, 2129 bp, Glycine max
  Clone ID: TF_GmC11138_2
cccgcgtccggaaaaaaattgttttcggcggagtaacaaaagaaaagaaaagaaaaacggattaggagaggaaaaaaaaaaaaaagcttgtgcgagagaaatgttagaaccttgtttctgatttttttttcctcttcgattttgatttttttttctgttgtagtttttgttgttgttgctctctctattttcgaaacgagattggagctctgactttgtggtttttgaattttattttttggattggtttttccaaattgctgcatcgagcttgcaaatggaggtttggttcctgtcagtgaagctctgaagtgcatctggtgttatataaggtggataaaaattactgaaaaaagaaagaaagacaaagaagatgatattttcaattatagtttcggagtttgtgttttatcttgccttatgatataagcctctaactgttcgaatttctgaggtctgatgatatcgtccggtaaagtaatcttgtgaagagtttctcatgtatgcatgtctaatcagatttcgtccgcagtttctgtaaggatggaacaggttgtcgttccatttctttaaatttgctatgaaatttttgtttttgagattttcatttctgtcggggggctggagtttggagtgtggttgatataggctggtccgatgaacaataatgttgggaaagggaaaaaaggtttggcagaacaaaatcatatgttttttaacaaaaagagtctcaataatggagtagttaatggaggggtaggctctggatcatcaactgaagatgacacaagatttaataaggtggttgaagatggaaacaatggattgaggggtctgattcaaatccatgggagcttgcagatttcacaacaaccacctcaagagccagccgtatgctgggagagatttctcccattaagatcgataaaagttttgctggtggaagatgatgattcgacacgccatgttgtgcgtgctctgttacagaattgtagttacaaagtcactgccgtttccaatggccttcaagcgtggaaagtcctggaagatccagaaaatggcattgatcttgtcctaacagaggtagctatgcctattttgtctggaataggtcttttgtgcaagatcatgagccacaaaactctgaagaatattcctgtgattatgatgtcatctcatgattctatgggtatagtctttaagtgtttgtcaaaaggtgcagttgattttttagtgaaacctattcggaggaatgaacttaaaaacctctggcagcacgtttggagaagatgccacagttctagtggtagtgggagtgaaagtgcgaccctcaccagaaaatttgcaaagtcaagaagtaatgatgcatatgaaaacaatagtgacagcagtgatgagaatgactatggaagcagaggcttgagcattcgtgatggaagtgacaatggaagtggcactcagagttcatggactaaatgtctagctcaagttggcagtcctcatccagtttcacctcataaacagttggttgatgcccctgatagcacatgtgcccaagtgatgcaaacaaagactgaaaaagttagtagtagatgggtgcatgcgacggaaaaagagtgccatgaacttattgatcttgatgatgttgcaagggttaaggacttggctatgggaatatctttgaatatgcaactagagcatccactcgaggaactgtctagcaatccaattgtgggtaaaggggcaaataagatgtctgatgtagatgatatgcagatcattaagagaaagagcaatgtctgtgaaaaaggacaattggaatacaatggtgataaaaccgggacacaggaaaatcaggctatgaatgttattgatgttactgatagcaacagtccacaggctgaaagcagagacttgaacactccaaatgggtttctggtttttcacaatcaaaagcaaactgttgccccaaagagcatccatcccttgaactaactctgaaaaggctgggagaagtaggagatggctaaaaatgtcactggtgaaaaatgcaatgtcttgagacatttaaatcagtcagcattctcaaaatataatactgtttctgcttaaccagctcaaactggaaa

SEQ ID NO: 28827 - DNA, 871 bp, Glycine max
  Clone ID: TF_GmC167244_1
tacggagaagacgacagaaggggacccacgttaaggaatcctcttttcttttcctctttctttctttctcgtaatctttcatttttttccctcttcccttttttcgatggacacggacagcttcgtttccttcgatcatgtttcgccggaggattcccacgaggttcatgtcttggccgttgatgacagcctcgtcgatcgaaaggtcattgaacgcttgcttaaaatctcagcttgtaaagttactgctgtggatagtggaatcagagcactgcagtttctggggctggacgagcagagaaggacctctgaatctgatgggtttgtcccggatttgaaggtggatctaattatcactgactactgcatgcccgaaatgaccggttacgagttgctcaagaaaatcaaggaatcgaccatgttcagagaaattccagtagtgatcatgtcttccgaaaacattttgccgcgcatagacagatgtttggaagaaggtgcagaggatttcatagtaaagccagtgaaattatctgatgtaaaacggttaaagggttacatgacacccaaagaggttattaagatgagaagccaagaagacagaagaagtgatggctatgttaacggtggtgatggtgggggttgtggaagataaacaacaaaagaaagctggaagagcaagacacctctgacgtgtcattatcaccaccgtcaacttctaccctttcatcatcaccgtccgtttcctcaccatcaccgtcatcttctcctacttcttcagccagcgtgcttgcctctccaatcagacagcttaaatgaccagcaccgattgactctctggtatgtcatccacagcagcaatttctctttttgc

SEQ ID NO: 28828 - DNA, 870 bp, Glycine max
  Clone ID: TF_GmC31263_1
atcatttccattatttatatgctatattatctgcagccaaatataaattccattacccttttctcagtttcttcccctgaactccataaataactcactcttgtattatttttatgtttttcacttccatgatgccagtttcaaccatgtgaagttgttgtgtgtgtgctgtgtttgttgttgtgtactgttttggatcttcagaaccaaccatgaatctcagccacggcaagggatccacttcgagttctcctctgaaagccggagacaccgtctccgaccagttcccggcgggtctccgggtactggttgtggatgatgaccccacttgccttatgatccttgagaggatgctgcgtgcttgtctctatgaagtgacgaaatgcaagcgagcggaggttgcattgtcgcttctgagagagaacaaaaatgggtttgatatcgttttaagtgatgtgcatatgccagatatggatggatttaagcttttggagcatattgggttggagatggaccttccagttattatgatgtcagctgatgatggaaaacaagttgtgatgaaaggggtgacacatggtgcctgtgattacctgattaaacctgttcggattgaggctttgaagaatatatggcagcatgtggttcggatgagaaagaatggtttgagagatgtggagcaatctggtagcatggaagaaggagatcggcctccaaagggatcagatgacggaaattactcgtcttcggtgaatgaagcccaaagctcaaagaagaggagggatgaggaccaggaaggagatgagaaggatgattactccacgttgaaaaagcccgagttgttggtctgttggcttattaacagttatg

SEQ ID NO: 28829 - DNA, 384 bp, Glycine max
  Clone ID: TF_LIB3242-023-Q1-N1-C10
aattcggctcgaggttagttttgttttgttacccttcctctccagccttttcttgagtttgtctctctctctcctttttaattttaaataatttgttgtctgttgcgtgaaagaggccctgaaaacaagatttctgtagtcaagtttggagctttttgctctgtgattggtgtgttctccaaacaatgcataattcttcatctgggtacttggttctggtttaatatgggggtggaagaccgttttccggtgggtatgcgtgtacttgccgttgacgacgacgaaacgtgcctctcagtgttggagaacctgcttcgcaaatgccagtataatgttactacaactaatcaggcaattaaggcgctagacatgttgaggaaaaac

SEQ ID NO: 28830 - DNA, 1376 bp, Glycine max
  Clone ID: TF_GmC142127_1
gcaataactgacatgaagaaacataatttggaagatctgccttccaattttagagggcttaaagccatagtggttgatggaaaacctgttagagcagcagtgactagataccatctgaagagactagggatacaagctaaagttgcaaatagcatcaataaggctgtttctttatgtgggaaaaatggttctttggcctcggggtatacaggctaagattgcaaatagcttcagaaagattcatgggtttgtggagaggaagagatcttcaatctctggcaactggactggaaacaaaatgggcatatgtttaagatacctcaaatgatccttcttgcgactattcaatgtgtggcaactggactggaaacagaatcggcatatatttaagatacctcagatcatacttcttgcgaccaacatcggtaatgatgaatttgataaagctaaagctgcaggtttcaacgatactgtgatcatgaaggccctgagagctagtgtggtggctgcttgtcttcgccttcttcggggaacggggatcttggggcttcacggcaatgtcgtgaacccgagggtcgccgcaggtgcattaagaaattttggcgctgatgtgacgtgtgcagaaagtggcaatgctgctctcgagatgctgcagttgcctcacaattttgatgcttgcttcatggatattcaaatgccagaaatggacgggtttcaagcaactcagcgaattcggatgatggagacaaaggcaaatgagcagcagatgaatggtgaaggaaatgggtggaaagacaagtaccatatacctatattggccatgacagctgatgtaattcacgccacatatgatgagtgcgtgaaatatgggatggatggatacgtctcaaagccttttgaggaagaaaatctgtatcaagcagttgcaaagtttttcaaccccaagcctaccacagacaacagcctaatagaaaatggcagaacttgaaaagcaacttaatgtttaatgaaagacacttactttcactactggcattttttcgtagtttgctggtaatttgaatgtgctttaatcagttggtttttgaagatatctgaggatatgcatacaccaggcatatgcagtgatcatttctaaccaccagctgaacatgatttcaatctgagtaaatgtatacccctaccctcaacttgtgtacagattctccccccgggatgaggaaaatcatgtaaattcaaaaaatttttttttcctttcttttgcatctcccgatacttccctatgattagggtttcaccaatattattttttttttctctgtaatattttggtctaatagaattttggtagtccccatattcagagggaagttcgg

SEQ ID NO: 28831 - DNA, 4063 bp, Glycine max
  Clone ID: TF_GmC4331_1
ataaaatatttttattttttttttttttttttatttcccccattggcttgggggaatttaaaagtggatttataacttcaaagcttctaattatcacaaggggggagccaataatttttcactcttctcacattaatagatttcatgaatcttctctgaaaatttgaatacacggattagttacttagttgtacttcaaacctttatatcaccaaaatggaataatttttttttttttatttgagtcaaaggaaatccagaattggaaatataaaaatcggccaaaaaatggtggatcactcacactacagtataatgtatcagttacatgtttgcaagccgaattccagcactgttaagaacaaaaggaagcaagcttgctgtgatacatcgaatcaccatctttattgtgagtcatatacaaagattgatgatgggtacttgcttccttcctcccctttgatgccaagaagctaattttcttcctttcacctgaatcaagcccttgtgatacatgcatcaatacacataaaaatgtaacgcgcctaggctagattactataagttgtattattacatacacaaggatgagactccagaacctgtattataatacaccctaatcttctaatcagcctcaatcatttcggctgactttacaaggaagaagaattaatgggttttggtacccttaacaaccaattacaactcaattgcaaccaatcaaacttggctcctatgtacactccctgccacaaaaacaatgttttaaaacaggaacccttcacacacagcagaaaagacaacaaaataggtcaaaaaggtagaatgaaccatttctgaacttctacaatattatccccctttgttccattttcttttatctttcagatgagatagatagcattcttctgtctctagtgaacaaccaccaagctttgaggtggttaaatactaaaacatgcactggctgttaaatagggaacttactctcaggagacttcggaacctatttgcccacttcggagtgtcctggattacggacagctacgcttccattatcaaatattctggtttaactcggcaccgtattttcttttcaagatgactggaaaaaccgtgagacttctctatacagctgttcagcttcaaatggttttgaaacatatccatccatgccacaccttaggcattcctcgtgtgtagcctgtatcacatctgcggtcatggctaaaatgggtacatgccagtttgtaatattctcaaagtcatccatagatacttctctgttcacactatcttccatctccctaattcgctttgtagcttcaaatccatccatttctggcatttgaatatccatgaaacaggcatcaaactgatggggtggcttcaaggaagagatggcatcttttccactgctaacacaaaccacatctgctccatactttttcaatgcaccagctgctactgcacggttcacaccattgtcgtctacaattagaattttcctgccacgaagaagatggcgaagagacaaactttggagctctctatgaggagctcccttgttttggacacccatggctcgttgtagtgaggcagcaagcatacttgctctcagaggtttggtgatcacagtaggattatgaacacccaagtttacgctagctttaaaagaactactagaattaacaagaatgaacagctttggaggaaccccatgatcaattctcctcgtgttattgacaaagtgagatgacaagcctaaatctctatcccaaacctcctgctcaatcaggaccatattaacaactacattcccattgcttatggttgacaaaccttgttttaaatctgaaaccatttcaacatgaatgccaagccgttggatgtgatatccagacacttctgctctaacagatcttgggtcaataattaatgcagtcatcccctcaaattctgaagatgcagactgaggttggttgttgatttgctgaattttacactcacttgaactacggtgtccattggtgaatacagcagtaaaagtgaatgtggacccaatcttgggtatgctcacaaatccaatttccccattcatgaggccaaccaaacatttgctaatgcttaggccaatgcctgttcctccatgctttcgggagatggatgaacctacctgcatgaatggggtgaagatgagtggctgagattcaagaggaataccttcacctgtatcttcaacagatacaatcaaattgacaagatcattggagggggatgagaaggaaccaagaggtccctcttgactgaaagccttgaatccttcccagctccggcgactatcagcaacgggcgaaccactcaaggtattttctgagttggattctttgtcaacctctattgaacggacaacctcctcaacaagatggattgtgacaaaaatatgtcctttgtccgtgaacttaattgagttacccatgagattggtaattatttgtcgaaatcttcctggatcacctataagtaattcaggaacatgatctgacacataaactgccaactctactctttttccttgagacttctcagaaaatagagacaatacatcatccaaaattgcccgtatgtcgaagagcacagcctcaagctctagcttaccaaactcaatcttagcctgatccaaaacctcatttataagtgacaccagagcttttccactttcctgtgctgtcctgacatattcctgttgggttacatctagatctgtgtccataagcatatgcaacatccccaaaacaccattcattggtgttctgatctcatgggaaacagtagcaagaaactgggattttgcaacatcagccgccccagctcgttttttaagttccatcatctcacggtaatcatcttctactttggcaattcgattcacagtggcatggaaaatatatccaacaaggagtgcaataacaaggataccaatagaagtagttattgccacccatggccatggtggcttctgcttgaacctgcagtgcatctcatgcttcctaaaagggtctccaaagttaagagtgctgacgtgatagaaaaaatcccctgattcatttgagccatacatggcaattggatgagtacgatttgtagtatcatatacatgaacaattacagtttgcttgctagcaagttgctgaagtaatttctccactaatgactcaacatcaaagactcccccaagatacccgtcagttgcttgaatcctttcatttggggttgtatttgatgggagatctctcttgtaaacagcaaaggtcaggataacccctagtcgatttgttttgagcagcctaaagggcgcagttaaaacccctttgcctgattctcttgcacgcagcacattttcacggtcttcctttccagaaagcacattaacagaaatcacgtgtgcaattgtatcctgtgcaaagatgacaggagcatattcttcctgaacaggggatggctccagtgcctctggggcataatcgtccttatgaaccgggttctgctctagagtatccatcctcttgatagtccaaccttgctgcttttcaaattgttccctttcagaatggagcacccttacagcatacgcaacaccacttgtaagaggtctctcaaaagctgttctttctgtgtactttgcaaaagttttctgatcgatggctgaggggctcttagcatggtggaaagtggagattagaatggacatggcttggatatggttcatactgacattaaactgatcctgcagcatcctagccctttcatcacacatgcttgcaagagtttctttcctcttctcagtaccttgcgagctcatgtagcagaagatccgcaaagatactatgaaccaacccactacccatgtcagcaaaagcttcctccacaacgctctcttaactttcttggagccaatatactggtagtactgttggtggattttgcaaccctgccctgagatcttctcccaccattttttgtgccacatcttgctaccaccaccacctccaccacccat

SEQ ID NO: 28832 - DNA, 1034 bp, Glycine max
  Clone ID: TF_GmC413_3
caagatctctctgatttggatcctccgaatctcccctcttttcattttcacattcttcttattatttattcacccttttccccttccttcaccattcattttcttttataataccattcttttttctctttatctctttcatcaatacttcatcgttttcgttaagggatggcttctgccggcgatgttttcaggcagggtttgccggaagtttgtgctgccgggaagttacacgtgcttgctgttgatgacagccacgtggaccgcaaggtcattgaacggttgctcaaaatctcgtcttgcaaagtgacggtggtggagagtggaagcagggctctgcagtatctggggttggatggagaaaaaagttccattggtcttgatagtgtgaaggttaatttgataatgacggattattccatgcccgggatgacaggatatgaattgctcaagaagataaaggagtcatctgtttttagagaggttccagtggtggttatgtcgtctgagaatatcttgaccagaattgatagttgcttggaggaaggagcagaggagtttctgttgaaacctgtcaagttgtcagatgtaaaacgcgtaacagatttcataatgagaggtgaagggatgaaaggagtaaaaatatctaaaaaaagaagccgatcagatgattgcattccatctctatcaactgcattctcatcagtttctcatccctgtgatatatcatcacctccatcgccatgtgtattgcaaccgaagaaatctagattgagcatatagattgagcagtgatgtatgtctcctccatttttgccaaaccattgttcatattcaaaagcctcagatgtaatttgcgtttttacactaaacattgctgacaacgagtactaggattaggaatgaggaagaggatgacagaatcattttgttctttagttcggtggcttacatattttttttgttcattctgatgctgtacagagaaagttcattaaattaatgaaaccctctattttgaggggtcttacctc

SEQ ID NO: 28833 - DNA, 859 bp, Glycine max
  Clone ID: TF_GmC478_1
ctcgagccgcgagagctaagtaatgttgaaagtgatggcggtgtaactgacctaagttttggatagatcagccgcgagatgatcgagctgcagggcggcgaaatcggcgtcagatctcgacctggaaaaggcgctacattcgccttctacatcgccgctcgcactgcagatgcgccgccgccgtccgtgcaacaaagtctctcttctccggcgctaatgtcgggaagacgaccgtcggagaataccagagccagatattccatcctggtggtggaagacaacctggtcaaccagaagatcttgagaatgcagctccaaaagctcggccacgaggtgcacgtcgtctcccacggccgcgaagccctggatttcctggaaactacttcctgctgggaaggcggtactgccagtcacacgcacgtttcgattatactcatggacattgagatgcccgtaatgaacgggctggaatgcacgaggagaatccgagaagctgagagcgaaggccgcgttaagcggcatttacctattatcgcggtgtctgcgaatgcccgtgagggccaggtgcgttatgcgatggagtgcggagtggacgacgcgattagcaagcctttccgcgtggctgatctgatgccgattatcgagcgattggctttggtttagaaatgatgaaaagcgatattccggacggcgaaagcgatgcgcccttgcagtcaacgcgtgcgtacgattgtgcgcagctgcgcacaatcttgtatacaaaacaacgcgtcggtatgcattgggaggaaatacatttgctggtggtagaccatcaggcacagacatagatcacgaatccatatacgacttttgagag

SEQ ID NO: 28834 - DNA, 1799 bp, Glycine max
  Clone ID: TF_GmC353_1
cccacgcgtccgctcacgctccgagtagtggtggctctgtggagttgggtgctgtggcggctattcgcatgccgttacttcatgtgtcaaatttcaaaggagggacgccggagttggttgagacgtgttatgctatacttgttttggttctgccaagttcaagcactagggtttggacctaccatgagatggagatagttgaagtggttgctgatcaggtggctgttgccctgtctcatgcatctgttcttgaagagtctcagctgatgagacagaagctggaagagcggaaccgagcactgcaacaggctaaaaagaatgcaatgatggccagccaggcacggaagtcgtttcagaaggtgatgagccatggaatgcggaggcctatgcattctgttctggggatgctgtcattatttcaagaagatattgtgtgaactgggcagaggataagaggcgatacaatgttgaaagttgtaaatgagctctcgatttttattgatgatgtaatggaaatgtcataaaatgaaaagggaggcttccggttagagatgaagccttaccttctgcattcaaaggtgaaggaagctgcttccattgccaagtgcttgtgtgtttatgaaggctttggttttgaaattgatgtccagaagtctttgcctgaaacagttatgggtgatgaggcaaggacttttcaagtaattttacacatgattggctatttattgaacatgaatgacaaagggactctcaattttcgagtttttcttgaaagcgatggtggagacagggatgataaaaatattggaatatggaggtcaagcagtcaaaatgagtatgtacatataaaatttgattttcagattactgagagttctcagtcagacaaagcaatttcaacaatacattatagtagtaggaggcagtactacaacaatgaacctaaggagggcctgagcttcagcatgtgcaaaaagttggtacagatgatgcaaggtaatatatggatatcaccgaactcccttggtttggtgcaaggcatgacacttcttctcaagtttcagataggaccatcacttggaaaatccatatttgcacctaaagattattcaagctcacagttcagaggccttaaggttttgttagccgaggatgatggtgtaaacaggaccgtgaccaagaagctacttgagaagcttggttgtcaagtaattgctgtttcatcggggtttgagtgcctgagtgctataagtggtgctggtaactcattcagaattatcctgttggatcttcacatgcccgaaatggaaggctttgaagtggcaaagagaatccggaagttccacagccgtagttggcccttgattatagctcttatagcaagtgcggaagaacatgtgagggagaaatgcctacttgctggaatgaatggattgatccaaaaacctatcgtacttcatcagatagcaaatgaacttagaacagtcctacaaagagcaggtgaaaaactgtgagaacagttttaaaagcatgcttcggtttaagaaaatatgatttcattagtaattacaaaaaggtcatgttattttagttctgtttcctattttcaagcattgcgggctatgcttttattattttgtgaacaaattcttgaaaataagaaacaaaataaaataatgtgtcttttataattactaatgaaagagtgactcaattttctgaagttgctcaaaacggcattgtgaacttgggggatttctaacaatatcaaataataaaaaaagtagccttttgtcccc

SEQ ID NO: 28835 - DNA, 951 bp, Glycine max
  Clone ID: TF_GmC413_4
atctctctctctcttcattcttgaggtcttctttcattttataccattcttcttatttctttttaccaatcactacttattcaatccaaggatggcttccgccggcgatcttttcaggcatggtttgccggaagttggtggtgccgggaagttacacgtgcttgctgttgatgacagccacgtggaccgcaaggtgatcgagcggttgctcaaaatctcgtcttgcaaagtgacggtggtggaaagtggtagcagggctctacagtatctggggttggatggagaaaaaagttccattggttttgatagtgtggatgttaatttgataatgacggattattccatgccggggatgacaggatacgaattgctcaaaaagattaaggagtcatctgtttttagagaggttccagtggtggttatgtcgtctgagaatatcttgaccagaattgatagttgcttggaggaaggagcagaggagtttctgttgaaacctgtcaagttgtcagatgtaaaacgcgtaacagatttcatcatgcgaggtgaagggatgaaaggagtaaaaagatctaaaaaaagaagccgatcagatgattgcattccatctctatcaactgcatttgcatcagtttctcatccatgtgatctatcatcacctccatcaccatgtgtatcgcaatcgaagaaatctagattgagcatatagattgagcagcaatgtttatgtctccatttttgcctaaccattgttcatattcaaaagcctctgatgtaatttgcgtttttacactaaacattgctgacaacgactactagaattaggaatgaggaagaggatgacagagtcattttgttctttagttcggtcgcttacatatttttttgctgattttgctgctgtacagagaaagttcattaaattaatgaaaccctctattttgaggggtcttc

SEQ ID NO: 28836 - DNA, 2233 bp, Glycine max
  unsure (1)..(2233): unsure at all n locations
  Clone ID: TF_GmC191_1
tcgcccacgcgtccgtacggctgcgagaagacgacagaaggggaccctcaacaacctaaaaaatattcactaagatttatttcccttattttattcatttattctttgttcctagtctttatcttataatttctcattgcttgcccggtaattcaagatcaacttggaaaatttgcaagatttgggatgaaatctggtcggatcttgctttgtgggatggggattttggtgggtcttatttcaatacaaagctcttcctctctcaatcccatctccctctcttcttcttcttcttcttcttcataacacaaacacaaaacataaacctttcttccaaccaacccttttttccaattctttgtttcttcaaaaatcttcaatccaatttttcaccttttcacaaatggggatggctgcagtggagtcacagtttcatgtcttggctgttgatgacagaattatagataggatactcattgagaggctccgcacaacctttttctattaagttactacatttgattttgttcactactttttagttcttctctggatgccatagaatgatgagatcaatctcatgtataccatctgttctgtcccaacaaccataacgcctcaggaggtggaggttaattttgttataacagattactctatgcctggcatgacaggctatgacttgcttatgaaaatcaaggaatcttcatctttgagaaacataccagtggtgattatgtcatctgaaaatgtgccttcaaggattaacagatgtttggaggaaggagccgaagaatttttcttgaagcctgtgaggttgtcagatttgaacaagcttaaaccccacatgaagaaaaccaagttcaaagatcaaaagcaagaaacagtagaaaggtttgaagactcagaagttcaacagcaacagtcacaacaacaaatcatcatccaaaatgagcatcaccaagcaccaaaattacaagttcttcagccagagtcagaatcagagtcacatccacaaccaactattgaacaacagcaacaaattctacaacaagccaacaacaataacaagaggaagaccatggaacagggcctttcacctgagactgacagaacaagaccaagatacagtggcatagccactgtggtatgatcataaaaatcattggcaaaaattttcttgaatttcaaaaaatgtaattctcatataactttttttttctttcttttaaaaacaaattaactcaagtgttggttaatataggctctataggagtgtaatagagttgtttcctgtacacattttcctggaaatatttccttccaattttgcttccccccaatataatgaaaaggaaaaaaaatataggaattgagtggaacagggcctttcacctgagactgacagaacaagaccaagatacagtggcatagccactgtggtatgatcataaatcattggcaaataattttcttgaatttcaaaaatgtaattctcataacttctttcttcttcttttaaaaaaaattaacttaagtgttggttaatataggctctataggagtgtagtagagttgtttcctgtacacattttcctggaaatatttccttccaattttgcttccccccaatataaatgaaaaagaaaaaagaaatattgaattgaaaagaaattatcagatgataaataaatcaaaagcaagaaacagtagaaaggtttgaagactcagaagttcaacagcaacagtcacaacaacaaatcatcatccaaaatgagcatcaccaagcaccaaaattacaagttcttcagccagagtcagaatcagagtcacatccacaaccaactattgaacaacagcaacaaattctacaacaagccaacaacaataacaagaggaagaccatggaacagggcctttcacctgagactgacagaacaagaccaagatacagtggcatagccactgtggtatgatcataaaaatcattggcaaaaattttcttgaatttcaaaaaatgtaattctcatataactttttttttctttcttttaaaaacaaattaactcaagtgttggttaatataggctctataggagtgtaatagagttgtttcctgtacacattttcctggaaatatttccttccaattttgctaccacccaatataatgaaaaggaaaaaaaatattgaattgagtaagaaattactccnnnnaaaaaaannnnnnnna

SEQ ID NO: 28837 - DNA, 938 bp, Glycine max
  Clone ID: TF_2407791
ggtggggttgggaagacaacgttgctcatcttccggaatcgcattggcggtaatgccaaagataggtttgcgatattccatcttgcgcgaacgctcagtcagttcataaccatcaaccacgggcatatttacaatcaagtcaatacgatgtcgaactccatcaggtctgcgcggtccagcgcttcgcgcccgttgccggcaaactcgacttcgcaacccagatgcgacagttgctctttccaaatcatgcggttaatggggtttgtcttccaaccgtcagtatgcgtagcttccataggcgcagcctgcggctccacttccgtggtttctatgacatcgtgcaggcgctggcacgcgatcgattgctttttgcgatcgcccgccaccgctgtagatatgtacccaactgcgattaattcttcggatcatcatccaacgaagatccgggcagctttggctacgatgcgtggccggctccatgcaatcccggccctgtttcctggatggacgccgaaatatccaaccaggatggctttaccgtcgtccctgatgcaccgccttgttcatatccttattgggagcgcctcccccacgctgcccaaccaaccacataatttttggcaaaaaaaattgccggaaaacccgaattgcacttataactttaacttcctcaaaaaaccggcacatcttggcgaaaactgccctctttttgaatcggtaaccaacaaggtcaaaaaaaaaaaaaaactggcccaccccgggctgaatggtcccatccttaagtgccacccaggattggggcaaagcgccagcaaatcgataagcccaggcctgtgccatttttcagcaaggcatcctgctcgacctgatagaacggttcaaatatatgcaccagtcttctgaggctatgccacgcccgttgtcttcccaaccccacc

SEQ ID NO: 28838 - DNA, 1831 bp, Glycine max
  Clone ID: TF_GmC57050_1
tgcatgcttttgtgtggatatgagtctagttgacctcatgggaggagaaattggatttgtaagtgagcctggaattggaagcactttttcctttaccggaaccttcagaaaaggagaaagcacgtctctggatgcaatgcagcagaataatcattttggttcagagttccaaggattgagaacattagtggtagatagcagaaaaatccgagctgaggtcacaagatatcatctgcagagattgggaatgtccgtggatgtaacttacagtctgaattctgcatgctcttgtttatctaatgtgtgtaacaagagtatgtcgacccaattggccatgattcttatagacaaggatgcttgggataaagaatgtcatatcttatacacaatcaagaaacgtagacagaatggcatcaaaggggatccaatgaatttaccaaagatttttctcctggccacccaccttagctccaatgaacaggatgggctcaagtcagttggtataatagatgatatactgatgaagcctctttggcttagttctttgattcagtgctacagagtatcccttggcactgaaaacaagcgagtaaatagggaaaaagtatccaaacttgggaatttattaattgacaaacaaattttggtggttgatgataatgcagtgaacagaagagttgcgcaccgggttctacagaaatatggggctaaagtgactgctgtggagagtggcagggctgctctaaagatgcttgagctgccgcataattttgatgcttgtttcatggatctccaaatgccagagatggatcgttttgaagcgacgaggaaaatccgttgtctggagagtgaggtaatggagaaaattgcatgtgggcaagcatctgcagagatgtttggtaacatctcttattggcacattccgatactagcaatgacagcagattcaactcagtcttccaatgaagagtgcataaagtgtggaatgaatgactatgtgtcaaagccgtttgaagaagagcagctctacatggcaatggcacgtttcttcaagtcagattcatagtgtggaagtttgaaatctttgattattagtgcagacaccctgctcacaagtgtggactgaccggccgcgtggggtgtagtatgatatcaattatcatcgaatgccatttgttggttttccattaaaagagctagcggatggattaattttggctaaattatttccagatattgtaatggttggacatgccccagctgatgtgttcctaattgagactgcttgccagcatcaaagctatcaattcagcatcatggatctcacctatggtcttgtttagtgatagtaagtaccatgtttacatcccaggattttcatattattttttttgttctaggccagagaccatgagtgtcttccaacccattgagtcaaagactaatcccgctcacgatacatgactgtcgctgacttatgggaattttgcatacggatattgattttgagttcaagatattatcacttattgcaggacaggaggaggtcaacagaaggcataattttatttttgtgtacataacccgtttttgttcctgcttcccgtcgcttattattttttgtaaatatttatatttggagctagtaggataagagaaaaatgttatagtgtcgacatcattatttcatattttgggggccaagatggaaaggaatgacagatctttgaaccctcataattttgtaagtagcatgtaaagcaaaattattacatgataccagtagaatgacatcaaaaaaaaaaatattttgtgaaaaaaaaataaaaac

SEQ ID NO: 28839 - DNA, 675 bp, Glycine max
  unsure (1)..(675): unsure at all n locations
  Clone ID: TF_GmC663_2
ggctcgagaaaaaaaaggaaaagaaaagaaaaaaaacctgaatcctcttggactctctcagctctcagatctgagttccagaaattaaggattccctttactttcccttctcctcatggatctttttctttcaattttagataaataaatcacaaaaaaaaatcaggcatccttttttcctatttttttttgccgttgaaaaaaatggaaaaggtggctccgcctccgattctgatgcaccggaagcgcgatctatcgtacgacatcgtttcggcgggtccgaacgagagctggaggtgggagtgggacagcgtgcgtttcgcaggaaaaccaccgccgccgccaccactgtccccaaacaacgacgtcgttttcgaggcggaaagtgtcgttcctcctctacagttaaagctcggaggaacaacaagagtgaataacaataacatcaatatcaacgttagcaacaagagagttaggtcggggtcccccggaacggcgtcgtatccgatgtgccaggtggacaactgcagggaggatctgtcgaaggcgaaggactatcaccggaggccaaggtgtgcgaggctcatagcanagcctcgaaagcgcttctcgcgaatcaaatgcaaagattctgcagcagtgtagtaggtttcacccgctctcgagttcgatgag

SEQ ID NO: 28840 - DNA, 340 bp, Glycine max
  Clone ID: TF_LIB3093-052-Q1-K1-H5
actcggtccttaattcccgtgtctggtccactccttacaatccactcgtttctgcaatgctgatcttagcaaatctaatgattatcacatactgcataaagttggtgatattcactccaagggcattatttctcttgtcttaaattcaattcttacattctttcaacaatttaatatgtttcacctactttaatatttttattatatatatattatcttttatattcttttttcaatttatattttatttttatttatttctatattattaatctttttcttatttattttttatttattatttatcatacttttatcttttttttttctatttattttt

SEQ ID NO: 28841 - DNA, 385 bp, Glycine max
  unsure (1)..(385): unsure at all n locations
  Clone ID: TF_14126564
cactagagctgctaaatgacaagtcacacatcaagaaattaccaatatcaaaaattgcagttggacaataaaatagaagttttaaaagttgaactttgaatgataactgtcttatctaatgccaatgaagactatcagaatgcatttttcataccttgatatgactgaagaatcttgtgttgtttaccagtcatgtaatcaaattggggtttccttcggcgttcattgtgtcctgctagacgcctgcgacaactgcgcttaccatcatcgaactcgacaagcaaatggaacctaatttaataacaaaacaaatggtgtaattcaatacataagtaataatcaggttcactntgcnnaananaaaannnnannnaaaaaaaaaaaa

SEQ ID NO: 28842 - DNA, 763 bp, Glycine max
  unsure (1)..(763): unsure at all n locations
  Clone ID: TF_LIB4391-031-Q1-K1-E6
tcgacccggcgtccgngagcttaagggtatcaccgccgacacagggtttgcttgcgctgcgctaatgccgccaccgttatgctcaacggcgaggccaagagatactgccaacagtgtggaaagtgcgatttttttgtttaagtctcttctctcttttccatcaattgattgattcaattaccacttcgctgcttagttagttctgttgttcgatatgttcttcaattatgcgactccgtttaactctattccgtcacttgattctattacttctctgcttagttagttctattgtttgagatgtgcttcaattgaatgttattatgtgattgtgttgttgaattgacggttaactctgcgaatttcttcgcaggtttcacgttttgtcggatttcgacgagggtaaacggagctgtagaaggaagttagagcggcataacaccagaaggagaagaaagcctacggcggattctggaggggctactcatagtgaactacttcaacctgttgccgaaaacgaggaaaacaattatgatgtggaagctggaaaagaatgctcactggctgagtatgaatcgtacagattgttcgaatttgagtaccgatatcaacgacgttggagtgtctctggatcttgaagatgaaccggctcccattccgagctcggctcctgaagcccagaatattaatagtgatagtgttgtgtctttggctgtttctggtgaaacgcgagtgaatagtgggaacacttccaattcgcctt

SEQ ID NO: 28843 - DNA, 383 bp, Glycine max
  Clone ID: TF_GmC138175_1
accagagatcatcaatctctctttcagttttccttgaacctatggacggaagttggagtgagggaaaaaggagcatgagttacaaggaggaggatgagtacgaagaagaggaagaggaggaggtgagtgagtatggagatgatggtaagaaaaagagggtggtgagtaataagagagggtccaaagctggaggctcagtgccaccttcatgtcaagttgatggttgcaacgctgatctaagtgaagctaagccctaccataggcgtcacaaggtttgtgagtaccatgccaaggctcctgctgtagtcattggagatcagcaccaacggttttgccaacaatgtagtaaggttcatgagctatcagaatacgatgactcaaga

SEQ ID NO: 28844 - DNA, 2822 bp, Glycine max
  Clone ID: TF_GmC4383_1
ttgcagaagagatctaaacaacgccgtttcttccattctccgccaaacatccaacaacccctaacaaacgataccaccaaccactacacaattccaattcaattagcccacgcgtccgccaattttcatggaacccctgtctctccctcctctcccagtcatggacgacgccgaagacccttcctccatttgggacttctcttacctcctcgacttcgacctcgacgaccaagatattattattaataacaacaactctctccctcttcccttcaacgaccaccccgctccaaacgagatccctcaaaacgacagggtccgaaagcgcgacccgaggctcacatgctccaacttcctcgctggtcgggtcccctgcgcctgccccgaactcgacgcgatactcgaggacgagggtttgcctggcaagaaacgcgcccgcaccgcgcgtgcatctgcatccgctcgctgccaggtccctgcctgcgaggtcgatatctcagagctgaaagggtatcaccgccgacacagggtttgcttgcgctgcgctaatgccgccaccgttatgctcaacggcgaggccaagagatactgccaacagtgtggaaagtttcacgttttgtcggatttcgacgagggtaaacggagctgtagaatgaagttagagcggcataacacgaggggaggacgaaagcctacgacttattctggaggggcgactcatagacaactactgaagagggatatcataaacagcgaggaagagttgcctgaaagatatgggcgtcgatgtttgggcaggggattcttgacctctcgaccagctatttttgtgattgtttctgatgctgtttgtcttggggtatgtgttgccgaccttcatcctggtagggttagtgagttagcagtatcggttagaaggtgcttgtttaactattagtattttttgcatttgtcttctagttggtacatatttgatgtaacactaaataaatcgtattgtgaggatataatacggctgcgagaagacgacagaaggggtcggatttcttttaagctttatgattggaatcctgcggaatttcctagaaggctacgacatcaaatattccaatggttggcaagtatgcctgtggagttggagggatatatccgccctgggtgtacgatcctgacaatttttattgcaatgcctaacatcatgtggataaatttactgaaagaccctttggagtatgtgcatgatattgttgctcctggaaagatgctatctggaagaggcactgcactagttcatctgaatgacatgatcttccgtgttatgaaagatggaacttctgtgacgaatgtcaaggtaaacatgcatgcaccgaagcttcactatgttcatcccacatactttgaggctggcaaacctatggagtttgttgcttgtggaagtaacttactgcagcctaagtttcggcttcttgtatcgttttctggaaagtatctgaaatgtgagtattgtgtgccttctccacatagctggactgaagacaacatttcttgtgcttttgacaatcagttatacaagatatatgttcctcatacagaggaaagtctctttgggcctgcatttattgaggtggagaatgaatctggtttatcaaactttattcctgtactcattggggataaaaaaatttgtactgaaatgaagacactgcaacaaaaattagatgtatctctcctttctaaacaatttcggtctgcatctggtggttctatctgtagctcatgcgaaacttttgcacttagtcacacatcatcatcagacttacttgtagatatagcatggttgcttaaggacaccacttcagaaaattttgacagagtgatgacagcttcacaaattcaaagatattgccatttgttggactttctgatatgcaatgattcaacaatcattttgggaaaaatattaccaaatttgataatcttgacagaaagcatgaaatccaatgttgtaattaataggacaagtgatgttgacataatgcaactcctgaatcacatacataatgctagaaatgccgtatatcagaaacatccgaaaagtgaaagtataattgtgcactctgaaatgaaaggctttatacttgctcagggctgctcccaagataacaagctatcagttgcaattaacagccagggtatccagtcgagagcagatgagaagtggggagtactgaaagtgaaaagtccaacttctaatgagaaaatggaaagaataccacttttgaagagggatattataatgagtatggaagagttgcctgaaagatacgggcgtcgatgtttgggcaggggattcttgacctttcggccagctatttttgtgttggtttcggttgctgtatgtcttggggtatgtgttgccgtccttcatcctggtagggttagtgagttagcagtatccgttagaaggtgtttgtttaactattagtatttttttgtacttgtcttcgagttggtacatatttgttgtaacactaaataaactggtgttattgggatgattaggtagtttattacattggaaagcttaatccaaggttgctaatttgtgcattaccaattttatcggatgtccagagggacttgcagttgcaggtgctgtgactgcaacgagtctgatcattaatagttaaaatttgtaattcctgttaccattattacaattgggtgtttatgccagagttctctctagaaacgtgtaattcttgttatcattatattataatcctgactagacttcatttttttttgtggctcactctccg

SEQ ID NO: 28845 - DNA, 1195 bp, Glycine max
  Clone ID: TF_GmC261392_1
ccacgcgtccgcttgtaaaagtcaagatagataatcactcagctttatcatgacatcaatccaaatagttatggctatcacttagcttagaattcaatttactataaaaaattgaaataaacttagcaaagttctaattctaattcacacagcttcatatcactaacaagcttaaaactaaagggggtattgtttggtgacagggtttacttgtttctttccaactgggggctatcctcccatactaattcaatcacacaattgagatccagtttaacaataatagacaaaaaaaaaaccagcttgacgcaaacctacctttgtaattgtacatgaacttctcagcagccatgaaaagagacggtggctgaggtttcctccggcgcctgttatgcccgtcaagccgtttcctacaactcctcttaacctcatcaaactccccaagtgaatgaaacctacacaacaacaacaattggcaccaccccatgtcacaaaacacatctaactagcgaaacaactgactgtcacaaagtctcatacaaaaacttttaacacccacatactccccaagcgaaccatacctgctgcattgctggcagaacctctgttgtttcccccccaccatcacaaccggggttttggagtgcttttcgcagaccctatggcgcctatgatactctctgcaatcactgagatcagaattgcatccatcaacagaacaacacatgttctgtaatccattctgaaggcgggatcttttcgacgacccggatggcgatgacacggtttttgagtcttttgtgtccttagcaacaacatctggggctgttttttcctcaccaagcctcaaatccactgaagctgcttcactcttctggccttcaccattagccagctccaacccacgtggatcccaagcaaactctttcccatcccaatccataaccaaccaacaaaactatggtttgctttatgtcccttttaagatgccaaagccaaacctaaacctaacacacatagttatgtactaatcttgaatctcttaaattctgatagctgcggataaagcctccaagaaaatgggcatagaaggtgcaagccccattttgatgtttctctctgagaggagaaagaacttgttcgagtaaaaaagtaggtcaccaactaaaattcacggacgcgtgggtcgaccggg

SEQ ID NO: 28846 - DNA, 666 bp, Glycine max
  Clone ID: TF_GmC860438_1
caaagatggtggtgaggagtgacaggttgaagagggatgtggcagattgtggtgacaacaaccaaaacgggtacgtggagcaagagaagaagataaaaggggtggtgagttgtgctgggaagaaaggtggtggtggcaataataatagcatatatgcggtgttgtcaacgccgatcttcatgaggccaagcagtaccacaggaggcacagggtgtgtgagtatcatgtaaaggctcaggttgtgcttgttgatgaggttagacaacggttctgtcagcaatgtagcagattccacgaattagctgaatttgatgacacaaaaagaagttgccgcagcagtttggccggacacaatgaacggaggagaaagaactcagatcagtctcaagcagaagggtcaagccgcaacaaagggacagggcaccctcaattgaaggacattacttgtggtcaggctgatgagagggggagaattcagataacaatccacgaaaatgctgcttacaaacatttccagataagatgagatatgctttgatctgaagtttgctctctctcttctgtcatccaggggatgtatttgtatttgtcaaactattcctgtgtcacactcatgctgaagattgcatttagataaataacttacaaaaaataaaactaacataa

SEQ ID NO: 28847 - DNA, 633 bp, Glycine max
  unsure (1)..(633): unsure at all n locations
  Clone ID: TF_GmC735929_1
ggtagaggggtgccacgtggcgcttgtgaacgcgaaggagtaccacaggaggcacagagtttgcgataagcattccaaggcacccaaagctgtggtcttagggttggagcagagattctgtcagcagtgtagcaggtttcatgtggtgtcagagtttgatgactcaaagaggagttgtaggaggagattggcaggtcataacgagcgaagaagaaagagctctcacctttctgttactaggaattctagacaagggtgtgctctctctcttctgtcatctgggagtagtagtgaaaattggctatctcatcatgcggatttctccacaagatgcagtgcagcattgcgtgaattgatagcagaaaaccgtgctgccctaatcactagacaacaacaacttgtttatgatagagactggcctcatgttgtgccccaccatgatgctgcagtggaagaagaagaagaagactttgaagacttacaacaacaacaacaaccacctgagcccaattattttccacaacaacatatgtttccacagacataataataataatagttcctgaacttggttggaggtgaccccaaatatatctaatgcactttacacagagtgtntgtatgttgtgtagc

SEQ ID NO: 28848 - DNA, 3856 bp, Glycine max
  Clone ID: TF_GmC7371_1
catgcatctagaggtatatgaataagtctcactgtctttcttggtctgctgtcggtgtttgtgacatcgaaatttcgttcaccagtttttgggttgaattttgcatacccctcgagtatttttcagtttcccagaaaaaatattggtgtggctagtcaaactagagacttggacaattttggttgctattgtgtgcatcttggtatttcttctgaaggagtttgttatgggagggaagagctcaaaagggagtggtaggaggtatgattttggtgcttcttcatcttcaagggataatagctatggtggataccctccgcaatcaccatacacttcttatcaaacacctcagcacccttgtgcatcagcatcagcatcagctccattttatgactatgcacagccaaaaaggaagttggataagaagtattccaggatagctgataattaccgttctttggatgaggttacagctgcacttgcaaatgctgggctggaatcttctaatctcattgttggcattgatttcaccaagagcaatgagtggacagggaagaggtcattcaatcgaaaaagtttacatgacattagaagtggtcaaaacccttatgaacaagcaatttctattatcgggaaaactttatctgctttcgatgaagataacttgattccttgttttggatttggagatgcatctacacacgatcaagatgtatttagtttctattcagaagagaggttctgcaatgggtttgaggaagttctgacacgatacagacaaattattccttccctaaaactcgcaggacccacttcgtttgcccctattattgaaatggctatgactattgttgagcaaagtggtggccaatatcatgtcttgctaataattgcagatggacaggtgactagaagcgttgatacacaaaatggcaacttaagtccgtatcagatggatatcaggagcagaacacaaaagacaattcactagatgcaatcagtgcactgtcaaagcatagttttggtgggagttggagcaatgggaaatgatgagggaatttgatgataacatcccttctcgggcatttgacaattttcagtttgtgaattttactgaaataatgacaaggaatgtagattcaaccagaaaagagacagattttgccctttcagctttgatggagataccttctcaatacaaggcaaccctagagcttggcatattgggttcacggagggggcattcaccagatagggttgctctacccccacctctttatagtagaacctcttccagcatcagcacaaaatctacaaggtctaacagttttcagcagaggacacctacacatactagctatgatagcagtgttcacacagagacatcatcaagttctttatatgataataaggtttgccccatttgtcttaccaatgcaaaggatatggcctttggttgtgggcatcagacttgttgcgagtgtggagaggacctccaattctgtcccatttgccggagcacaatccatactagaataaggctttactagttagctttgatgcagaagtcctgtcaatgaaaatttcgtcatttccagaataaggggctgcaaaaggatgtgcagagttggtctggctcttttcacagatggtttcttgtccataaaaactgcatttgcaatttccaggcgaaacttgtattcccagttacacttaggaagagctctttacagaaagaattggccttccccgttgtatatatgtagttcatgtgtctcggaaggcgtcatgtttttaaatgaactgcttgcattaaaattatttgtattgttctaaagagcatttatcattttgatcgaatctagattgtctttctactaaacatgggccgtatgtagctctccattatcagtaggactgtgagataaccagtcaagaatctgtgctctaagtacaagagcaaaatcatttggctctttaccgaagagcttaaaaacaattcgatctgtgcgactctgagcttctccactgaaactagaaggagactgggcagatgcagaatcagaatttccacttgtttgaggtggacttgactgatgggaatcttgttgtgcccatggtaatcaagagagctagtcacaagatttgtagagacgggcaatctttctaaatcttccataccatcatctgagtcaatatatatgtcattcaaatcaaaattattcatcttgatctgtccagcggtactgtctctggcttctgagtaggccggaggactgtttgacatgctgggctttatagaagatgtgatttgctgatcagaagccccagcatcatgtgcatgcatcacttgttgctgcattttagccatagatacagtttcatgttgtcttgtatcagttggagagccttgagaaccattggagaataaagtagacatcatttctgacttccttgatgaaccatcttctctcaacaaattctctggttctcgcaaaaggttagctatgttcttgctcccttgctcaccattctgactagcaagactcctcagaatatgagttagtagatcctgatctgtagtctgatctgacctgtcagaatgcatatttgaaagtatcttcaataaacttatcaacagatagctacttgtctgatcatcatttaatgaacttccattaggaacagcttcatgatttgttttccttcttcgtttattatgccctgccaaacgtcttcggcagcttctctttccttcatcaaactcttgaagcaggtgaaacctactgcattgttgacagaatctctgcattgcatttcccacaagcgccctactggccttggagtgcatctcacaaactttatgtcgcctgtgataatccttagctttgctcagatcagcactgcagtcctccacctgacaaacagctcgatttgaagtacttcccgacactctacttttcttcccattcgtaccgtcccagcttgcaacttccctatccaccactgcagaagcatggccaccaagctttaaactaagagtacccccttcctcattcaacccatcatcctccagcacaataaattgattttttttacttttttaaggttttgttaaaaaaataggtttttttttccttttcttgtccccttcttagttccccttgggatcccttggatctacttcctcagaggtggaagaactgttggatggacctccggccaccgggatcccagccggacccaatagggaaaaattgctgtcccactccaacaccatccgccggcaccaccggattcagccggctagcgatgaacagatcaccatcccatctccaatcattcaaatcccactctgaggacctcttccccacacccctcaaatccgaggaagcacccacaccgtaaaaatgataagcctcagctccaaatttagcttccatggtcaaaaacacaaactacacaactaaattcagttacagtacgaaatcaacaacacggaatcacaatcaattaaccttacttcacccccaacagtcccaaaaatagcaaacccacgcaaccatgattccaattcagtcgaatccgcatggccaccaccaacacttccaatttcccaagtcaactagagtaacacaaaacctagctcagctcaagtaccgcgacagacacaacaaccttcttcaactaaaaattatctaaagaaacgccaggaagaaaaaattaaaataataaaaaaggttagaaagtaaaattcaagaagaaattgatgacgaagcgaagacaacggtcgtaccggtacgtgagaggtttggcgtgagaagcatagcagatcgacggcgagtggatgtcggta

SEQ ID NO: 28849 - DNA, 704 bp, Glycine max
  Clone ID: TF_GmC263455_1
ccgggttaacggcggtgacggtgccgaggtgtcaggtagaggggtgccacttggcgctgctaaacgcgaaggattaccaccggaggcacaaggtgtgtgagatgcactcaaaggctcccaaagttgtggtcttaggcatggaacagaggttctgccagcagtgtagcaggtttcacgtggtgtcagagtttgataattcaaagaggagttgtaggaggagactagctggtcacaacgagagaagaagaaagagctcccatgattctgttgcaaggaattcttcaaaaggagggtgtgctctctctcttctgtcatcaagaagtgattcttggctttctccttctgatctctccataagatgcagtgccgcattgcgtgaattgatagccgaaaaccgggcagccatcatggccagacaatttgtttcagatagagattggcataatcatcaccatgcagtggaagacttcaaggagatccaacctgagtccaattacttcccacaacaaatgtttccccagacacaatgaaggatccatgtgtaaaagagcttgagatcttaatgctggttacttgacccaaaggtttagggaaacaagatttcaaagagagtagacatttatggggaatgcctaaagaaaggactttgtgtctgaagttttcaattctttaatttgctaaaaataaaagtttggacttcttta

SEQ ID NO: 28850 - DNA, 3300 bp, Glycine max
  Clone ID: TF_GmC365_1
cccacgcgtctgcccactcgtccggggaggagaaaagtggaaagaagacaaagatgaccgcgagtacttcgagccgggctgtttgtcaagtggaagattgtagggctgatcttagtaatgcgaaggattaccatcgccgccacaaagtttgtgatatgcattctaaggctacccaggaactagttggaaatgttatgcagagattctgtcaacagtgtagcaggtttcatgttcttcaagaatttgatgaagggaagagaagctgtcgtaggcgtctggcaggccacaataaaaggaggaggaaaacacttcctgatgcaactgtagttaatggaggctctctgaatgaagaaaagggcagtagctatttgttaatgagtttgctaaggatactgtccaatatgcattcaaatggctcggataatatgaggaaccaggatgttctatcacatcttctgaggaacctggcaagtctgactggtacaattaatggaagaaatatagtgtctttattagagggatctcaagatttggtaaaagctgggacatctggagctgcacagaatgttcctaacacaaattctgatggccctgaaccatccagacctttagattcttctatcaaaatggatgatggtctaatccatcgggaccctccagagtctatggtacaacgtgagacgactcctgctaatgatatggctaaaaaatgtatagcttcaggcagtgatggagtaggaagtttaaaatctccttcagtaccgcagtcctcaaatgtacttctgtcaagggatggccttccaccccaatcagttgcagcacagactacagttggaagaattgggttaagtaatattgacctgaataatgtatatgatgatgtacaggattatgttgagaacacgaggaattcttgtcctcctctgccttcagggaatgggtctcttgatcatccttaactggttatcccacagtcccacagagatagagagctatataaggccaggctgtatcatattaactatatatctccgtctagaaaattccgcttgggaagagctatgctacaatctagaatccagcttgagaaagcttgctgcgccaaatgattctttctggagaacaggatggatatatacaagagtgcagcactctgtagcttttctgtataatggtcaggtggtcttagatgcaccattgcgcctcaaaagtccgcaaagttgtcaaattttatgcgttaaaccacttgctgtttctgctagttcttgtgctcaatttgttttgaaaggattcaattttttgctgtctaactcgaggttgctctgtgcacttgaagggaagtatctggtacaagatagttgttatgatttgattgacagtgctgatgcagtcaatggacatcaagagcttcagcatctcagtttctcttgtcatgtaccgaatgtgactggaagagggtttatcgaggtggaagacaatggtcttagcagctgttcctttccattcatagttgcagagcaagaaatttgcttagagatctgtaagctggagaatgtcattgaggcagcagagactgctgatgacaaccagataaaaactaacctaatggaagaaaagactcaagcattgtatttcatacaagaaatgggttggctccttcatagaagtcgtgtgaaagttaggctaggtcccatggcacctgtccaagatcgcttccattttaatcggttcatatggcttgttggcttctctatggaccatgactggtgtgctgtgatgaaaaagctcttgaacattatctttgagggcactgttgatactggagatcatgcctctgttgagttagctttgttagagatgggtcttctacacaaagctgtaaaaagaaattgtcggcctatggtggaaatactattaaaatttgtgccagttaaagcttcagatggtggagacagtaatgagaagcaagtcaacaagtcccctgacagattcatattcagacctgatactgttgggcctgttgggttgactccccttcatgttgcagcaagtatgcatggttcggagaatgtattggatgcattaactgatgatccaggaatggtgggaactgaggcatggaaaagtgctcaggatgctacaggtttgaccccctatgactatgcatccatgcggggctactactcttacattcaacttgtccagagtaaaacaagcaacacatgcaaaagccaacacgtgcttgatatcccaggcacccttgtagatagtaacacaaagcagaagcaatcagataggcacagatcatcaaaagtttcaagtttgcagactgagaagattgaaacaacagcaatgccacgtcgttgtgggctatgccagcaaaagctggcgtacggtggcatgagaagggcactggtttataggccagcaatgctgtcaatggtggccattgcagccgtgtgtgtctgtgtggctttgctcttcaaaagttcacccaaagtttactatgtattccagccattcagctgggaatcattggagtatgggtcaatctaatgttgtatatcaggtattctttgcagtaggcatgcacttttgttttttggagtgtgaaagtcttagttctgagtatatacatctgtgatagtagctgtcatcaaaatatgtagggaaggtttgtttaccttcacttcagatgttcagcataaaatgctcactgtgctatctatcaaatattaggtagatggtgctattagttcacgtatatgcaaagataataggagcttgccggtatttagaagggtactttgtatcaatcaataattatataagatttactacaggtgagtatgctttgatgttatcttatttattgatgttattatgaaaattatataagcaactaaatgtagttgactagtaacaagagaattatgtaacttgcaggggacttcatattgaatttgggtttcattatgtacacctgttgttttcaaccattggtttatgtatgaagctttatgtaaaaaaaaaaaaaaaaaaaaaaaaaaaaaaaaaaaaaaaaaaaaaaaaaaaagaaaaaggaagaaaaaaaaaaaaaaaaaaggtttattccttttagggagggtaaattttagcttggcactggccgtcgttttacaacgtcgggactggaaaaaccctggcgttacccaacttaatcgccttgaagcacatccccttttcgccagctggggtaatagcaaaaaggcccgcaccgatcgcccttcccaacagttgcgcagcctgaatggcaaatgg

SEQ ID NO: 28851 - DNA, 643 bp, Glycine max
  Clone ID: TF_GmC368_1
cttctcataaccttcttctggagctctgtggaagttactatggacacaagcaggtctgagggaaaaagggtcatgaggtacaaagaagaagatgatgataatgatgatgaagaagaagaagaggtggtgagtgagatgggttttgaagaagatggaaggaggaataagagagtaataagagatctctatggaaagagagggtccaaaggtggaggctcaataacaccttcttgccaagtggacaattgtgatgctgatctgagtgaagctaagcagtaccacagaagacacaaggtttgtgagtaccatgccaaggctccttccgtacacatggcagggctgcaacaaaggttttgccaacaatgtagcagattccatgtgctatcagaatttgatgactcaaagaggagttgtagaacgcggttggctgggcataatgagaggcgtcgcaaatatgcagttgactagctaccatggacaatgatttcttctatgggatggacattaataatcattgaggcaagcatgtgattaatgaaattaaatttcccattcaaatcttcataaatcattgttgctggtctctaaggatgctctctatcttctgtcaagattttcatatgcaaagatttttctgttagtt

SEQ ID NO: 28852 - DNA, 1031 bp, Glycine max
  Clone ID: TF_GmC47481_1
ccacgcgtccgtacggctgcgagaagagacagaaggggctccaaacggtcctagctcaacaacaagcatatccttcatcattgtcaccacccctttgcacaatggagagggagagagcattgtttgagagggtgagaaagaatagcacagtggaagaggaagtggaaaatgaagtagaggaggaggatgaaagtggcgttagtattactgaagaagagaagaagaaaggggttggtagtagtggtgggagaagagggtcaagtggaggtagtggaggggtttctccaccttcatgtcaagcagagaggtgtggtgctgatttaactgatgcaaagaggtaccatcgccgccacaaggtgtgtgagtttcattcaaaggcacctgttgtggtggttgcagggctaaggcagaggttttgccagcaatgtagcaggttccatgacctggcagagtttgatgaatccaagagaagctgccgccgccggttggccggacacaacgagcggcgccggaaaagcaacccggaagcttccaatgagggcagcaccaaaggccatcaccctaaggaaacaacacactgcaggcttgcaaatgagagggagagaattcagatgaacctaccagggagttccggctacaagtctttcaacatcagatgaagccaaagtgttcacaaagctctctctcttctgtcaccctttggtttcttacaacccaaggtatataataaaaacccctttgtattgtatgttcacatgagcaagaatcaaaaatcccaaaaacttccaacagccaaagcctgatgtcttaatatgcaatgtaagctagctagtttcctgagctctgtttttcttatttggatagagtgccttttttttctgtttgccttatcaccattgttatcctatagaagcacccttcttgattggggtgtgctcttatcttccattgggttagaataaaaagatattgcttcttttgggtaaaaaaaaaaaaaaaaaaaaaaaaaaaaaagcggccgctttagagga

SEQ ID NO: 28853 - DNA, 551 bp, Glycine max
  Clone ID: TF_GmC39396_2
catgacttcaacttcaacaaccacctctttctctctcacttcttctcttgctcttatcaaaacaaaccactatgaataatactaacgataataatagttacaacaatacactctagcttctagcctgctacctttccttatcaccagcaccaatggcttcagacgccaaactctcctcttctgagtccctcaacggtttgaaattcggccaaaaaatctattttgaggatgttggtcttgctactccagccacctctcttacttcttcttcttcttcttcttctgctgctactgttacttcttcttcttcttcaaggaaaggaagaggtgggtctgttcaaccagctcaacctcccaggtgtcaagttgaagggtgcaaagtagatctgagtgatgcaaaagcttactattctagacacaaggtctgtggcatgcactctaaatccccttcagtcattgttgctggtcttcaacaaaggttttgtcaacagtgtagcaggtttcatcagcttcctgagtttgatcaaggaaaaagaagttgccgtaggcgg

SEQ ID NO: 28854 - DNA, 753 bp, Glycine max
  Clone ID: TF_GmC60889_1
tacggctcgagaagacgacagaagggataccattctttcccaaattatattcctaactgtttctccaggttacttttaatctgccttattggggaaaaaaaaaggttggtttaaccaattttctaatatttcaggttaatgatatttgggctcttggatatgcttcttgagctaaacagatcttttcctttttgggtcctacttctgactgtagtttttttgttccacaagtttttctgcttctgattttctaaaatagacaaccttgaaataagaggctgtatggttatggtatatagcgctgctgtaatgtttagcttactatccaggtttcatttgctggctgaatttgatgatggtaagcgtagctgtcgtaaacgccttgcaggccacaatgagcgtcgaagaaagccacaagtgggtattcactctggaaaagctgggaggttgcttcagccatatgctggtaattacttatttctgaaattgtgttatgataaagcttctctcttaagttccatccttcttggcagtacatgaagatgcatctatttctttccttgattacttttccatcatatttgctgaagttaaaaactgattatggaattgctataacttactaatccttcacaactcttgtttaactgcttgattatgaaagatacagaaattgaagcatagcaaaatatattggttcgctttcatagttcatttccacctttgcaaagagtttctctattatatatgccc

SEQ ID NO: 28855 - DNA, 1989 bp, Glycine max
  Clone ID: TF_GmC39396_1
ggacagatagtcaaaagataatatcaaataaaatggggcgggggtagcaaacatcaaagaggctgtcctcccaatcacaaataattccaaaggtgacggcaatggcaaaaaacaccatacctgtgcttaagacactactaacaaaacacactctcaggtgatattcattcggcgcctgaaagttccacaaatgaggcaaggctacccaccttgcttatcagtttgaacaaaacaaaacaacaagcaatagttatcatcaatctggtaagtaaccaagtaggcacaggtttctgctacattttattacaaagctgacaaaaaaaaaacaagtgcattaaagtgaccaatgagcagattcatatgccctggactgttctagatccatataatgcctcctgccctgttgggacaggtccagctcaccatgaagttggctattgagaggctgtgaaatctgaccgagacctagatcagggaccacctcgggcgaacagttaccagaatcaatgcccttgaaaaaccacgaggtatttggaagttgatggattgatgcaccatgagatgatgcagcaagttgtgtcaagggtgtcccgttgaaatttatcatgttactcaacccaagacttggtgctgtgtttctagaaccccatgtttgatttgacagaagagagagagcacagctcgtgtcggtgaccccaatgtaactttcccctggaggatgtcccgggctggcgaagcttgtcccacccaccgaaccttgcaagaaaaggtcagatgatgtctctgagttgccattccagctaagtgtggaggtttgatttccaggagctagctcagatgatctagctgggggttctggatccccctgtttgctttggctgtggagtcagtgccctccgcgaggtgctgccccccctctatcttcccccgcgggcgtggcccggcccgcggaacctgggcggaaccgccggctcgtgcggggcttgctccgacgttctctccggcctcccgggccccctcggcgtcgtcgtttccgttcctcattcccggtcggatggcgtccggttgagaagaaaaaagaaaaaaagaaaaaagagagggtacaatctgtctctcgtagctggcttggctccattattcttggtttttggacagacaagggtgtgtttggttctctgactacactcactcactccttctctcttctctctcagtgtacctgactctgccaccttccctacccttccaccccctcttttgtcttccactttactctcccattacaactcctttcatgaacttctatttccaacttcaaccacctctttctctctcacttaactttcccttatcaaaacaaaccacaatgaataataatactaacgataacaatacactctagacacctcaccttatcactccatcacctatggcttcagacgcaaaactctcatcttctgagtccctcaacggtttgaaattcggccaaaaaatctattttgaggatgtgggttttgctactcccgctacctctcttacttcttctgctactactgctaccactgttacttcttcttcttcttcctcttcaagaaaaggaagaggtggttctgttcaaccagctcaacctccaaggtgtcaagttgaagggtgcgaagtagatctgagtaatgcaaaaacttactattctagacacaaagtttgtggcatgcactctaaatcccctacagtcattgtaggctggtcttcaacaaaggttttgtcaacagtgtagcaggtttcatcagcttcctgagtttgatcaaggaaaaagaagttgccgcaggcgactagctggccataatgaacgtcggagaaagcccccacccagctccctcttgacctctcgctatgctagactttcttcatctgcttttgatcatagtggcagagggggcaactttctgatggaattggcttcatacccaaaacttagtctgagaaattcac

SEQ ID NO: 28856 - DNA, 931 bp, Glycine max
  Clone ID: TF_GmC38724_1
aatttcagaattaatgtatacacccactcactctagttagctagtactaaagggagcatcagcatcagcactcagtagccagcagcagcaatgggttctgcttcagtcaccaaagcaccaccctcttcctcctcatcacccaactcttcttctactgagtcccttgatggcttgaagtttggccagaaaatctactttgaggaagtgagtgttgctgcagcagcagcaacaacaactcaagggggcaacaaaacgagaggtggggtttctgcttcaaagaagggaaggggtggctcagtgcaagctcctaggtgtcaggttgcgggctgcaaagtagatctgagtggtgctaaggcttactattctaggcacaaagtttgtgccatgcactccaagtcccctactgtcactgttgctggtttggagcaaaggttttgccaacagtgtagcaggtttcatctgctttctgaatttgatcaaggaaaacgtagctgccgcaagcgacttgctggccataatgagcgccgacgaaagcccccaccaagctccatattaacctctcgctatggcagactctctgtgccctatttttgataacaatggtcgagacgatggctttctgatggaatttgcttcataccccaagcttactttgagaaatacattgccaactcaaagatcaactgagccggctccagggaaccatgctgcaacactcacctggcaaggaggttcagacactccctctgaatttttcctgcaaggatcagggagtagtggtggaacaagcttccttaattcaaaacatcccttagtggaaagttacactggagtcactgactcaaactgtgctctctctcttctgtcaagtcaaaccctgggtttcagaaacacagccccagcaacaaagtttgaactgaacaacaacttg

SEQ ID NO: 28857 - DNA, 711 bp, Glycine max
  unsure (1)..(711): unsure at all n locations
  Clone ID: TF_GmC261392_2
ccccccccaccaacacanccggggtttggagtgcttttcgcagaccctatggcgcctgtgataatctctgcaatcacttaggtcagaattgcatccatcaacagaacaacacatgttctgtgatccattctgaaggcgggatcttttcgacgaaccagatggcgatgacacggttttcgattcttttgtgtctttagcaacaatctggggctattttttccccaccaagcctcaaatccactgaagctgcttcactcttctggccttcaccattggccagcagctccaacccacgtggatcccaagcaaactctttcccatcccaatccataaccaacagttgctccccacaaaactattttttgctttatgtcccttttatgatgccaaaccaaacctaaacttgtgtaaggcactcacaaaggaatcagaacttgaatttgaatccccttggtgtttgttttcaccacaaagctgaagaagactttgacttgttgggaaccaaaaaacaggataaaggggagatcaatcaattcaacacacaagagggatattagaattgggttctgagaggaagccaaaataataaatgcatcaatttttaaagaagattgcatcaaaattgaaagaaaataaataaaaaagaaatggatattggaagatatcctgaaagattatagacatgaacgtcacctctcgagccacgcgtgg

SEQ ID NO: 28858 - DNA, 3780 bp, Glycine max
  Clone ID: TF_GmC564_1
tgttgcaggtggggttggaattggaattggttattggactttgttgcaacaagttagattttgattgatggaggctgagtttggagcgaagaatcagtacttgtatggacctgtggtgtcaggaatgaagaaagctgttgttgggaatgggaagaggagtttggaatgggatttgaatgattggagatgggatggtgatcttttcactgctcaaccactcaattcagtgccatctgattgtaggggtcgccagttttccccacctcatcctgaaattcctgcaaaaaatgctaatccatctaccaccaatttgtcttattctgttttcatctcaggtgaaggaaagagggaattggagaaaaggaggaggggtgttataggtgaaggtgaaggtgagggactgaattatgaggctggttctcttagtttgaaccttgcgggtcaaggttaccctctcatggtggaagaagaagaaaagagtggaaagaaaacaaaggtaattgggaccaatacaacaactactactactactacctctaaccgtgccgtttgtcaggtgcaagattgtagggctgatcttagtaatgccaaggattaccaccgtcggcataaggtttgtgatgttcattctaaggccactatggcactagtgggaaatgttatgcaacgtttctgtcaacagtgtagcaggtttcatgttcttcaagagtttgatgaagggaagagaagttgtcgaaggcgtttggcaggccacaataggaggaggagaaaaactcatcctgatgtctctgttgttaatgaaggctctctgaacgatcaaagggacagtaactatctgctgatgagtctgttacggatactgaccaatttgcattccaatggctcagatcatacaaggaaccaagatattctctctcatctgctgaagaacctggcaagtctggctggtccaaataatggtggaaggttagcacccttactggaggaatctaaaggcttggtaaatgctgggacgcatggagctgatcatgataaacccaaccttaactcaaatgctcctgaagcttccaggccttcttcttccatcaagacagacaatggcatcatcgctcaggaccctccaatgtcggtggtgcagtatgaaacacctgctaatggcatgacacaaaaatgtatagcttcaggtgatggagtaggaaatttaaaacctccttcaggaccactgctctcaaatgtatgtgaaccaagggacagcgttccatcccaattaactacagcagagactaaagtaggaaggggaaacttgaataacattgaccttaataatgtttacaatgatatacagaatactgttgagaatcataagaagccttatcctcctgtggcttcagggatggggtttattgaccatgcctcatggttgcaatgtgattctctcaaatcaagtcctccacagacaagtagaaactcagattcaacctctacccaatcaccatctagttccagtggagaagctcaggtatactcttgatgtaatttaaatccatttcctcttttctgaataatttaataattctgctatttactttgtatcaaaatatttagattacttaaatgattgtatagatatctttactgataaagatactattttgccaaggtcatcatttgaagtccccttttcaggttctttgccttttcattagtgtgtaggtctactttttgtggctgactcagaatgacatgttatttgtttactgtttacagagtcgcacagatcgaattgtttttaaactctttggcaaggatccatctgattttccccttcttctccgatcacagattctcaactggttatcccacagtcccacggagatagagagctatataaggccaggttgtataatattaacgatatacctccgtcttgaaaaatctgcatgggaggagctctactgtaatctaggatcaagcttgagaaagcttcttgctgcatcaaatgattcattttggagaacaggatgggtatatgcaagggtgcagcacgctgtagctttcctgtataacggtcaggtagtcttagatgtgcccttgcgtctcaaaagcccacaacattgtatgatttcatgcattaatccacttgctgttcctgcaagtgctagtgctcagtttattgtgaaaggtttcaacctttcccaatctagcacaaggttgcactgtgcacttgaagggaagtatctggtacatgctagttgtcatgatttgataggtggagctgatgcacccattcagcatctaagcttctcttgtcaaataccaagtgtaactgggagggggtatactacagatggggatcatggtcttagcagctgttcctttccatttatagttgcagagcaagaagtttgttcggagatctgcaagctggaaaatgtgattgaggaagctgaaaccactgatgatatccagataaaaaaccaacatatggaagaaaagactcaagctttggatttcttgcaagaaatgggttggcttcttcatagaagtcatgtgaaatttaagctaggttccatggctcctttccatgatctcttccaattcaatcggttcgcttggcttgttgacttctccatggaccatggttggtgtgctgtgatgaagaaactcttggacattatatttgagggtggtgttgatgcaggagagcatgcctccattgagcttgcattgttgaacatgggtcttctacacagagctgtaaagagaaactgtaggcctatggtagaactactgttaagatttgttccagttaaaacctcagatggtgcagacagtgaaatgaagcaagttgccgaagcccctgacagattcttatttagacctgatactgtcgggccagctgggttgactcctcttcatgttgcagcaagtatgagtggctcagagaatgtgttggatgcattaaccaatgatccacgaatggtgggaattgaagcatggaaaagtgcccgggacagtacaggtttgacccctaacgaccatgcttgccttaggggctattactcttacattcaactagtccagaacaagaccaacaaaaaaggtgaaagacaacatttggttgatatccctggaactgttgtagatagtaacacaacgcagaagcaatcagatggaaataggacatgtagagttccaagcttaaagactgagaagattgaaaccacagcaatgccccgtcaatgtagggcatgccagcagaaggtggcttatggtggcatgaaaacagcaatggtttataggccagtcatgctctccatggtgaccatagcagttgtgtgtgtctgtgtagctttgctcttcaaaagctcacctagagtttattatgtcttccagcccttcaactgggaatcattagagtatggggcaatgtaatgttgtatatcaggtgttttctgctgtaagcttccaccttttcttaatatattattttagaaactgggtaagtcttagattttgggtttagagtatagacatgttatacatccatagtaatagtagctgtcatcaatatatatggggaaaacccgaggttgacacttcacctgttcagaacagaatcttgattatgaaacctgtgaacctgttaaatatggggtcaatgctattaggccattatatatgtgataatagggataacgccataacagttttaagcaatttgaggaaattgccttgtattaattaatcaataaatacaagatatttacggttcagttt

SEQ ID NO: 28859 - DNA, 263 bp, Glycine max
  unsure (1)..(263): unsure at all n locations
  Clone ID: TF_700734849H1
agcacatccctacacagtggcatgccttgtggatgggtgcaattcagatcttagcaatngtagagattatccataggcgccataaggtgtgtgagctccattccangaccccagaggtcacaattggtggcttcaagcaaaggttctgccaacaatgtagcaggttccattcgctggagcaatttgatgaaagaaaaagaagctgcagaaaacgtttagatggacacaatagaaggagaaganagccccagccagaacctctc

SEQ ID NO: 28860 - DNA, 618 bp, Glycine max
  Clone ID: TF_LIB4390-055-R1-K2-H7
ctatcttctatttacgtactgctagtactatatcctgttttcatgttttttaagtagcagcattcaattggaacttcagtaaattacatcctcgattacaattatggcttatccttgttgtgtttaattagtataaaaggaacttgtgttactttattttttttcttccagattccaccttctttcagaatttgacaatgggaaacggagctgcaggaagagactggcagatcataatcgtcgcagaagaaaaactcagcagattgctcaagaaattcacaaatctcagcattctttggacaatgttgcaaggtccttacctgaatctggagctcaatcttcgtcgtcgtcggggaaggtggcagtacgtgtcaccccctgattatttccagcaacaaagaccaaaccaaaatagaggctcttcgtcatcaacaacatcgatatcagggtcattgtttttctcaggtggttagtgcatgtgggaccaatttgcatgcctaatagtaccccatgccattaattaatggaggagaataacaataatgtactgaatatctcttgtaacttccttctccatttaatttagaagctttaataatattcttgaatcactgattt

SEQ ID NO: 28861 - DNA, 1509 bp, Glycine max
  Clone ID: TF_GmC422_1
ccacgcgtccggtcttaaaggacgcgtggagcgatatagaaagtgagagagaaaaaaccacaacgtcataaaaaaaagacttaatgtgcacgccattgtggtgagatagaaagaaagatgcaaatggaattccaaggctaacaacacaacttcaacaaattagggctttattctttgcaatcatatcatatactcttcacttcactctcaaaactcccacagttgaagagacatgttggactatgaatgggggaacccgtccacgataatgctcaccggaaatgaagacagctccgccgcgggctccgaccaaacccaccgtcaaatcttcgaccactatgcgtcccacacactcatccccgaccacttcctacacgcgccaacgcactccaccgccaccaccgccgccgcaaccaccgtggatttcacccatccaccacttcaccccgcaaccccaccaccataaccacacatgaaccaccaccaccataccatgccttcttcgacccacgcgcttttcatggcgcgtcgaacacctcttaccccccacccccttccatgctctcccttgacccgctgcctcacgtcaacgctgttgggtctgggcctggacacgggcccgggccaggacccgggccaggcggacttctccttgtccccaagtctgaagaagtcggtcggcccatggactttgtcggctcacgaattggactcaatctcggaggacgaacttacttctcgtcctctgaggatgacttcgtgagccggctctaccgtcggtctaggcccgtggaaccgggttcgactatctcgtcgaactcgccgcgatgccaggccgagggttgcaatgctgatctgtcgcaagccaagcactatcaccgccgccacaaggtgtgcgagtttcactccaaagccgccaccgtcatcgccgccggcttgactcagcgattctgccagcaatgcagcaggttccatcttctttctgagtttgataacggaaaacgtagctgcaggaagagattggcagatcataatcgccgcagaagaaaaactcaacaaccaactcaagaaattcagaaatctcagccttctttggataatgttgcaagatctccaccggactccggagctcagtcttcatcgtcggtgacggtggcagtgtcgccaccggattatttccggcagaggccataccaaagcacaaacaacccttcatcgatttcaagctcactgtttttctcaagcgggtagagttcacgttggagaagtttaatttgcatggctaattaatatttgcaagaaattaacggaggagcgtcaacaataatatatagtgaactactacttccacttgtaactcccaatttaatttcaaactcttaatctcgcgttattaatttgtacgaattgtgatttaaagcatctatgttaatccctccccttaattttctataaaaatttaatagtatttgtttactgttgattattattggcccctttggggtgcta

SEQ ID NO: 28862 - DNA, 707 bp, Glycine max
  Clone ID: TF_GmC663_1
agatctcagctccagaaatcaaggattttctttgaatcatggattttagctaaataaatcataaatcttcataaatggatcaagttgctcctcctccgattctcatgcaccgcaagcgcgatctctcctacgccgtcgtttcgcctgctcccaacccgagctggagctgggactgggacagcgtgcgtttcgccggcaaaccaccgccaccactctcctccccaaacgacgacgtcgtttttgaggagagtgttgcgccgcctctgcagttaaacctcgggggaaggacgaacaacagcaacagcaacaagagagttaggtcagggtcccccggaacgtcgtcgtatccgatgtgccaggtggacaactgcagagaggatctgtcgaaggcgaaggactatcaccggagacacaaggtgtgtgaggctcatagcaaggcctccaaagcgcttctcgcgaatcaaatgcaaagattctgccagcagtgtagcaggtttcatcctctctcggagtttgatgaggggaagcggagctgccgccggagactcgccggacacaaccggcgccggcggaagacgcagcccgaggatgttacctcggcgactcccgcgccagccgccgccgcgaatttggaaatcttcgacttgttgactgccatagctggagcttcgcagggaaaatttgaggaaaaaaggtcacaagtaccg

SEQ ID NO: 28863 - DNA, 2557 bp, Glycine max
  Clone ID: TF_GmC95509_1
gataattcccccctaagacgacatcaggttgggaattcgcattttgtaaatgatatagtcaaaactaatttacacttaccacttgctatttgctaagtacatattttctttgcttgtttaagtttttggtctagcaggaaatacagctgacatggggatagaacaagtgatttaatgttgtctttgaaaaattaatcgatgttttcccttaagaattagcagttcattcatagattctgtaaaatttggggatgtttcttaaactctagcttcttaatgtgttttttaatcattggtctaccccatttatacagacgacagaagggggttgtgtgagtgcgagaaacacgaagagaggttcatgggtactagtacgaggagtacgttttcagggctcgaggataattcccctaggggcatctcagtttgcagatcacagtgaccatttgtatatgaatttctaaggtcttgtcatggagtgtaatgcaaaatctctcgggcaatgggactgggagcacttattcttcttcaatacaaaagcagctgaaaatccaaggttacaaccaactgattgtagcagtgaagcagatcgggaaatcaacgttggaatgttgtatccatcaggtggtagtgcttgttctggctctgaactaatacatgcttcttcatcaaggagctcaaaatcagcttccaacaattcatcatcaaatggggatagcagggaatctatattgactctggaaggttctcatgatgattccactgggaagaaagaattgtgcaatggagagccggttgaaacttctccagcagcagtgccctctcctgtctctggtgaaccattgctcactctaaagcttggtagacgattgtactttgaggatgtctgcaccgcaagtgattccaagaaaccatcttcctttgaggttcccattttatcagggaagaaatataaaacaagtagtcaggctgtacagcatccaagctgccaggtggaaggctgtggccttgacctctcatctgctaaagatcaccatcgcaaacaccgagtttgtgaagctcattccaaatcccctaaggtggttataactggtttggaacgccgattttgccagcaatgtagcaggttccattgctctgtcagagtttgatgacaaaaaaagaagctgtaggcaacatcattttgccacaaattctagtcgcagcaaatctcagcctgattcaatcctattaaatccatcagctttgtctacatcaccctatgatgggaggcaaatagtgaatacatttgcattttcacggactcccattgatttagcttggcaagatatgaacccccagacataagaatatttcccgaagcgtgtaaatcccagtctgtcggtaccgagtatctttgcaacactttttcatcattccaatggccatctaccatcaagagccatggtaccgacgagtactgttcaagatgttacgcgtcatcaagatactattcgtttggctgatccaaacgatacaaaggatgttaaccgttctctctctcttctgtcatcgaatatcttcatcttcatggggtgcatatgagactaagtccctttctttggaacactccactcgggcaacacactcaatcactcagcatcacttaccacttccttcctcggcagagtattggcacactgatcatcaacaacattcaagcatgtgtatctcattcacggattgcgatagcagcaatcgctttcaagactttcagctgttgagctcaccctatgaatcaccttttccttgcaaccaactggattaacaacactatgcttctacttcaacaaaatttctagggtgctgtctttcatttgcttgctttttcaaatggagattaattaaaactgcatgttgattgcagttcgaatggtgtaagacctgttctcttgaaaactcccaagacattttcattttgtaccagactgcgctcatttcaattttaactttaatttctacttaaaaaaccatgtctccaccagcaacagttttttataccttagcttcttacctatgttacgcacatctccctacttcataatactatttactcacatcccaaaacaaataaaaaatttgattttttaatataaattcattattctatttcaggcgccgcaaaactcagcctgactcaatccaattaaatccatcagctttgtcttcatctccctatggtaaaacaggatcattcccctcccttggaaaatctattgcctgtcttgctcactggttaagtttcgcagtttattattttgggaggcatattatacaaatcataatatttcccccccaattttgaatgatcaaaactggttccagcaagtgactttgttttcctttagttttgctgtcgaactgtgcttagtatttgcagcttatttcaacttatgcttggaaacgtgtaacctgtgaataaaaagaattctagtgcactaaaaaaaaaaaaaaaaaaaaaaaaatcattttatttaatgaaaagcttggtcgattttttttatttttatcggtaaat

SEQ ID NO: 28864 - DNA, 895 bp, Glycine max
  Clone ID: TF_GmC325872_1
agtcaaagaagcaatagattttattctaatcaagggggcataggggtacaccattttaagggggggcacaatagaatacatatattccaaggcacacagatacagaagaaactggctaagtacatataatatagagcttaagggaaatgaactagtattatacatacgacaccacctttagatgttgggagttcttcattctggtttagatgcttattctcgtaacataaagaaaggggcctttattatatgccttggcatgtaaactgtgaagatccattgacagaagagagggagcatgccggtgaacacattggattcatctaatatggaaggagttgtagccagaattctttgcaatgttcatctgaattcttccccagacatcagcatttctgcagtggctttctgtagggtgctgccctttgcttccactgcatccttcattgcaagtttcagcattgcttttccggcgccgctcgttatgtctggccaagcgtctccggcagcttcttttagcttcatcaaactctgccagctcttggaacctgctacattgctggcaaaacctctgcctcagtcctgcaaccatcacagaaggagccttggaatgaagctcacacaccttatggcggcgatggtacctctttgcaacagtcaaatcagcaccacacatctctgcctgacaagaaggtggaaaaaatccacttgaccctcttctcccactccctccaccacctttcttcttctcatcttctgcaagaccaccctcaccaccaaccacactttcatcctcctcttcttcatcttcaacttcaactgtgctgtctctcctcaccttttcaattgacacttgtatcctctctctactcttgatctccattgtgagtggtgg

SEQ ID NO: 28865 - DNA, 1706 bp, Glycine max
  Clone ID: TF_GmC53350_1
tttcggttctatattaatcgctttaatgtgtttttacttccataaagaatggttcaccttcttttttttctgagtgtgtagtccaatgtttctccccacttaaattttctcttttcaatcgtattgcaattgatctcagggccatcgaaaggtggtcaaagaaagactaagaaaacaaagactgatataagtgttttgtttatggactggaatttgcgctgcgagaagacgacagaaggggaagtggatcaggcaaacttacccaacatggaaacaatggaaggctcaagcagatatggaatgtatagaactaagggggaattttctgttgacttgaagcttggccaagtgggaaattctggcagggaatcatcagtgttgactaagtccaaagatggtggtgctgttggagtctccaaaatgatatcctcatcttcttcagggtcagctaagagagctcgttcccttagcaacgggacacaaacagtgtcatgccttgtggacgggtgccactctgatctcagtaactgcagagactatcataggcgccataaggtctgtgaagtccattccaagactgcacaggtcacaattggaggccagaaacaaaggttctgccagcagtgtagcaggttccattcactggaggaatttgatgaggggaaaaggagaaactctaaaaaaattataatattttccttccatgacttgcaatataccaacacactagaaagtcaatgactaaatttagtagtaattttatcaggcacacagttgctacctttctcaagttcacatgagtacccatccacaactgtggtgaatcctacttggggtggagttcttacaacttctggtgatgttaggcttcatgggcacaaccaacaccaccaccaggtgcatttggctgataaacaggacctttttcttggatcttctccagccggttacaaagaagggaagcaattggcattcatgcaaggtgaccacaccctcaacaaccggagcccacatcttccaggtgcttccgtgggccaggcccagatgtttcttaggaccagcctgtattcagaaagcgatgggctgagatgcaaaatgttctgtgatagcctaacaagttcgatccaagacaacaacacctctcgtgctctctctcttctgtcatcaccaccacaaccgctcagtcctggaaatggattaaacctgatggtgaactctcactcgccccttatgcaacccttgggcctgagcctgcatgataacagcctgggctccgtggaccctgttttgggccccaatgattcttcatcaatgtataacataggttctaatggatctcaggggaatgaggcccctccactatttccctttcaatgggaatagactttataaggggactcgtcctttggatgttgattctttccctcgtactatttcaatgttcaatttatcttttaatgaaggcaatgaaccattatctatcacgtttaacaaaatggtgtggaaattttcatgtctttaaaagtgttgctgtgtactatcaaaaactatattcccgtcacctttttgtctttttttattctttgaagcagcaccacatttcaatgagaaactctacttgctcatacaatgacatgtgccagtgcgtaacttacaaaacgcacaaaaaaaattattgaagtaatggtcctgatcggacgcgtggg

SEQ ID NO: 28866 - DNA, 1247 bp, Glycine max
  Clone ID: TF_GmC7371_4
gcaaacaagatatcctgttgattgagtaagagagggttattaaatagaatgatttaaacattaaatgtttgcatgaaaataaataacaaatgatattctgctttgttcagatataatttacaattttcagtgatttgccacatcttgatatcataattaataccatttattccctttatacacattgtatatatatgaacccggtaaataaagaaggttaaattacctactacattgttgacagaatctctgcattgcatttcccacaagcgccctactggccttggagtgcatctcacaaactttatgccgtctgtgataatccttagctttgctcagatcagcactgcagtcctccacctgacaaacagctcgatttgaagtacttcccgacactctacttttcttcccattcgtaccgtcccagctcccaacttccctatccaccactgcagaagcatggccaccaagctttaaactaagagtacccccttcctcattcaacccatcatcctccagcacaataactctccttttcttgtccccttccttgttccccttgggatccctaggatctacttcctcagaggtggaagaactgttggaggggcctccggccaccgggatcccagcggacccaatagggaaaaattgctgtcccactccaacaccgtccgccggcaccggattcagccggctagcgatgaacagatcaccatcccatctccaatcattcaaatcccactctgaggacctctttccccacacccctcaaatccgaggaagcacccacaccgcaaaaatgataagcctcagctccaaatctagcttccatggtcacaaacacaaactacacagctaaaattccagttaccagtacgaaatcaacaaaacggaatcactcacaatcatttaaccttacttcaccccccaacagccccaaaaatagcaaacccacgcaaccatgattccaattcagtccaatcagcatagccgccaccaacacttacaatctcccaagtcaaccacagtaacacaaaaaacctacctcagctcaagtaccacgacagacacaacaacctcttccttctttccttgttcaacataaattatcggcacgtgagtggtttggagtgagaagcaaagaagatcggcggcgagtggatgtcggtaagtgcgccacgcaaaatggcgaacatgttctgtggacggaaaccggacgcgtgggtcgagccggtgaattccgg

SEQ ID NO: 28867 - DNA, 348 bp, Glycine max
  Clone ID: TF_jC-gmXLIB3564P117ae07a1
ccggaactcccacaaaaaatattaattggatgatcacatcacacatatgaagatgtataatataacccccgagaaattatcagttggcaacctaacttacctgctacactgctgacagaaacgttgcataacatttcccactagtgccataggggccttagaatgaatatcacaaaccttatgccgacgggggtaatccttggcattactaagatcagccctacaatcttgcacctgacaaacagcacgattagaggcaggggtagtactagctgtaggggccccaattacctttgttttctttccactcttttcttcttcttccaccatgagagggtaaccttgacc

SEQ ID NO: 28868 - DNA, 440 bp, Glycine max
  Clone ID: TF_GmC130710_1
gctttggttataaactgtcacatgatgcttcattacatccccgatgaaaccctatctgatacaacaggcttgacctcttttctctacgattcttcttctcttgctgcttcttctgctgttagcgttactcccacttcctcactgcgatcattgttccttaagtccctgcgaggtttagacccaacggtcgtaatcttggtcgacgaagatgcggatttgacttcgaacaacttggtatgcagactaagatccgcgtttaactacctatggatcccttacgacacagtggacacgttcttgccgcgagggagcaagcagaggcagtggtacgaggcagacatatgctggaagattgagaatgtgattgcacacgaaggggttcagagagttgagcgggttgagcctaagaacaggtgggagcagcgaatgaagaatgcgag

SEQ ID NO: 28869 - DNA, 480 bp, Glycine max
  Clone ID: TF_uC-gmrominsoy069c09b1
ctgactctatgttgcagtttaaaagagggttggaggaggctagtaagtttcttcctcggaggcctcagcttttcactgggttggagagcaccgcagtgtctgcagagccaaagggaaaaggtgtagctctgaagatggagaattcaattggggtgaggagtagaaagaatcatgcgcgccaagatgaagaagaagaagaagaaagaagcaacaagcagtctgctgtgtctgcggtttgtgttgaggaggagagtgaaatatctgaaatatttgacagggtgttgcttagtgttgaaaatgtgccactgtgtgctgaaaagaatggatcagtggcacaagctgagaaatcgaatttgtctgatggagggaaggttcgatccaagaggcaagggaggaagaaggagacggtggatttgaggacccttttgattatgtgtgcacaagctgtgtctttcagtgacaacaggactgctaatgaac

SEQ ID NO: 28870 - DNA, 554 bp, Glycine max
  Clone ID: TF_15203660
ctgcagccgagagggtaggctgccaacaattcgaacgtgcaaatgggttacttctccattgtgaatggagttcaaatgccagtgcaaaccctgttcaaagagttatctttcatttcgctcgagcacttcgagagagaatatacaaagaaacaggaaggatgacagttaagggatcagggaaaaatgaagaaagggagttacttcagaagatggacaccaacattgcccttaaatgccatctaaaagttcctttcaatcaagtaatgcaattcactgggatacaagctatagtggagcatgttgcatgtgagaccaaaatccatcttatagatcttgaaataagaagtggtgtacaatacacagctttgatgcaagcactggcagagcgccgggatcgcatagtgcaacttttgaagataactgccattggacttagttcattgaaaaccatgatagaagagactggcaaaaggttagctagttttgctgaatccttgaacttacccttttcatataagacagtttttgtgaccgacattgcggaaataagggaa

SEQ ID NO: 28871 - DNA, 435 bp, Glycine max
  Clone ID: TF_LIB3092-002-Q1-K1-C1
cccacgcgtccggaaaagaaggttcacataatagactttgacatcagccaaggaactcaatacataactctaatacaaacacttgcttcaatgccaggtaggccacctcgtgtgagattaactgtggtggacgatcctgagtctgtgcagcgttccatcggtggcataaacatcataggacaaagacttgaaaagctggcagaggaactcagattgccatttgagtttcgagctgtggcgtcaaggacgtcaattgtctcaccatcaatgctcaactgtcgtccaggggaagcacttgtggtgaactttgcattccagcttcaccacatgcgcgatgaaactgtatcgaccgtgaacgagagagaccaacttcttcgcaatgttaagagcttgaatcaaaattgggacagttgtggagcaggacatgaacacaac

SEQ ID NO: 28872 - DNA, 360 bp, Glycine max
  Clone ID: TF_LIB3242-464-P1-K1-D8
aacataaatcaagtgagtttttttaacaaattatagagtaacttgactatgagttccgcgaaagaagattaggatgatacataaactaactaaaagtctgaaataacaaaaatgaaccagttgtcattgaatcatcacctccaagcacaagaggtaataagaacttgattcatccaaccaagacatagagccccatctctctcttctagagtgtaatgtccttggtagctttgctgaagattttttattgaacaagtaacaaaggagttcaatggatatggtgtgaatccggccatagtgaaacgtgatctccacttcttcagaagctcatggcgttccactctttttgccccttcacat

SEQ ID NO: 28873 - DNA, 404 bp, Glycine max
  Clone ID: TF_jC-gmst02400046a06a1
ggctcgagatttgggggcgagtgttgtgcgaagtgagggagatgcagtagaatagtaatagtggtaacaaaaggcaacagagaacaacaacctcgccgtggcggaggcgctggtgaaacagatcggcttcctcgccttgtcacaggtcggagctatgaggaaagtcgcaacctacttcgccgaagcgctcgcgaggcgaatctacagagtcttccctcagcagcactccctctcggattctctacagattcacttctacgaaacttgtgcttaccttaagttcgcgcacttcaccgcaaaccaggcgattctcgaagcgtttcaagggaaaaatcgcgttcacgtgattgatttcggaatcaaccaggggatgcagtggccggcactgatgcaagcccttgcgc

SEQ ID NO: 28874 - DNA, 773 bp, Glycine max
  Clone ID: TF_LIB5118-051-A1-PF1-F2
tttctagtactgaagtttaccccattgcttcaaagtttaggggaagtaattgatgtgtccatgcttcatgtgaagcctggtgaggcagtggcagtgcactggctgcagcattcactgtatgatgcaactggaccagattggaaaacactgaaactccttgaggagttggagccaagaatcatcaccttggtggagcaagatgtaaaccatggagggtctttcttggaccgttttgttgcctccttgcactactactccaccctctttgattcccttggagcatacttacacaatgatgattcaaaccggcaccgtgtggagcatggccttctctccagggagatcaacaatgtgttggccataggaggacctaagaggagtggtgaagacaattttaggcagtggagaagtgagcttgctaggcactgttttgtgaagcaggttccattgagtgacaattcaatggctcaagcacaattgatattgaacatgttttcacctgcttatgggtatagccttgcgcaagttgagggaactttaaggcttggatggaaggatacaagcttgtacacagcttctgcatggacctgctgtaattctagctagatatatatcttaataaaggttcatagcttttccaattgggtcttaaaagtgttcaaacttcaaagtagtagctggagatcaattgagctgtatattgagaagatagattgcaactttttaggggattaataaataattctgtagccattttcatatgttcacccacc

SEQ ID NO: 28875 - DNA, 866 bp, Glycine max
  Clone ID: TF_GmC121075_1
actcgcgtccgggcgcggccatcccatgcgagtcaaaggttaataaacctaaatggataccacgttgtttagggtagtgagtagtttccaacaccaacaccaacccgatcacgatcaatccctcaacaactccaccacaagcagcagctctcgatcctccagacaacaacaaaactatccctacccacaagaagacgaagaatgcttcaactttttcatggatgaagaagacctatcctcgtcttcttccaagcactattgtccctatcaaccccaccctccctccactaccaccatccaccactccttctcccccactccctgcgactttgaattctccggcaagtgggcccaggacatcctcctcgaaaccgcacgggccgtggccgacaagaacaccacgcgcctccaacaactcatgtggatgctaaacgagctaagctccccctacggcgacaccgaccagaaactggcctcgtacttcctccaagccttcttcagccgcatctcccaagccggggaccgaacctaccgaaccttagcttcggcctcggagaaaacatgctccttcgaatcgacccgcaagacggtgctcaagttccaggaggtgagtccctggacaaccttcggccacgtggcgtccaatggcgccatcttggaagccttggaaggcgagcccaaactacacataattgacatcagcaacacctattgcacccaatggccaaccctcttcgaagccttggccactcgaaatgacgacactccgcacctccgtttaacctccgtcgtcaccgctgacgccaccgcgcagaaactcatgaaggaaatcggcgccagaatggagaaattcgccagactcatgg

SEQ ID NO: 28876 - DNA, 530 bp, Glycine max
  Clone ID: TF_LIB5068-031-A1-XP1-G9
ttccggatatatctcttaacattgttatcatgcattaagagagcatgcatacatgccactcccatatcatagcctccctcacctattttctttgttctaacgcttttgatatctttctctactcaaaacgcatctgcattgatcttatatgccttcccatgtttgttcccaaaactgaattcgaacaccttagaaaaacccaagctttaagaagtttcagttatgcatccttgatgttcagaaaaaccggcccattgtggttcacttcttgctccacgatagtcacacccttgggcttcaatttcttgaccgtgtccacggatcagttcattaattaatgggatttttttaatctttttttgtgtttttgttgttaatttttagtgtgcgtgtctgatcgccattgtcgatatattgtacactgttgtaacactctgtttagcatgcattttgtatgttttgtaagtgttgctagacatttttaatgaatgatcgttgacaaaagaaaaagggtttggctgaagcaccac

SEQ ID NO: 28877 - DNA, 611 bp, Glycine max
  unsure (1)..(611): unsure at all n locations
  Clone ID: TF_LIB4281-013-R1-K1-H3
ccacgcgtccggtccatacttcaagtttgggtacatgtcggcaaatggagcaattgctgaagctctgaaggaggaaattgaagtcacatagttgactttcagattggccagggaacccagtgggtgagcttgattcaggctctagctcaccgccctggagggcccccgaagatccgaatatccggtgttgatgactcctattcggcttatgccaggggaggagggcttgatattgttgggaaaaggttatctgcacatgcacagtcatgtcatgtgcctctttgagttcaatgctgtaagagtacctgcttctcaggtgcaacttgaagaccttgaacttctcccttatgaaagctgngggcagtgaacttcgccataagtctgcaccatgtgccagatgataagtgtgaacagtcacaatcatcgtgaccgattgttgagattggcaaagcgattatctcctaaagtggtgactctggctgagcaggaatttaacaccaacaatgcgccattcttgcagcgctttgatgagacaatgaagtactacttggctggttttgaatcgattgatactgttcttccaggggacncanaganaagattaatgtgga

SEQ ID NO: 28878 - DNA, 1366 bp, Glycine max
  Clone ID: TF_GmC30861_1
cccgtcccgacccacgcgtccgcccacgcgtccgtacagctgctagatttttctccaagggggcagtttctataataatggaagggcaatttctccttcattaatttatatgcctatgcctaagttttttcacaattggaatagccttgtcttctacactcccccaagctcttagattctaatccactgtggttttccaacctcagaatttcctcaaaacttggtgatgctggctagaacatctgtaacttcatcaaacaaaggaaaaagaagaagaaagaaagtacttctccaattgctattactgcttttctgacagcagattatgtgaaaccagaagagagaaccttgagaagtcaggactatatctgtttccttggcatcagtatcaattaacagctttctctaggctactattgtccattgttgtgcttctacatataatctgttggaagagatcagttgaagtactacaacacagttgagtcccggcaattctataatgcaggcatcagagcaacatagaaattcaagtatgtactatcaaccattacaacaaattgaagcgtactgcttgccgcagtatcggacactaaatccgcagctatactaccatgatggaggccatggaactcagttttcaactccaagttcttcagaactttactgcactttggagtcatcttctgtagctctttacaactccccttcaactgttagtttctcacccaatggtagccccatatcgcagcaagactctcagtcatatccacctgaccagtatcattcccctgagaatacctatggctctcctatgagtggctcctgcataactgatgatttaagcagcttcaacttgaagcacaagctgagagagttggaaagtgtaatgcttggccctgactctgataatcttgatagttatgacagtgccatcagcaatggaaacaactttgttccactagagatggacggttggaaacaaacaatggtggcaatttctagcaaaaacctaaagcatatccttattgcatgtgccaaagccatttcagacaatgatttgctaatggcacagtggctgatggatgaattaaggcagatggtgtcagtttctggcgatccgtttcaacggttgggagcatacatgttggaaggacttgttgcgcgattggctgcctctgggagttcaatatacaaatctttaagatgcaaagaaccagaaagtgctgagcttctctcctacatgcacatattgtatgaggtttgcccctacttcaagtttgggtacatgtctgcaaatggagccattgcagatgccatgaaagatgaagacagagttcacataattgatttccaaattggtcaa

SEQ ID NO: 28879 - DNA, 491 bp, Glycine max
  Clone ID: TF_jC-gmfl02220090c02d1
ggctcgaggaggcgaagaagatgggtgtgcagatggagtgaggcttgttcagcttctaatagcatgtgcggaagcggtggcttgtcgtgacaaatcacacgcttccatattactatccgaacttaaagcgaatgctttagtgttcggatcctcattccaaagagttgcttcctgtttcgtccaaggcctgatcgagaggctcaatctgattcagcccatcgggcctgctggccccatgatgccctccatgatgaacatcatggacgtggcctcagacgaaatggaggaagcattcaggttggtttatgaactgtgtccgcacatccagttcggacactatttggctaattccacaatattggaagcctttgagggtgagagttttgtccatgtcgtggacctaggcatgagcctgggtctacgacacggacaccaatggagaggtctgatccagaatcttgccggtcgtgtaagcggcgaacgtgttcgtc

SEQ ID NO: 28880 - DNA, 990 bp, Glycine max
  Clone ID: TF_GmC890_1
cgtgaaggagcacgaaacggtggctgtgaactgcgttttgcagcttcacaagacactctacgacggaagcggaggagccttgagggacttcttgggtctaatccgcagcacaaatcccagcgttgtcgtggtggcagagcaagaagcagaacataacgaaaacaggttggagggaagggtgtgtaactcgttgaaatactactcggcattgtttgattccattgacgagagtgggcttccgcaagagagtgcggtgagggtgaaaatagaagagatgtatgctaaggagataaggaacattgttgcttgcgaaggaagggagagggtggagaggcacgagagtttcgggaactggaggaggatgatggtggagcaaggagggttcagatgcatgggtgttactgaaagagaattgagccagagccagatgctgttgaagatgtattcttgcgagagttacagtgtgaagaaacaagagaaggaaggagcaacaggagttacacttagttggttagagcaacctttgtacactgtctctgcttgggggcctgttgatgctgctgcgggtacctcgtcctcgttttctcagccaagttgattttgattggtgattggtgattctttcttcataattcattccttcagagtatgaaatacagacacaagaaaggtaaggggtcaggggagagtcgagagtacaagagtattattctttgtaggtagggaaaattgtcattattattattctttcattctttgttgcagataagaatttgcctagcccaaagattagttggtgcaatttgtatcaatacagtaattgccttctgttctttatttttattattatttatagtcctgatgatgtctagatgataatatttcatacatttgaggtcaatttctgatcattgttttattcttttgtttatgtaagctgaaattctttcccaagtccttgtgattgaaatgaaatgaatgaattcagtg

SEQ ID NO: 28881 - DNA, 353 bp, Glycine max
  Clone ID: TF_LIB3139-046-P1-N1-E1
tccaccctaagtaaagtaacatggcttcaccaaggtgtccacccagagaaaatactaagccacaagaatttaaactccacacccaagaaagagctgtcaagcgtgcaatgtgtggaagtgaggttgaactagaaaaccttgtaattcaaccaggggaagcactagttgtgaacttcccttttgttttgcaccacatgccagatgagagtgtgagcacagagaaccacagagacaggctattgagattggtcaaaagcttgtcacccaaggttgtgacacttgttgagcaagaatccaacaccaacacttctccctttttccaaaggtttgctgagaccttgagttactacact

SEQ ID NO: 28882 - DNA, 990 bp, Glycine max
  Clone ID: TF_GmC151_1
tcggccatagcatcgcgaaactgggaaaccattcaaattgaagacctcaaaattgagcgcaatgagctgcttgctgtgaactgtctggtaaggtttaagaatttgcttgacgagtcaattgaagtgaacagtcccagaaatgctgttctgaatttaatcaggaagatgaaaccagatatttttgttcacagcgtagtaaatggatcttataatgctcctttctttctcacacgcttcagggaggcactgttccattattcttcaatttacgatatgtttgatactctcatatcccgtgaaaatgaatggaggttgatgcttgagagagaatttttgggccgggagataatgaatgtggtagcatgtgaagctcttgagagggttgagaggcctgagacatacaaacaatggcaggctaggaatactagagctggttttaagcagctcccactggataaggagataatgaccaaatttaggggcaaattaagggaatggtaccacagggattttgtctttgatgaagatggaaactggatgcttcaaggttggaagggtcgcatcattttgtatgcttcaacttgttgggtgccataatgatgtgtgtgactcaactcttggtttctgaattcatactggattgaaggtcaccttcagctgttgtgaactgtgatgaatattcttcccaggtttgcaccaagtgaccctgtataatagtggtagaatttccacccagattagcatcaaatcctacaatgacaaggacgcgaacattagtagtcagatacaatgacaaggacgcgaacattagtagtcagattgttatttacgatgtttttccttccctttcctttttctgaccgacatgtattataggcacttcagatcttaaaaagtagcaaattggttaaaaaggtttttgcagagtagtatcttgtatcgttagccactgatttgattgatttgaaatggatgactatttcatttagt

SEQ ID NO: 28883 - DNA, 2298 bp, Glycine max
  Clone ID: TF_GmC374_1
tcgcccacgcgtccgaaacaaccccttcttcacgttacctacgttttcattcaaaaccacagtacgacatcgaaaaaaacaaaaaagtcataatatatatcaacaaaagggaacgatattttcagcaaagttttgctctccacgtttattgaatcaaggtcttttctaatgctaggtgttgaatttggttaaccagtcttggaggtttatctgctattattaaaagtgttgggatacaagtaccaagcagaagtttgccaaggcagctgcttttagctgatgccatcatcatagtatggacttgaatcaatttttaaattttaacgttattagttcggaaggattcccttgcacatcgtcttgtactcctatttcaccaatatccaaccagttgcttggatccttgaaacttgacataggaaactcacctaactcggccctttctagtcattttgattctgatactctttcttctgcattaagtgacagtcaggaattgcacacctctggggaaattcactctggtgtcaactcttgcaagtctttgcaggaaagcaatcattatttgcacaggccagtctcatttgtagaccatctccaagacggtttacatctatctactaggagctttcttccacaggatgcaagttatgaccatgaaactagacatgcattgctggaattagaaacagctttgatggcacctgatggtgaagatcaaatcaccacatcaagcacttctttgggtgttggcagtagaccaacaacatcttgccaaagaaataggtcctggagctctgagggccagtcaagtgatgttgcacatgtagagaagcaccacaaatcagtggaggaagaatcgctgcaaggatttccatcatgcaatttgaaacaattgctgattgtatgtgccaaagccttgtctgaaaacaacatgcaacattttgatcaattgatagaaaaagctagaagtgctgtgtctataactggggagccaatccagcgccttggtgcttatttggtagaagggcttgttgcaaggaaggaggcatcaggaaataacatctaccatgccctaagatgcagagagcctgagggaaaagatttactctcttacatgcagctactgtatgaaatctgtccctacttaaaatttggttacatggctgccaatggcgctattgctgaagcatgtaggaatgaggaccaaattcatatcatagactttcagattggtcagggaactcaatgggtgacacttcttcaagctcttgcagcaagacctggtggagctccccatgtgcggatcacagggattgacgatcccctttctaaatatgttcgtggtgatggactggaagctgttgggaaaaggttggctgcgatatctcagacatttaacatccgagttgagttccacggcgtgcctgttttagctccagatgtgacaaaagacgtgcttgatgttaggcctggtgaggctttggctgtgaacttccctttgcaactccatcatacagctgatgaaagtgttgatatgagtaatccaagggatggacttttgagattggtgaaatcactttctcccaaggtaactacattggttgagcaagagtcaaacacaaataccactcctttcttcaacaggtttatagaaaccttggattactacttggcaatgtttgagtccattgatgtgtctcttccgagaaagagcaaggtgcagattaatatggagcaacattgtttggctcgggatattgtcaacattattgcttgtgaagggaaggaaagggtagagagacatgagctgttaggcaagtggaagtctaggttaacaatggctggctttcgtcaatatcctttgagttcttatatgaattctgtcataagaagcctgctgaggtgctattcaaaacattataatcttgtggagaaggatggggccatgctactgggatggaaggacagaaatttgatttcaacttcagcttggtattgattacatgcagataggaaataatgcagtggtagaaatatgttgccgactgaggtttatgttgatttctagggccttgtgttccttaccattgttctaaaggtcattatttgataaattagtctattgagtttcatgtcatagtgatgcagataactgcataccaattcttttataaactatttaggtatgtacagtgttttgatctacaaatattgtacttgtacctgaaacttatccttggtatccaatataaattaaatgaattcacagtaaggttattgacaaaaaacaacaag

SEQ ID NO: 28884 - DNA, 685 bp, Glycine max
  Clone ID: TF_GmC359_4
gatggttgagagagagctttatggcagggagattatgaatgttatagcatgtgaaggttctgacaggattgagaggcctgagacctacaaacggtggcaggttaggaatatgaaggctggtttcaagcagctaccactgaatgaggaattaatggccaaatttaggagtaagttaaaggaataccacagagattttgtcttagatgaaaataacaactggatgcttcaaggttggaagggccgcattttgtttgcttcctcttgttgggtgccggcataatgagatgctactgtgactcggttcagaattcatactatactaaaggttctgatattcttggtctggctacctacttactctaccttcagcttttgtgatgaagattgtaccaagctttgcaccaagttccttggtaaaattatagcatcacttttctggtagattaagacttgtgaaggtaatacaatttcgttagtgatattgataagaagggcatattagtcatcagagtaggagggccattatagcatgtttgcccaagtacataaaatcctattattgagttattttctctttaaccaacatgtatcaggcatttcacgtccttctatttaagtttgttaatttcttttacaggatacttgtcttttgagacaaattagttgagaagatgtgattaatttg

SEQ ID NO: 28885 - DNA, 614 bp, Glycine max
  Clone ID: TF_GmC359_5
acgagggttgatgcttgagagagagcttttgggcagagagattatgaatgttatagcatgtgaaggttctgagaggattgagaggcctgagacatacaaacagtggtatgttaggaatacgagggctggtttcaagcagctcccgctaaatgaggaattaatggccaaattcaggactaagttaaaggaatggtaccacagagattttgtcttcgatgaagataacaagtggatgcttcaaggttggaagggccgcattttgtatgcttccacttgttgggtgccagcataatgagatgctactggacttggcttataactaatattagactaaaggttctggtatcctgtgtttggctacctacttgcttaactttcgggctgtgataaaagattgtaccaagttttgcacgaagtcacttgcaacttctgtgaaactcatgatttcccctcagcatctctagaattttctggtagctaagatgctttcttattttaagtaccattaccaagttgatatggcctattcacataacctgataatgtgttggtcctgaaagcttttccccgtgattgtttgcatgcttgctgagtaatctgttggatgtggctcg

SEQ ID NO: 28886 - DNA, 540 bp, Glycine max
  unsure (1)..(540): unsure at all n locations
  Clone ID: TF_LIB3138-095-Q1-N1-E2-F2B
aaaatgaaagcagtattcacattattgactttgggattagctatggtttccagtggccttgcctcatccaacggctttcagagaggccgggcgggcctccaaagcttcgtatgatgggaattgatcttccccagccgggatttaggccggcggaaagggttgaggagacagggcggtggctggagaagtactgcaagaggtttggagtcccatttgagtacaattgccttgcacaaaaatgggaaactataagacttgaagacctcaaaattgataggagtgaagtaactgtggttaactgtttgtacagattgaagaacctatccgatgaaaccgtgactgccaactgtccaagagatgctttgctgaggttgatcaggaggatcaatccaaacatcttcatgcacgggatcgtcaacggcacttacaatgcaccgtttttcgtgacaaggttcagggaagcactcttccacttctcatcattgnttgacatgtttgaagccaatgtgcctcgtgaagatccatctangcttatgattg

SEQ ID NO: 28887 - DNA, 2139 bp, Glycine max
  Clone ID: TF_GmC640_28
ccggtccggaattcccggggcgaccacgcgtccgatcccctcatggtgtcaacatctgtgtgccctggtgtgttcacttctcagcagcagcaggagtttggagtgggggatgagaagcctcaggttattaatccacagtttatgttgaaccagaaccaagttcagttctcagagaatccttctttctttgtgccattgatgtacccccaggtgcaggtgcaggagcaacaggttttctctcctccgcatcaatcgaaacgccctctctttgacacgattggtcacaattttcaggctccaaggttgccccttttggattcagggcaagaggtgtttggtaggaggcagcaaacacagctgccattgtttcctcaccatatgcaacaacaacaacaacaacaacaatcaatgggtttgccatctgctaaacagcagaaggtgagttccaccggagacgatgcaagccaccagtttcaacaggctatatttgatcagttgtacaaaactgctgagctcatagaagctggtaatccggttcatgcgcaagggatattggcgcggctcaatcaccagctctcccctataggtaagccttttcagagggctgctttctacatgaaggaggctttgatgtcactgcttcattcaaatgctcacagtttcatggctttttcgccaattagtttcatactcaaaatcggagcttataagtccttttctgagatatcacctgtacttcagtttgccaattttacttgcaaccaagccctcattgaagctgtggaaaggtttgaccgaattcatgttattgattttgatattgggtttggagtacagtggtcatcttttatgcaagagcttgccttgaggagtagtggggcaccttcactcaaggtcactgccattgtgtcaccctccacttgtgatgaggttgagctcaatttcactagagagaatttgatccaatacgccaaggacatcaacgtgtcattcgagttaaatgtttttagtattgaatcattgaactctgcttcatgtccactgcttggtcaattctttgataacgaggcaattgctgtgaatatgccggtttcaagcttcacaaactatccatcgttgttcccttctgttcttcattttgtgaagcagctcaggccaaaggtcgtggtcactttggacagaatttgtgatcgaattgatgtaccacttcccaccaatgtagttcatgttctccaatgttattcggccttgctcgaatctctggatgcggtgaatgtgaatcttgatgccctccaaaagattgagaggcatttcatccaaccagccatcaagaaaattatacttggccaccaccattctcaagaaaaattacccccatggaggaacctcttcatacaatctggattctctccattcacatttagcaacttcacagaagctcaagctgagtgtctagttcagagggcacctgtgaggggatttcatgtggagagaaagccttcatcacttgttctatgctggcaaaggaaagaactcatctcagtttctacttggagatgctgaggagcagcagcagaagctaattaccttatatttttaaaggtgcatggtaacttacattgcagtttatgtaattgtttgtgtaatttttaggcttattgatgagatccacacccaaatgttttcttaactacatgggttggaatctatcattctatagttctattactagtacgtcactttgaacatgggtagtaattatgcctttccccattcccatcatctaagatgagtaactgtttctttgttatcttctagacaaagcaaactgcttagtaagaaaggaacaatttagccaagaatgcagcctctattttcttcttcttggtttattatattctttcttaattaatgtatgatgacctgaatttgggatacgtgattttaatatgcagcatgaaaatcttgtgccaattcaattatccaaatattagtttttgcgtggtttgagtgaaaagctggaaagattataattggttcatttgtagtctttaaggaaagacacccaaaacaaactcatgtatagtacttttgtttgtaatttaagaatataattcgttgtttgagtgttgatttata

SEQ ID NO: 28888 - DNA, 2257 bp, Glycine max
  Clone ID: TF_GmC978_1
ggaggtgtgaaggacaacgtaacaataaagacaaaagggacccttcacgcattgtcgacaacgtagtcatgaacaagtcgctgaaaccagaagaacaagggtccaaacattgaaactcattcccattgaagctgaacaaccaaccccattttggttctgattttttcagtgctccaagtggcaagttttggaattttctgggggcttcgtctggattattcttcaatttgaaaacccaccaagggatgagcgtttcctcgttgcaatgactacttctggtgctgacctggttttgaagggtcgacttctgtaaattcttcacccctgcagttcttctccatgatgtcactttcacctagcttaggttctcccaacaatctcttgttggcaagttttggaattttctgggggcttcgtctggattattcttcaatttgaaaacccaccaagggataagcaagcgtttcctcgttgcaacttgcaacttgcaatgcctacttctgttgctgacctggttttgaaggatcgtcttctgtaaattcttcacccctgcagttcttctccatgatgtcactttcacctagcttaggttctcccaacaatctcttgtttagggaaatgaaatccgaggaaaggggtttgtacttgatccatttgttgctcacttgtgcaaaccatgttgccgcgggggtccctgaaaatgcaaacaccacacttgagcaaatttccatgcttgcttcccctgatggggacactatgcagcgaatcgcaacatattttatggagtcgcttgctgatcggattcttaaaacatggcctgggatccacagagccctcaactcaaccagaatgactttgatatccgacgaaattctggttcagaagcttttctttgagcttttccctttcttgaaggtagcatttgttctcacaaatcaggccatcattgaagcaatggaaggggagaaagtgattcacataattgatctcaatgctgctgaagctgctcagtggattgctctccttcgagtattaagtgcgcatcccgaaggccctcctcatttgagaatcaccggggttcatcagaaaaaggagattctggatgaggtggctcatagactaactgaagaagcagaaaagttggatataccgttccaattcaaccctgtggcaagcaaattagaaaatcttgattttgacaaacttcgggtgaaaactggggaggcactagcaataagttccattctccaattgcatacccttttggcctgggatgatgaagccatgcagagaaagtctcctcttctgttaaaaagctcaaatggaattcacctgcaaagagttctgccaatgggccaaagcacattgggtgatttgcttgagaaagatatggttaatgggtacactccaagtcctgactcaacctcatcatctccatcatctttaactacttccaattcaatgaaaagggagcgctttcttaatgccttgtggggattatcaccaaaggtcatggttgtgacagaacaagactgtaatcacaatggtccaactctgatggataggcttcttgaagctctatactcttatgcagcattgtttgattgtttggaatccactgtctcaagaacatcattggagagattaagggtggagaagatgctttttggggaggaaataaagaacatcattgcatgtgagggatctgaacgaaaggaaagacatgaaaagctggaaaagtggttccagagatttgatctagctgggtttggcaacgtgcctttgagctactttggtatggtgcaagcaaggaggttcctgcagagctatggttgtgaaggatacagaatgagggatgaaaatggttgtgtgttaatttgctgggaggatcggccaatgtattcaatatcagcttggagatctaggaagtaagagaattagagggatatattgatgttttttcttttcttttctttctttctttttatttgtatgagtgttttattcttatggtaatgactgttcttcaagatagttttttagagatactctttattcattgcctggtaaaactccatcaagtaagaaatttgggaagacaaaaaaagggtagaaggacggaagaagtagaagtcttaatcggggttctgtttatggtttcattttttgcagctgatcattttattttttatgaattatgagctcctgtaccctaacttgtacctagtatattacataatataatgtgtttttgttt

SEQ ID NO: 28889 - DNA, 459 bp, Glycine max
  Clone ID: TF_LIB3242-303-Q1-J1-D1
ctctactgctgatgacagctactaattgaagaacaagcttagagaactcgagatttcgttgttggggcctgattcagacattgttgacagttgcggctgctcctacaagggtggttgccacggagcatctccaatggctaaatacaattgggatcagattgtggaaatgattccaaaattaaacttgaaagaagtcctcattcggtgtgcacaagccgtggctgatgatgatattgaaacagcagtgggatttatgaacaatgtattggcaaagatggtatcagttgggggtgatccaattcagaggttaggtgcttacatgttggagggtctaagagcaaggttggagtcttcagggagcataatctacaaagccttgaaatgtgaacaaccaacaagcaatgatctcatgacttacatgcacatcctgtaccagatttgcccatattggaagtttgc

SEQ ID NO: 28890 - DNA, 2146 bp, Glycine max
  Clone ID: TF_GmC1018_5
aagctgcacaaattaatatccaacactctcaagctttccactttcaaactctgcccgctcaatttgctttatctttccgagatttatatacacttttattgaaactgttgggattcaagtctgaaacaaaatcttaagaagtttgcggcagctgatgccatcatcttttagtatggattcgcaacagctcttcagtttcgaattaccttacatgtcatctttacccaccgttccatcgcttcttggatccttgaaatatgacacaggaaactcacctaattcacccttctccacttattttgattctgacactctttcggcattgagtgacggccaggagcaatacagccctggagaaatcctctctggtgtcagcccctcttgtaactcttctctggaaaccaaccattatatgtatagatcagtctccactttggacagtttcccattatattctgataggaactctcttctacagactatgagttctaatcagaaaatccaacatgctttgctggagctagaaactgctctgatggcacctgatgacgatcaagttaacacaccgaatacattggccgagagcagcaggccaatggcatcaggccagagatccaggtcctggagcaatgagaaccatgtgtcacaatatactcaaactcagccatcatatgcaactgccaatatgcagtcaagtgaagttgtgcacgtagagaaacggcaaaagttgatggaagaagcaacgctacaagatttcccaccaaacaatttgaagcagttgctgattgcatgtgccaaagccctgtctgaaaacaacacgaaagattttgatcaattggtaggaaaggctaaagatgctgtgtccatcaatggggagccaatccagcggcttggtgcttacatggtagaagggcttgttgcaaggatgcaagcatcggggaatagcatctatcatgcccttaggtgcaaagagcctgaaggtgaagagttgctcacttacatgcaactgctgttcgaaatctgcccctacttaaaatttggttacatggctgccaatggagccattgcgcaagcatgcagaaacgaggatcacatacacatcatagacttccaaattgctcagggaactcaatggatgactcttcttcaagcccttgctgcaagacctggcggtgctccccatgttcggatcacagggattgatgatcctgtttccaaatatgcccgtggcgacggaccagaagttgttgggaaaaggttggccttgatgtctgagaaatttggcatcccagttgagtttcatggagttcctgtttttgcttcagatgtgacaagggaaatgcttgatatcaggccaggagaggccttggctgtgaacttccccttgcaactccatcacacagctgatgagagtgttcatgtgagcaacccaagggatggacttttgagattggtaaggtcactttctcccaaggtgaccacattggtggagcaggaatcaaacacaaacacaacccctttcttcaacaggttcattgaaaccttggattactacttggcaatctttgagtccattgatgtcaccctcccaagagacagcaaggagaggattaatgtggagcaacattgtctggccagggatattgtcaatatcattgcttgtgaaggcaaggaaagggttgagagacatgaactgttcggcaagtggaagtcaaggttaaagatggccggcttccagcaatgtcctttgagttcttatgtgaattctgtgataagaagccttctgaggtgctattcagaacactatacactggtggagaaggatggagccatgttgttagggtggaaggacagaaatttgatatcagcttcagcctggcattgctaaaacatagactgtgtagtagtagaaatattatgatgatgggggaagctgaccacggtttatgtttcattgccagtgctatctcatctcatgtactagtgtagtagtacattgattcttttataaaatgtcacgtatgttaactgttcttgttctataaatatttcgatcttgtgcctgatccctatgaactatgggaatcacaaaattttgaactgactgtctcaataaaaacattctttagggggtagacttcggtgc

SEQ ID NO: 28891 - DNA, 2601 bp, Glycine max
  Clone ID: TF_GmC589_1
cgttccagattctcagattgtcttcatgattgcaattttataataagataaaataaataaataaacatattggcctctttagactataacaccatatgttcataaattcatattatctttttatttgggtttctcaattgctcctaacttacctccaatcttaattctttggaagcttcaaacttaaaagtcttgtttgttatctttttcttcccttgtctacatctatatttattagaatttattggttgtgcatatcaattccaaagtaccctattgttcattttttttttttctgatttattgctattccaccaatctgaccttcctaaggaaaccaattttttaatatattaaggagacatcaagagattgtcttgccctttggtttgctttaatcaaacgctcaaccacttggtcaaaagccttatctgagtttccttctgtgtctctaggagcatcaaccttatctgtctcaagttgcatcagcaaagtcatcttagaaggttcaacaagattttatcagtgagcacttgttttactatttctcaagactgaaattttgtatgagctgagtgaataaaaggagaactatgtcattggttatatctacagagttggctgatacatcatatgggaatgccaagctctacacactaaagggaactgatgttacaccagatttgtcctcccacaattttgcaccagataagcacagaaacatgtacatgacaaagtcatactcctgtgagagttatgaaaagtacttccacgattcaccaacagaagagctgatagaaccatcaagttccagcatatcaggaaactcagttcaccctgatggtgcttcttcttacctgctcagagctagttcaggagcttctgtgattgttaataacccatttgacacttctatctggtctacaaggcatcgcgatgcctatcagtccaattctgtatcagatttcgtggaaaatgggagcccggatggccttgacttcgatggtgaaatgagactaaaacttcaagaattggagagggctttgctttctgatgaagaagaggaggagcaaggcatatttgagactgttcaaagcatggagattgatcctgacatggtcgagtgggccaatccgcttcaagatatgctgctccatgactcaccaaaggagtcctcatcctcagattcttccaatcttagcagcatcagtagcaccaccaaagacacatcacaaaactcaccccaaacccctaagcaactgctttatgattgtgctaggatactttcagaaggaaatgaacaggaagccacatctatgataaacaagctccggcaaatggtctcaattcagggtgatccttctcagagaattgcagcttacatggtggaaggacttgcagctcgtgtcgctacatccggaaaatgcatctatcaagcattgagatgcaaggaacctccttctaacgatcgcttagcagcaatgcaaatactatttgaggtctgcccgtgttttaaatttggatacatcgcggcaaatggtgcaatagctgaggctgttagagatgaaaagaaggttcacataatagactttgacatcagccaaggaactcaatacataactctaatacaaacacttgcttcaatgccaggtaggccacctcatgtgagattaaccggggtggatgatcctgagtctgtgcagcgttccattggtggcataaacatcataggacaaagacttgactcgagccgctcgagccgattcggctcgagtgagtttcgagcagtggcgtcagggacctcaaatgtcacacaatcaatgcttgactgtcgtccgggggaagcacttgtggtgaactttgcattccagcttcaccacatgcgcgatgaaactgtatcgacagtgaacgagcgagaccaacttcttcgcatggttaagagcttgaatccaaaacttgtgacagttgtggagcaggacatgaacaccaacacctccccttttctcccaagatttgttgaagcctacaattactactctgctgtgtttaacacacttgatgcaactctccctagggagagccaggacaggatgaatgtcgaaaggcaatgcctggcaaaggacatagtcaacattgttgcttgcgagggtgaggaaagaatagaacggtatgaagtcgccggaaaatggagggcaaggttgtcaatggctggcttcactccatccccaatgagcacaaatgtgagagaagcaattaggaaactcattattaagcaatactgtgacaaattcaagataaaggaggaaatggggggtcttcattttgggtgggaagacaaaaacttaattgttgcttcagcatggaagtgaccaatacaaattcttttgttgcatgagactcattgtagtgttgatgtagtatttgtttgcttgtttagtttgtatctgttatgtttatgcttggttcagactcagatgtatactaacgtgcaacttatgctaatacatactttcatgtgtatggcaacacaaaacagctatcaatgcttaggcttgtaatgacatcattttcttgttagttagcatataattttgcgtttcc

SEQ ID NO: 28892 - DNA, 1900 bp, Glycine max
  Clone ID: TF_GmC6703_1
ctcacacactcacattgtttatttgatgtgggttaaatggataccttgtttagactagtaagttttcatcaacagcaacaaccacaacaacaacctgatccatccctcaactccaccaccagcagaacctccagcagctccagatcctccagacaaaactactacccttattcccatcaagaagaagaagaatgcttcaacttttacatggatgaagaagacttatcctcgtcttcttccaaacactactaccacccttatcaaccccatcatcatcaacaacacaacgtatccaacatttctacaaacaccttcagcaccacccctaacactgattactcctactcctactccttctctcccacgcaacctgttcaagacttcaacttcgaattctcctcccccaactggtcccacaacctcctcctcgaatccgcacgcgccgtcgccgacaacaactccacgcgcctccaccacctcctctggatgctcaacgagctcagctccccctacggcgacaccgaacaaaaacttgctgcgtatttcctccgagccttgttcagccgcgtcaccgaagctggcgaccgaacctaccgaagcttagcttcggcgtctgagaaaacatgctcatttgaatccacaagaaaaacggtcctgaaattccaagaagttagcccttggactaccttcggacacgtggcatccaatggcgccatcttggaagccttggagggaaactccaaattgcatatacttgacatcagcaacacttattgcacccagtggccaatgcttctggaagcattggccactcggagcgaagaaactccacacctatgtttaacaacaattgttactggttctagaatcggtaacaacgtccagcgcgtgatgaaggaaatcggaacgcgaatggagaaattcgccagactcatgggcgttccttttaagttcaacgtcgttcatcactacggcgatctatccgagttcaatttctcagagcttgatatcaaagacgatgaggctttggctgtgaattgtgtgaactcgctgcattcggtttccgcgctaggaaacaaccgcgacgcgttgatatcggcgttgcaagcgttgcagccgcggattgtgacggtggtggaggaggaggctgatttggacgttggaatcgacggttacgagttcgtaaaaggctttgaagaaagtttgaggtggtttagggtttactttgaggctttggatgagagttttgtgaagacgagcaacgagaggctgatgctggagcgcgcggcggggagggcggtggtggacctggtggcgtgctcgccggcggattccgtggagcgccgcgagacggcggcgcggtgggcggcgaggcttcacaacggagggctaaacgcggcgccgtttagcgacgaagtttgcgacgacgtgagggcgctgttgaggaggtacaaggaagggtggtcgatggcggcgtgctccgacgccggaatattcctctcgtggaaggacacgccggtggtgtgggccagtgcatggaggccataacgtaaagatcgtatcataatagtatcatttggctttgacatgggtgaatccctcgcacgtgttctcggtttttttggcacgtgcggaaggatatatattgatggagttttttttcttcttttcagtattattaattattattattattgggctttatttcctatttttgttcttttggttaaatatatataagtttggtaagacaccgggattcatgggcgtttgcttgtgttgaaaaaggaactaagtaaattattattttcttaactttttatgattgatttttttgtttaccaaagaatagcttgtgtctttggatcgatatttgtatgacatgtttttcaatcgcttc

SEQ ID NO: 28893 - DNA, 2219 bp, Glycine max
  unsure (1)..(2219): unsure at all n locations
  Clone ID: TF_GmC1116_1
ctctactcctcgcttcaacggttcaatcaatcaactctccttccttcccttatacccccccttctgtgtgttatccctcgcgtccactcaatgaaatgctgtgacgtgatttgcagaggagaagagggaatggcggcttacatgtgtgcagacagtggcaacctcatggcgattgcgcagcaagtcattaagcagaagcagcagcaagagcagcagcagcagcagcagcagcagcaacagcagcagcaacacttgctacaccaccaacagaaccctctctcccttcacactccaattccatggaacaacactcctcctctcggctaccctctacctcccaccaccgatttcccccccgaccccttccaacccgatccccctttccacttccaacccgacccccactccttccgcttctccgacttcgactccgacgactggatggactccctcatcgccgccgccgacaccactgatttcccncttccccccctccgatctcaacccgctccctctccaacccactccccccttcccctccccctccaccggcccagtcccccgtggactccgactccgactcctccgtacatcccctcctcanagccctggccgagtgcgcctccctggccgaaacggagccggatcaggccgcggaatccctaagccgtttgcgaaaatccgtttcccagcacggaaaccccactcagcgagtgggcttttacttctggcaggccctctcccgcagagaagaaaagggccataatagcacttgggatgaggagttaacactctcttacaaagccctgaacgacgcctgcccttactccaagttcgctcacttaaccgccaaccaagccatccttgaagccacccaaaccgcctccaacatccacatcgtcgacttcggtatcgtccaagggattcaatgggccgcactcttgcaagctttcgccactcgtccttctggaaagcccaataagatcagaatctccggaatccccgccgtctcccttggtccctctcccggcccttctctctccgccaccggcaaccgcctctctgacttcgccaggctcctcgacttgaacttcgtgttcacgcccattctcactcccattcaccagctcgaccacaacagcttctgcattgacccaaacgaggtcttggccgttaacttcatgcttcagttgtataacctcttggacgagcctccctccgcggttgacactgcgctcaggttggccaagtctctcaaccctagaattgtcacccttggcgagtatgaagcaagtgtcacacgtgtcgggtttgtcaaccggttcaggactgcgttcaagtacttctctgctgtgtttgagtctctggagcctaatttggccgcggactcgccggagaggtttcaggtggagagtcttcttctcgggcggcgaatcgcggcggtcattggggggcccgggtcggtgaggagggagagtatggaggacaaagagcagtggagggttctgatggagcgtgctggttttgaatcagtgagtctaagccattatgcaattagtcaagctaagatacttctctggaattacagttacagttctctgttttcgctggtggaatctacaccaccggggtttttgtctctggcttggaaggatgttcctctcttgaccgtctcctcttggcgttagttaatgggttcgacttggttgattgttattggaaagggtttccacctggtccttttttccctggtgtggaacaactaattattattattattattattatttgtcgatatgccatggatgatcgatcatgttgtgctatgctagcctcttcaattactgaagttatgcagaagatttgatatgtgaattggctggcactacaagaaattgaggtttttgggagaattgccacctttagcagcagtttggtcctctactagttccacacctccttacttttgtttttttagttgatttttctatttcttatcagcgttttttttttcttctagtggcaatgatgttattattagcttcaagaattggctaggcaaactgtgacaatgaaaatagggagaaatgggatggagaaaagctttctttctcattgcttctagtcattgtgatttgtgactctgtaaattggattttgttgtatggatttaaattggtctgaatgaatgaaatgaatatcaaaggatttttatcttt

SEQ ID NO: 28894 - DNA, 521 bp, Glycine max
  Clone ID: TF_GmC154430_1
aagagggcaaagatggagcagttttactttgccgaggaaataaagaacattgtgagctgtgaggggccgttgagaatggagaggcacgagagggtggaccagtggagaaggagaatgagcagagctgggtttcaagctgcacctataaagatggtggctcagtctaagcagtggcttctcaagaacaaggtttgtgagggttatactgttgtggaagagaaggggtgtttggtttttggatggaagtcgaggcctattgttgcagtttcttgctggaaatgctgagctgaatcatcatcaatctccactgtcccagcagtttaaaagttggtgtctgggatcaatgtcaataaataacagtttcatgcgagctgttgtgtgctagaataattggttaggacccaaattgtgttgttcaacacgctaaaactttgggtgagaataatgtcttttatcagtaagtgttgtggctgctcgggatcgaatagatgaaataaagtgataacttgtttggtgtgcat

SEQ ID NO: 28895 - DNA, 2388 bp, Glycine max
  Clone ID: TF_GmC510_1
aaacactctctctctctctctctctctctcgctctgtttcgagctttctttctttcttttttttctctgatgcgtttctacaataacacaacctcttaaccgttttatcttcttctttgcttgctccttttgccttccttcgtcgtcgccgagtccgaccatctccgggccgcgctgccctggcggcgttcgtgcgtctgtttcgcccgcttgagcgggtgcggccgccggccgatcccggccgggagcaaccacgaccaccccccaggcggctcccgccgcgactagtgacggctgtggcgctggcgatcaacggcaacacggcgccgtttttggcgcgcgtggcggaaacgctgtcgtattacggcgcgttgttggagtccattgaggccaccacggtggggaaagataacagcttcaacaactcagaccgagtcacactcgccgaagcaacgactcgacaaatcccgtactcggtaacgtgcctgcttcgaaccgttaaggccccgaaccactttctcccataaccatatggactttaccgttattgcagtggcaaagccaaaacctttatgccaaccaaccgcagcgttttcatgttccgctacatccccatctccgccctcaccacattactcgccccaacaacgggcccgtgcccatggacaggcccaaattttggttaccggaactcgaatttgggttttcctccaatccagaaccgggttcgtctttctcctcctgtttctgttccggttcaggttcagtcatctgaaccggaaaagaagatcatggaccacaggcttcttgaattggagaagcagcttctggaagataacgacgaaggaaggtgaagcagatgctgcgtctgggataaccacgagcgagtggtccgagtctgtcccagtccggttcagtaaccggttttgacgccgacgtcgccgacttcttccacgacgtcgtccacgtcatcttcttcctccgtggcttcgcctgcttccggatgctccaagcaaacgctcatggaagccgcatctgcaattgttgaaggtaaacacgatgttgcggcggagatcctgaaccggttgaacggtgtgaaccggagtgataggttgacggattgcatggtttcggcgttgaaatcgaggatgaatccggtggagtatcctccgccggtggcggagcttttcaggaaggagcacgccgattcgactcagatgctcttggagaactcggtgctgcttttggataactcagtgtgcttcaaggtagggttcatggcggcgaattacgcgattctggaagccgcatttgaggagaaaacggagaataacaggttctgcgtggtggattttgagattggaaagggaaagcagtatttgcacctcctcaacgcgctctcggcgcgtgaccagaacgcggtggtgaagatcgcagccgtagcagaaaaaggaggtgaggagagagtgcgggctgtgggagacatgctgagattactcgcggagaggctgaggatccggttcgagttcaaaatcgtcgcgactcagaaaatcgccgagttgactcgtgagtcgctgggatgcgatgcggacgatgttctcatggtgaacttcgcgttcaagctgaacaagattccggacgagagcgtctccccggaaaaccctcgggacgagcttcttcggcgcgtgaagagactcgcgccgcgcgtggtgacggttgtggagcaggagataaacgggaacacggcgccgtttttggcgcgcgtggcggaaacgctgtcgtattacggcgcgttgttggagtccattgaggccaccacggtggggaaagataacagcattaacaactcagaccgagtcagactcgaggagggactgagtcgaaaattgcataactcggtggcgtgcgaaggaagagatcgcgtggaacggtgcgaagtgtttggaaaatggcgcgcgcgtatgagcatggcggggtttgagttaaaaccactgagtcaaagcatggtcgagtcaattaaagcgcgactcatctctgccaacaaccgagtcaactcgggactcaccgtaaaagaagagaacggagggatttgctttggttggatgggaagaacactcacagtcgcatctgcttggcgttaacttggctcatttatttttctttcttttttctttttattttggttcggaatattattatatataatatcacattgttactatattttaacgtcatctagagataatggaaaggcaaagagaatagatttggtaaattattattattataaatatagtatgataaaagggtgaaaaaaaaaaaaaaagaaaagcccctcctcttggttctaccgaactaaaactaataaagaagtgtttggattccgag

SEQ ID NO: 28896 - DNA, 1187 bp, Glycine max
  Clone ID: TF_GmC977_1
gattttggcatccgttatggcttccagtggccagctcttatttatcgtctatcaaaacaacccggtgggcctcccaagctgcgcattacagggatagagctcccacaacctggtttcaggccagcagagagagtccaggagacggggcttcgacttacaaggtattgtgatcgctttaatgttccatttgagttcaatgccattgcacagaaatgggaaactatcaaaattgaggacttgaagataaaggaaaatgaacttcttgttgcgaatgctatgtttcgatttcaaaatctacttgatgagacagttgtggtgaatagtccccgggatgctgttttaaagttaataaggaaggcaaatcctgctatctttttacatgctaatgtcaatgggagctataatgctccattctttgtgacacggttccgggaggcccttttccattattctactttgtttgatgtgcttgataccaatgttgcttgtgaagatccaatgaggttgatgtttgagagagagttctttgggcggcaggtaatgaatattgtagcttgtgagggttgtgagagggttgagaggcctgagacatacaagcaatggcaggttaggaacatgagagctggatttaaacaattgcccttggataaacatctcattaacaaattaagatgcaagttgaaagatgcgtaccacagtgatttcatgcttcttgaagatgacaactacatgctgcaaggttggaagggccgagtagtttatgcttcctcctgttgggtgcctgcataggccttgacaatgttcttcccaaggtagttaattaggagaagcgtttcatgagttgtaggggagacatggacttccaaaattcttgtggttgacatattctagaagctgatccctgctaatgtaatgacatagcatagttcaatttcagttctcagaatatttttaaattggtcaagtcataagtgtgtgtataatataactgataactggtgctgtgtggatgacatatttcaatgttgaacaattccttcttgagttcttctgataggcactcatgagcagcagaatcctgagattgtgagattttaggtctaaaatttgaactggtttctaagtttgtatattaagttaatattttattctgttcaattaattatttagttaaagggaaaattact

SEQ ID NO: 28897 - DNA, 798 bp, Glycine max
  unsure (1)..(798): unsure at all n locations
  Clone ID: TF_GmC194417_1
ctggcgtccggaagcagtctgcttctttcccctaagaggcacccgcttgagagccctgatgggaattcttctaattccactactgattctgccaattctcatgatttgaagccttcttcacccaatacacctgcttctgatgctttgcattcctcttcccacgcgccctctttggttgttcctccccatgctttgactaaaattaatgatggaaccgtggatttggattcttctgtaaccaagctcttggctgaaaatattttcagtgatgcagactctatgttgcagtttaaaagagggttggaggaggctagtaagtttcttcctcaggggcctcagcttttcactgggttggagagccccacggtgtcttcagagccaaagggaagaggtgtagctctgaagatggagaattcatttggggtgaagaatagaaagaatcatgcccgccaagatgatgaagaagaaagaagcaacaagcagtctgccgtgtctgcggtttgtgttgaggaggagagtgaaatatctgaaatatttgacagggtgttgcttagtgttgaaaatgtgccactgtgtgctgaaaataatggatctgtggcagtgggagatagtaacacaaagctaattgagaaatcgagtttgtctgatggggggaagggttcgatccaagaggcaagggagaaagaggaaacggtggatttgaggacccttttggttttgtgtgcgcaagctgtgtctttcagtgacaacaggactgcntatgaactgttgaagcagattagcagcattcttctgctt

SEQ ID NO: 28898 - DNA, 400 bp, Glycine max
  Clone ID: TF_GmC104019_2
gaaacacagaaaatggacaattagattggatttaatgttgagacctttgtcattaacttgtacatagtaatggaacagaaaaagaagagggatgttatgccttattgcagaactttcatttccaagcgcaagaagcaaccaaatctctattcatccaacccagataaagagctccatctctctcttgaagtctatatctatcactgtagttctcgagcaacttcttgatggtaccattcaccaatgaacttaaagggtaaggagtgaaaccggccattgcaaatcttgacctccacttgccgagcacctcatgtcgttccaccctctcgaccccttcacaagctatgatgttaaccaagtctcttgccaaacaatgttgctcaacattgcggacgcgtgg

SEQ ID NO: 28899 - DNA, 2771 bp, Glycine max
  Clone ID: TF_GmC1018_1
aacataaatgacattttataaaagaatcaatatactaccagtacatgagatgagagcaatggcaatgaacataaaccttaatcagctacatgttaaaccctcccaaataccatttggcttcccatcatcatggtatttctattaccactacacagtatttcctacacgcgtttttgatgtgctattcagaacactatacactggtggagaaggatggagccatgttgttggggtggaaggacagaaatttgatatcagcttcagcatggcattgctaaaaacatagatagtaggaaatactgtgtttcaagtggtaatagaaataccatgatgatgggaagccaaatggtatttgggagggtttaacatgtagctgattaaggtttatgttcattgcacgcgtccgaaaccccaaaaacactctgacacaacaaacacaaacacaatcgtcaattaaaacaacaacaatatcgaagctgcacaaattaatatccaacactctcaagctttcgagtttcaaactctgggcgctgaatttggttcatttttctaagagttatatatacttttattgaaattgttgcggttcaagtctgaactaaaacattaagtttgtgcttttctgatttgccagctgctttcaaattatcttaaatcacttgttcagatcagctgatcgccatcatcttaatatggcatattctacaacagctcttgctggtgttgattaccttacatgtcatgttatcctacggcttctatcgcttgaaatatcactggtaactcttgtggtgattgtcactgataatctatcagaggttattcgtgttccacagcctgtgccatggccagccaagttcaaatactcaccaacctttgtttattttgtagctgcattgttcgttactggcctctacagtatcattacaacacttgcatcattctttgccagtaacaagccagccctcaaaaccaagtttgctcctctactttatcttatgggatgcgctgatattgggaataatagcctcagcaacaggcacagctgggggtgtagcatatttgggtttgaagggaaaccggacacgtggtgggttggaataaaatttgccatgtttacgacaagttctgtaggcatgttggtgcctccatagcagtggctttgtttggaagcgttgtgacagtcttgctcatttggctttcagcttacagcattcatagccgagtccccaagtagatggaaggaacatggatcatgcattctgcatatttatgcatacatcttcatttattgtttataaagttagtgtgctcagtaattgttaagagtgtgtagatgacttaatgtgttgcttcagttgtgttgactgttttttgtaaatcagtgttttcccctccaaggacctaatttgtactattttacaagacatgtgcaaaattaattagagcctgaaggtgaattgcgagtcacttacatgcaactgctattacgaaatctgcccctacttaaaatttggttacatggctgccaatggagccattgcgcaagcatgcagaaacgaggatcacatacacatcatagacttccaaattgctcagggaactcaatggatgactcttcttcaagccctttccaaatatgcccgtggcgacggactagaagttgtgggaaacaggatcatcaatccctgtgatccgaacatggggattgatgatcctgtttccaaatatgcccgtggcgacggactagaagttgttgggaaaaggttggccttgatgtctgagaaatttggcatcccagttgagtttcatggagttcctgtttttgctccaaatgtgacaagggaaatgcttgatatcaggccaggagaggccttggctgtgaattttcccttgcaactccatcacacagctgatgagagtgttcatgtgagcaacccaagggatggacttctgagattggtaaggtcactttctcccaaggtgaccacactggtggagcaggaatcaaacacaaacacaacccctttcttcaacaggttcattgaaaccttggattactacttggcaatctttgagtccattgatgtcaccctcccaagagatagcaaggagaggattaatgtggagcaacattgtctggccagggatattgtgaatatcattgcttgtgaaggcaaggaaagggttgagagacatgaactgttcggcaagtggaagtcgaggttaacgatggccggcttccgtcagtgtcctttgagttcttatgtgaattctgtcataagaagccttttgatgtgctattcagaacactatacactggtggagaaggatggagccatgttgttggggtggaaggacagaaatttgatatcagcttcagcatggcattgctaaaaacatagatagtaggaaatactgtgtagtggtaatagaaataccatgatgatgggaagccaaatggtatttgggagggtttaacatgtagctgattaaggtttatgttcattgccattgctctcatctcatgtactggtagtatattgattcttttataaaatgtcatttatgttaaaagttcttgttctataaatatttcgatcttgtgcctgatccctatgaactatgggaatcacaaaattttgaactgactgtctcaataaaaacattctttagggggtaaaaaaaaaaaaaaaaaaaaaaaaaaagataaaaatgcttgcataagctggttaaggtgatttgtaattcgatatctaaaaaaagaatga

SEQ ID NO: 28900 - DNA, 1525 bp, Glycine max
  Clone ID: TF_GmC538_1
gtggaatttgagtacaatgctatagctaaaaaatgggaaacaattcaacttgaggaactcaagattgatagggacgagtacctcgttgttacctgtttttatcgtggtaaaaaatgtgctggatgaatctgtggttgtggacagtccaaggaataaattcctcagtttgataaggaagatcaacccgaatatattcattcatggcattactaacggggccttcaatgcgcctttttttgttactcgattcagggaggcactgtttcactactcttcactctttgacatgcttgaagccattgtttctcgcgaggaatgggagaggatgctcattgagaaagaaatatttggtagggaagcattgaatgtcatagcatgtgaaggctgtgagagagtagagaggccagagacatataggcagtggcaagcccgaattctaagggctggatttttgcaacaaccttttgagcgtgagatagtaaagagggcaatagagaaagtaacaactagctaccacaaggattttgtaattgatgaagatagccaatggttgttgcaaggttggaaggggcgaatcatttatgccctttcttgttggaaacctgcatgactaaccaagatggtacaagtgcatctcactcgggctttgtgaattagtttgacttctgaggagctcagggttcgagatcaaaaataaggattcaagctgtgagttcagttgaggaaaacatggctacttaatagcctggtatgaaagtagataatctatgttattatcctatagatcatttataaagtctgttgtgtgatagctaacttgagggctgtcaaatgaacatgatccaatctaatgttgcagatgaatttagcatgtaataagatcaaacctttattgctgttactcattttgagctttcaacttcaatgcttctgatagtttacttaactgaaggtaatagcttgtgtatttcatcttttttgtatttcatcctaacaattaatggaagatttactttggagaaatacttgttgcacagcagatggcatgttactattctagctgtaccaaaagcaaaaagtttgactaggtccacgtagcttagatgctgcaattggttcaagtgtggaagtgatgtacaaacagcagatctcttcacatttgcttttgaagacttgttttcaacatttgacccataatgggtggtgggggcctcttgttgatacagattttccttgttgaataatgtatgattgtaatctgacttgccatatggtgtgcatttactacatatttggacctataaccaaatctatagttggtcacaccattcatcatttgactttccctttggtggacagctgatgaaagttgttctttggaacagtggtggcacgatgacttgaacatgcccctaggaagctattggaaatcttcaccactagctcattgcttgtaacttgtagctattgaaagtggatcaaaagtaaattctattttatacattttgttctcacaatttgttgg

SEQ ID NO: 28901 - DNA, 2018 bp, Glycine max
  Clone ID: TF_GmC164_1
tgcatgatagctacttaacacaaactagcaagtagcatcaagcatcatggtcatacattatacaaggcaacttctccgttaatttcctcacacatccctttctccctctttctctttctctttctctttctctccttccttttcatcactcacttttcactcccaagtcccaaccacaacccctcctctcctctcctcgatcagtgccataaatcaattctttctttctatctatctctgtccacaattctctttatgtcaacaaacctaaaactaaaacctgcttgagagagtagggaattaattaattaattttctttcatttcatcttttaagttgatctgtgaaaatggcttcatcttcctccaacggcagttccagcggaagcaagagttgggacatcgacggcgacctcgccggtttcggctacaaagtccgttcatcggagctgcaacacgtggcagaaaacatggagcgtttagagaacgtgatggacattgtgaactcatcaaccaacaataacatatctcagctggcctccgatacagtcttctacaacccctccgacataggttcctgggtcgacacgcttctctccgagttcgaccaaacggcgtcgttgccctacgatttctcggattttctcgatctcgacacggatcagaatcaaaaccacaaaccaacgctggtaacaatggaagaagactcagggataagactcgtccacacgctgatgacctgtgcggattccgtgcaacgtggtgacctcgcattcgcgggctccctcatcgagaacatgcaggggctgttggctcacgtgaacaccaacatcggaatcggtaaagtcgctggatatttcatcgatgccttgcgccgtcgcatcttagggcaaggcgtgtttcaaacgttgtcgtcgtcctcgtatccgtacgaggacaacgtactctaccaccactactacgaggcctgcccttacttgaagttcgcgcacttcacggcgaatcaggctattttagaagctttcaacggtcatgattgtgtccacgtgattgacttcaatctcatgcaggggctccagtggcccgcgctgattcaggccctggcgcttcggcccggtgggcctccgctgttgaggctcacgggcattgggcctccctcgtctgacaaccgcgacacgctccgcgaaatcgggctcaggctcgctgagctggcgcggtcggttaatgttagatttgcatttcgtggcgtggcggcgtggcggctcgaagacgtgaagccgtggatgctgcaggtgaatccgaacgaagccgtggcggttaactccatcatgcagttgcatcggcttcttgcttcggactccgatccaataggttcgggcatcgaaaccgtgctgggttggatccgaagcttgaacccgaagattatttccgttgtagaacaggaagcgaaccacaaccaggaccggttcttggagcggttcacggaagcgttgcattactactcgaccgtttttgactcgctggaggcgtgtccggtcgaaccggacaaggcacttgcggagatgtacctgcaaagggagatatgcaacgtggtgagcagcgagggaccggcgcgagtcgagaggcacgagccgctggctaagtggagggagcggctcgagaaagccggcttcaagccgctgcatttggggtcaaacgcgtacaagcaagccagcatgttgctgactcttttctctgctgaagggtactccgtggaagagaatcaaggatgcttgactttggggtggcatagccgccctctcattgcggcttcggcttggcaagctgcgccgatgcaggacagggaaacgctgcgtttcgagcaatgagtttcaagaaacggaaaaattgtttaattatagtagtaactagtaaacaagagtgatgtataatgtaaatttttctctctctatcaaaaaaaaaaaaatttctctttctttttttttcttttctgtttttttttaaatggtcatttttgcg

SEQ ID NO: 28902 - DNA, 1800 bp, Glycine max
  Clone ID: TF_GmC359_8
ggaaattgtttgtaatgaacgctgtagttcacagagtgaaacagtgaaggctgtagagccaggtggagtgaagggtcttcctaataatcgagcgacttaccaggaaacagtagatttgaggaatcttctgatgatgtgttcacaatctgtgtatgccaatgacatcagggctgccaatgaattgctaaagcagattaggcaacactcttctcccattggggatgcatcacagaggttggctcattactttgccaatggcctcgaggcacgcttggttggggatggtacaagtacccaaggaatgtatacttttctgagctctaagaacaacactttttctgagttactcaaggcataccaggttttcagttcctccagccctttcaagaagtttgcatatttatttgaaaatacaatgattatgaaagcagctgcaagtgcagaaaccgtccatattattgattttggcatcctacacggtttccagtggccaatgctcattaggcttttgtcaaatagggagggtggacctcccaagcttaggatcacagggatagagtttccccaacctggctttcgtcccacagaaaaaattgaggaaacgggtcgccacctggctaactattgtaagcgttacaatgttccctttgagtataatgccatatcatcaaggaactgggaaaccattcagcttgaagccctcaaaattgcaagcaatgagctagttgctgtctactgtcaccagaggtttgagaatttactggatgagtgtactattgaagtgaacagtcctagaaatgcagtcctgcatttgatcaggaagataaatccggatatttttactcactccatcactaacggatcatataatgcccctttctttaccacgcggtttagggaggctctctttcattattctgccatttctgataagaatgacactgtcatatctcgtgaaaacgaaaggaggttgatggttgagagagagctctatggcagggagattatgaatgttatagcatgtgaaggttctgacaggattgagaggcctgagacctacaaacggtggcaggttaggaatatgaaggctggtttcaagcagctaccactgaatgaggaattaatggccaaatttaggagtaagttaaaggaataccacagagattttgtcttagatgaaaataacaactggatgcttcaaggttggaagggccgcattttgtttgcttcctcttgttgggtgccggcataatgagatgctactgtgactcggttcagaattcatactatactaaaggtatgattccaagaatcagtcattggctttaactctatccacttctttttttccctggttctgatattcttggtctggctacctacttactctaccttcagcttttgtgatgaagattgtaccaagctttgcaccaagttccttggtaaaattatagcatcacttttctggtagattaagacttgtgaaggtaatacaatttcgttagtgatattgataagaagggcatattagtcatcagagtaggagggccattatagcatgtttgcccaagtacttgcaatcctattattgagttattttctctttaaccaacatgtatcaggcatttcacgtccttctatttaagtttgttaatttcttttacaggatacttgtcttttgagacaaattagttgagaagatgtgattaatttgaaacagatgatgactatgttccgtttgttttttccggtgatattcttgcttgcagttttgtatttctatatatagcaacttatgtg

SEQ ID NO: 28903 - DNA, 1820 bp, Glycine max
  Clone ID: TF_GmC164_2
cacaaactagcaaagtagcaacacacatcatggccatacattatacaaggcaacttcttcgttaatttcctcacacatccctatctggctttctccctctcttactctctttctctttccatcactcacttttcattcccaaccccaacccctcctctcctcagtgccataaatcaattctttctatctatctctgtccacaattctctttaattaattttctttcatttcatttcatcatttaatttcatatgaaaatgatttcatctgcctccaacgaaaacaagacggtggtggacatggacgaccacctcgccggcctgggatacaaagtccgttcatcggagctgtgtcaagtggctgcaaacatggagcgtttagaaaacgtgatttcatccaccgacctatctcaactcgcatcagacacaaccctctacgatccttccaacatagggttaggttcgtgggtggacacgctcctctccgagttcgaccaaacggcgtcgttaccgttacaatacgatttcgccacggatccaaaccataacaagcaattagcgctggtcaccaccgtggaagaagactcggggataagactggttcacatgctgatgacgtgtgctgattccgtgcaacgtggtgacttctcattcgctggctccctcattgagaacatgcaggggttgttggcgcacgtgaacaccaactgcggcatcggaaaagtcgccggctacttcatcgacgccttgcgccgccgcatctcgaacacgcttccaacgtcatcatccacttacgagaacgacgttctctaccacaactactacgaagcgtgtccttacttgaagttcgcgcacttcaccgcgaaccaggcgatcttggaggccttcaacggccacgattgcgtccacgtcatcgacttcaacctcatgcaagggctccagtggccagcgctgatacaggcactggcgctccgtcccggcggaccgccgctgctgaggctcaccggtgtcgggcctccctcggcggaaaaccgcgacaatctccgcgagatcgggctgagactcgccgagctggcgcggtccgtgaacgtgcggttcgcgttccgcggcgtggcggcgtggaggctggaggacgtgaagccgtggatgttacaggtgagtctgaacgaggcggtggcggtgaactcgataatgcagctgcaccgggtcacggcggtggacgccgccgtggaagaagttctcagttggatccggagtctgaaccctaaaatagtgacggttgtggaacaagaagccaaccacaacggggaagggtttttggagcggttcacggaggctttgcattactattccaccgtcttcgactcgctcgacgcgtgcccggtcgaaccggacaaggctgctttggcggagatgtatttgcagagggagatatgcaacgtggtgtgctgtgagggaccggcgcggctcgagcgccacgagccgctcgctaagtggagggatcggctcgggaaagccggcttcagacccttgcatttgggtttcaacgcctacaagcaagccagcatgttgctcactctgttctcagccgagggtttctgcgtccaagagaatcaaggctctttgacactgggctggcatagccgccccttaatcgcagcttcggcttggcaagccgcgccgctgagagatgacgaaacgctgcgttttgggcattgaggaatggaacgcttcacttgtttttgtaagtacttgtagtacacgggaagagtggtgaatctataaaactataactgcttttaatgtggtcaattttggcgt

SEQ ID NO: 28904 - DNA, 2172 bp, Glycine max
  Clone ID: TF_GmC163_1
ggagatttctcagttgtcaacacccttcggcacttcagcacagcgtgtggcagcatatttctcagaagccatatcagcaaggttggtgagttcatgcttagggatatatgccactttgccacacactcaccaaagccacaaggtggcttcggcttttcaagtgttcaatggtattagtcctttcgtgaagttctcacacttcacagcaaaccaagctattcaagaagctttcgagagggaagagagggtgcacatcatagatcttgacataatgcaagggttgcagtggcctggtttgtttcacattctagcttcaagacctggtggagcaccttatgtgaggctcacagggcttggtacctccaggaaagcacctgaactggttcattcatggggaggtgagttggagccataaactactactcagcattagttgactctcttgggtcaagctatggggaggagagtgaggagagggcatgtggtggaacagcaactattgtctagggagattcgaaatgtgctagctgttggggggccatcaaggactggagacccaaagtttcagaactggagggaaaagcttcaacagtgtggttttagaggcatatctctagctggtaatgctgccacacaagctagtctactccttggtatgttcccatctgaggggtataccttggtggatctagagggagcggatatgagctgggtgggggttttttttagtacacggggaaatagttatagtactacttttcatgaaagaattccccaaaaaccttttttcacctttataggctcttgtacccactttatgtctgccttttttcttttctaaggaagattgggaacaatgattaagtcttgttttgaatcactctctgcacatatattaatggggagaaaccaaaaaaagaactgtagaatgtatatagtaaggattgaatgacatggtgatgggtctcgtgtatttatcattactaacattgtcacactaaataatttcaggagtttaattaaaggcatgctactgtaaaaccaatccaaaatcttctttgctatcacctgttaaagtgtttatttattatgaaagttaataaattttgtatcttgctaaccaaactcaatgcttttagcatactaattaagaaattaaaaaaatatttattataagatcacaggagaaaatagaaaaaattatggacaaatagatacttattaacatttgtcataaattcattttatacgaagaattatgattggataatagtataaatatgaaacttattgcatggacttgtgttatgcaggctggcacctaaagtggtgactgtggtggagcaggacctaagcaacactggttcattcttggggaggtttgtggaagccatacactactactcagcattatttgactctcttgggtcaagctatggggaggagagtgaggagaggcatgtggtggaacagcaactattgtctagggagattcgaaatgtgccagctgttggggggccatcaaggactggagagccaaagtttcataactggagggaaaagcttcaacagtgtgggtttagaggcatatctctagctggtaatgctgccacacaagctagtctactccttggtatgttcccatctgagggctataccttggtggaggacaatggcattcttaaacttggttggaaggacctttgcttgctcactgcttcagcttggagaccacccttccatagtgccattacccatcacaactaggcttttgtgttggcctttttcatcatcatcatcatctcattattctaatcatgtgtagcatccaccccctctttgttacttaatttagagagagattgttaaggtgatcccatagcacgtgatttttcttgcctaatgtgtaccccttcagcagtaacatattaaaaaaaaagatatagttaaaaataggaaacagtgatatgaccaaatggttgaaggggtaccccactattgacataatgcaagaaagttctcttgctcggggagcacttgagagtttttctaatagtattttattaagagaacttataaggatgttacttttatattctgattttaatgaatacccttataaggatgttacttttatattctgattttaatgattacccttataaggatgtt

SEQ ID NO: 28905 - DNA, 1149 bp, Glycine max
  Clone ID: TF_700566412_FLI
agactattgaagcagaagcagcccacggcacagttacccgccattttagggttcatcagaagggaggcgaaaccagcacaaatagcatagcatccatctttgcctggacaagagggctagcccacagggcaaaactggatgacaatgctaaactcttggatttcactgaaaagctagaggcagcttgcattggagtagtagaggctgggaagatgaccaaggatttggcacttattcttcatgaattcctctgtgttcaaataatgctcccttctcgagccgaatcggctcgagcggctcgaggtgagcttgaactagaaaaccttgtaattcaacccggggaagctctagttgtgaacttcccttttgttttgcaccacatgccagatgagagtgtgagcacagagaaccatagggacaggctattgagactggtcaaaagcttgtcacccaaggttgtgacccttgttgagcaagaatccaacaccaacacttctccctttttccaaaggtttgttgagaccttgagttactacactgctatgtttgagtccatagatgtggccctccccagagatgataagcaaaggatcaatgcagaacaacactgcgtggctcgcgacatcgtcaacatggtagcttgtgagggggatgagaggctggaaaggcatgaactcttagggaagtggaggtcaagattttcaatggctggttttgcaccatgccctttgagttcctcagtcacagctgcagttaggaatatgttgaatgaattcaatgaaaattataggcttcaacatagagatggcgctctttatctaggatggaagagtagagctatgtgtacctcttctgcttggagatgttactgactcattgtcattgtcattggtatatgtatttttttttatccacaaatattatttgttagtaatatattagcttttattagcggggaatttgaacccatcacctctccccattcccatcattggtatatgcatattttcctccttgttaatttctttcctttttatgacattaagtcattatttagtggtatccgctgtttctcaataggattaattagagacttagctttcttccaacgtgtatcctttaccttttgtgggttcagcttagtctttt

SEQ ID NO: 28906 - DNA, 521 bp, Glycine max
  Clone ID: TF_GmC3121_16
gaaaatgtaaattatattaaatcgaaaatgatccaacaataaacaggacatatccgcagctagaaaaaaataaaagtctccttaatacaaaaaagcctaaatcaagatgctaaaacaaatacaccaagtacgtttgtctatatatacaagaagcatgtttactcccttaatcgtccgcggacgcgtgggccgctagagacctcagaatatatcctggtattgcagcctaccctcctcctcctccacaagacaacaacaacaacaacaacaacctcgacgaaatcgaaacagctaacaacatcaacaagcgtctcaagccatctccagttgaatcagcagactccgcgtctgagcccacgcgcaaatagctgctcgtggcttcgtaggaagccggcgtgcgtctggtccacactctcctggcgtgcgcggaggccgtccagcaggagaatctgaagctggccgacgcgctcgtcaagcacgtgggcatactcgcgggttctcaagccggcaccatgaggaag

SEQ ID NO: 28907 - DNA, 1647 bp, Glycine max
  Clone ID: TF_GmC359_9
atggaggtaagggtcgttcaaagaaacaagggatcaggaagaaggaaacggtggatttgaggaatcttctattgatgtgttcacaatctgtgtatgccaatgacaacaggactgccaatgaattgctaaaacagattaggcaacactcttctcccgttggggatgcatcacagaggttggctcattacttcaccaatggcctcgaagcacgcttggttggggatggcacaagtgcacaaggaatgtatacttttctgagctctaagaacatcactgttgctgagtttctcaaggcataccaggttttcacttcctccagccctttcaagaagtttatacatttctttgcaaataaaatgattatgaaagcagctgcaaaggcagaaaccgttcatattattgattttgggatcctatacggtttccagtggccaatactcattaagtttttctcaaatagggagggtggacctcccaagcttaggatcacagggatagagtttccccaacctggctttcgccccgcagaaagaattgaggaaacaggtcaccgtctggctaactattgtaagcgttacaatgttccctttgagtacaatgccatagcatcgaagaactgggaaaacattcaggttgaagccctcaaaattcagagcaacgagctagttgctgtcaattgtcacttgaggtttgagaatttactggatgagtctattgaagtgaacagtcctagaaatgcagtccttcatttgatcaggaaaataaatcaggatatttttactcagtccatcactaatggatcttataatgctcctttctttgccacgcggtttagggaggctctctttcattattctgctacttatgaattgattgacacagtcatacctcgtgaaaacgaatggaggttgatgatcgagagagagcttttgggccgggagattatgaatgttatagcatgtgaaggttctcagaggattgagaggcctgagacatacaaacagtggcaggttaggaatacgagggctggtttcaagaagctccctctgaatgaggaattaatggccaaattgaggactgcgttaaaggaatggtaccacagattttgtcttggatgaagataacaactggttgcttcaaggttggaagggccacattttgtatgcttccacttgttgggtgccagcataatgagatgctactggactgggttcagaactcatactatactgaaggttttggtatccttggtttggctacctctacttgcttaaccttcaggtgctgtgatgaagattgcaacaagctttgcacgaagttacttggtaaaactatggcacaagttttcgggtagaattgagacttgtgaatgtaatgcaatttctgtaatgatattgataagtagggcctattagagtaggaaggccattatagcatgtttgcccgagtaccagtatattgagttattttctctaaccaacatgtattaggcattttgttaggatggacccaaagaggtccaaaagaaggatgtttaagtggctcaaagattataaaagataatgttttttatttataaattatagttttttatttaatttatattaaaataacatgatgttgagacttggataattattatccatt

SEQ ID NO: 28908 - DNA, 1736 bp, Glycine max
  unsure (1)..(1736): unsure at all n locations
  Clone ID: TF_GmC112744_1
ctaaacatcatatttngaataaggtgacgtaaagtttttaattttatttctaaagattttaaggttaataataaatatttaatttttttatcaataatattaaaacccaatactcactaaacaaaaatacccttaaaatatttttttaatcgagtcaactaaaatataatatagatcctcaattatcaattatagtgcgatgcaatttaatatatatatttttagtagaaatagttatttagcagacgaaaaaaataaagatatgatgcaagtggaagaaaaataccaaaactaggctgcaagcaagtaataattatcaaataaatggtcatcgtcagattttggagtattataatacggggaagttgatcattgatcaatagtcgataaaacgagacatatatcattttcgggtgtcctactcgtaggacataggacaaaatttgatgagtaaattaaagggtttttggcacaaccaaagatgacgcaattaaaaaactaatcttccttaattaatccacagcccgagatgatgagtgtgattagcgagacaaattaataatgagaggctttggggatataaaaaccaaggttacgacgaaatatcgataacagaacggagcacccaaagaggataacataacacccaaactaacttttctgggctacaaagtcatcaccctttctgtctcctttcttttttttttttttttttttacctctcttaattttattttattttttttctctctctctctctccaaacactccttttctgacacaccgtctacctatctgcacaaactttccttgtctttccctctcagttttgtcacttttcccccaaaactttcctccaaagctttcgattctctctctcgacccgcaccgatcatgcttcaaagcttggtcccccgatcccctcgcacttcaaaccccaacgctatgaaaactaagcgcgccgttgacgccggaggcgattcccccgccgacgaaccttccttcaagcggaccaacttctccggcgagaaaactacggccgaagctgaggaggagcaagccttcgatcccgagcctcacggcggcgattccaccggtctcaaactcctcggtctgctcctccaatgcgcggagtgcgtcgccatggacaacctcgacttcgccaacgacctcctcccggagatcgcggaactctcttcgccgtacgggacctcgccggagcgcgtcggtgcgtacttcgcccaggcgctgcaggcgcgcgtggtgagctcctgcatcggctcctactctccgctgaccgcgaaatcggtaaccctaactcagtcgcagaaaatcttcaacgcgttccaatcctacaactcggtgtcgccactggtgaagttctcgcacttcaccgcgaaccaggcgatcttccaggccttagacggcgaggatcgagtccacatcatcgacctcgacatcatgcaaggcctccaatggccaggattgtttcacatcctcgcctctcgctccaaaaaaatccgctccgtgagaatcaccggattcggatcctcctcggagctcctcgactccaccggccggagactcgccgattttgcgagctcgctcggtcttcccttcgagttcttccccgtggaaggcaaaatcggaagcgtgacggaactgagtcaactcggcgttcgacctaacgaggcaatcgtggtgcactggatgcaccactgcttatacnacataac

SEQ ID NO: 28909 - DNA, 2028 bp, Glycine max
  Clone ID: TF_GmC509_1
ggctcgagaaaaggcccacaatcataacaaccaaaaagcccccttctccttccaacccctccattttcaacaacaattcctctaagcatcgttcagacaagggtacaccacaacagcttttgttagtcctcaccaagcgatgagagttcccgttccctcatccccacaggccaacccaaaacccaccaataacgttgtccgtaccattgcccttcccaacctcaacaatagcaccacgccccccacgggcctgtgctacgagcccacttctgtccttgacctgtgccggagcccgagcccgggcaccgaaaagcccaccaccgatcactccgttctcgtcaccaactcccaagactatctcgacctggaagaccatgcgttgcacaacttggactgggactccatcatgaaggacttgggcttacacgacgactccgccacccccgttttgaaaacttttctccaccccgacgacgacgacgacgacgacaacaacaacaacccatcatgcgacgacttcacactcttcgaccacgcgcttgaattcaccactctctccgacatctactccaaccaaaacttcgctttcgatttcaaccacttgcctcacgacttcaaccacctcaacggcttcgatttcatcgaagagctcatccgcgccgccgactgcttcgacaccaagcagttacacgtggcgcaactgatattggagcggctcaatcaacgactacgatcgcccgtcggaaaaccactccatcgcgcagcgttttacctcaaagaagctctccagagtcttctctccggttcgaaccggactccgaggatttcatccctggtggaaatcgtgcacagtatcagaaccttcaaggccttttcgggaatttcgccgatcccaatgttctcgatcttcaccaccaatcaaatagttctggatcacgcggcgagctccttcatgcacgtcatcgacttcgacatcggtcttgggatccaatacgcttccctaatgaaggagattgcggagaaggcggcggattcgccggtgctccgaatcaccgccgtcgttccggaagaatacgccgtcgagagcacgctcgtccgcgacaacctcgcgcagttcgccctagatctcaggatccgcgtgcaggtcgagttcgtgccgcttcgaaccttcgagaatctctccttcaaggccgtgaagttcgtcgacggggagaacaccgccgtgctcctgtcgccggcgatttttcgccacctcggcaacgccgccgcgttcctggcggacgtgcggaggatctcgccgagcgtggtggtttttgtggacggcgaggggtgtgcggagactgccacggcgtcggcggcgtcgttccggcgcggcgttgtgagcagtttggagtactactcgatgatgctggagtcgctggacgcgtcgacggtggtaggcggaggggagtgggtgaggagaatcgagatgatgcagctgcggccgaagattttggcggcggtggagagtgcgtggcggcgggttccgccgtggagggaggcgttttacggcgccggaatgaggccggtgcagttaagccagtttgcggattttcaagcagagtgcctgttagcgaagtctcaaatcagaggatttcacgtggcaaaacgccagaacgaactggtgcttttctggcatgatagggccattgttgccacgtcagcatggcgctgttagaacatggagtgttattattggcagaggggattatgtaataatgtagtaattataataaactgcaacgaaagtaaatttaggttccaatttcgaagtccactacactcgttcaaactattgctatgatggaaaaaatctaggtatctttggcaaaaggaaaaggtggggagggggtggtagataagataaacttgtatttttctgtaccattttgttgtccttctttgttggatggactctttgttatcctgatgaactttactactggttttctaatcaaagggtttggcagattttaaaaaaaagcatac

SEQ ID NO: 28910 - DNA, 1041 bp, Glycine max
  Clone ID: TF_GmC406_1
attcaatttgcaacctaagtgaggatgcaaaaacaattcacatcatagactttggcatccgctatggcttcaaatggcctgcacttatcagccgtctatcaagacgccctggtgggccacccaaacttcggatcacggggatagatgtgccacaacctggtttaagaccacaagagagggtgctcgaaacagggcgcagacttgcaaattattgcaagcgtttcaatcttccatttgagttccatgctattgcacagagatgggacaccatcagagttgaggacctcaagatagaaacagacgaatttgtggctgtgaactgcttgtttcagtttgagcatctacttgacgagaccgtggtgttgaataatcccagggatgctgttctgaggttgattaagaatgcaaatccagacatatttgtgcatggcattgtcaacggatcctatgatgtaccattctttgtgtcacggttccgggaggctctctttcattacactgcattgtttgacatgcttgacaccaacgttgctcgtcaagatcccatgaggttgatgtttgagaaggagttgtttggacgggagatagtgaacatcatagcttgcgaaggttttgagagggttgagagaccacaaacatacaagcaatggcagcttcggaacatgagaaatgggtttaggctgcttcctctggatcatcgaatcattggcaaattaaaggataggttgagagatgatgcgcacaacaataatttcttgcttgaggttgatggcgactgggtgctacaaggttggaagggtcgaattctatatgcttcctcttgttgggtacctgcatagcataggccttgaacattatttattccagattacaaaaatctagtcttacacacaactattagtacgtctccttcaatctccctagctcatttgttgttttttatgataaggaaaaaccaaagttatagttagtttctttcaatgtgtagtttgtttagtacttacatatctaacaaattcagcaaatacaattgagagccgc

SEQ ID NO: 28911 - DNA, 383 bp, Glycine max
  Clone ID: TF_jC-gmst024114c12a1
ggctcgagcttcgaccacgcgtataattcacctctctctccgacatctactccaaccaaaacctggccttcgatttcaaccacttgcctcacgacttcaaccaccacctcaatggcttcgatttcatcgaagagctcatccgcgccgccgactgcttcgacaccaaacagttacacgtggcgcaggtgatattggagcggctcaatcaaaggctacgatctcctgtgggaaaacccctccagcgcgcagtgttttacttcaaagaagctctccagagtcttctctccggttcgaaccggaccccgaggatttcgtccctggtggaaatcgtgcacagtatcagaaccttcaaggccttttcgggaatttcgccgatcccaatg

SEQ ID NO: 28912 - DNA, 1528 bp, Glycine max
  Clone ID: TF_GmC588_1
atgaggttatcttctgtaacttcttcacctcttcagttcttttccatgatgtctctttcagtttcacctagcttaggatctccctaccaaatgaaatgcgagcaaaggggtttggtattaatccatttgttgctcgctggtgctaattttgtagccaccggtgatttacaaaatgcaaacctcacacttgagcagatttcccagcatgcctctcttgatggggatactatgcagcgaattgcttcttatttttctgaagcactcgctgatcggatacttaaaacatggcctggcatccacagggccctcaattccagcagaataactatggtttctgatgaaattcttgttcaaaagctcttctttgagcttttacccttcctcaagttctcatatatcctcactaatcaggctattgttgaagccatggaaggggagaaaatggtgcatatagttgatctctatggggccggaccggcacagtggatttctctcctccaagttttgagtgcacgtcctgaaggtcctccccatttgagaatcaccggggtccatcacaagaaagaggttctggatcagatggctcataaactcactgaagaggcggaaaagttggatatcccattccaattcaaccctgtgctaagcaagttggaaaatcttgatttcaacaaacttcgcgttaaaactggggaggcactggcaataagttctattatgcagttgcactcccttttggccttggatgaagatgcctcgcggagaaaatcgcctcttttgtcaaaaaactcaaatgcaattcacctgcagaaaggcctcctcatgaaccataacacactgggagatttgcttgacggctatagcccgagtcctgattcggcctcatcctcaccagcagcgtcttcatctgctttgatgaattcggagagctttcttaatgccttgtgggggttatccccaaaagtcatggttgtaactgaacaagactttaaccacaactgtttgaccatgatggagagactggcagaagctctattttcttatgctgcatattttgattgcttggagtccacggtctcaagagcatccatggacagattaaaacttgagaagatgctttttggcgaggagataaagaacatcatagcttgtgaaggatgtgaaagaaaagaaaggcacgaaaagatggataggtggatccagagacttgacttatctggatttgcaaacgtgcctataagctattatgggatgctgcagggaaggaggttcttgcagacctatggttgtgaggggtacaagatgagggaggaatgtggtcgggtgatgatatgctggcaggagcgatccttgttttccataacagcttggagaccaaggaagtaagataaagaagaaaattagtcatgtagtaatggatagagtctctttttttaagtttttcttttcttttctttgtttctaattgtatgacagagttttaccaatgtggtaatgactagtaatgaagagatacttctatttcctt

SEQ ID NO: 28913 - DNA, 1731 bp, Glycine max
  Clone ID: TF_GmC7815_20
ccacgcgtccgtacaaatccatagttttttaggttagttgctggcattggcaagcaatctggtttctctctcctctctgcactgcaccccacaactcaaactgagcagtcacagacacaggtatgctctcgctggacacttcctagttttcaactacatgtgttcatgccttgtggggaatgcctctaattgctgtctcatctgttggatcattcagctcaaactcccacttctgtctcattttcaattttccggttttatcgacaatccccacatagaatacccgttggccaaccgacctccttaccattcaatttcgtcgggtttcagcaacgacttccactttttttattagttaagagaacccccccccaaaaaaatgaagaaaactactttcttttttacgtctaagtctctcttctgttactagtcagtcttgtggtgatctcaaagcctctaactttcctcagaggttgacgattttcggttttggcacccaaggggttgaatttcctggcatgttgtgtgtctttaaaacatctatgaactgttgttggcacttggcagataattattgcatctagcaacccataaagacggtgactatgagtaatctgcaaaattttaatgctatactctgtgtctctgaatgaccatcaagtgatccggtgcggttggaaagaaccttccgaattacaaagattgactacttgttattctcattggtggagttaatagttattttgtagatgcaaacgtctcagaaacacccaagttcagctggtgtccatttctatcaccagcctgtgcaaggcatttaccaaatgttgcaaagcaatctatgccatgatagcagcagccagggaacaagtgtttcttttgaaacctgcaaggagcaatactttactctagaatcatgcccagcacccactacttgtttcgtggattgtgatgattctccttcctatgccagtgtatcatctaaaaggactccattttctccacagggttctcagtcatgctattcagatcaccagcagtcctctgacaacacctacggttcgccaataagcggcttgtccagtgttgatgacgggcatgaactgaagcacaagcttagagaactggagatttcattgttggggcctgaacaatcagacagttgcggctgctgcgtcgtcaagggtggcctccagggatcatctcagttggctaaacataactgggatcagattgcagagaacgttgcacaatttgacttgaaaggagtcctcagggtatgtgcacaggctgtgtctgatgatgatgttccaacagcaagaggctggatggataatgtattggggaaaatggtatcagtctctggtgatccaatccagaggctgggtgcttacttattggaggggcttagagcaaggttggaatcatcagggaatctcatctacaaatccttgaattgtgaacaaccaacaagcaaagaactaatgagttacatgcacattttgtaccagatttgcccgtactggaagtttgcatacatatctgcaaatgctgtcattgaagaagcaatggcaaatgagtccaggattcacataattgatttccaaattgcgcagggcacgcagtggcatttacttatccaggctcttgcacataggcctgggggacccccctcccttcgtgtgacaggtgttgatgattcgcagtcgattcatgcacgtggtggaggac

SEQ ID NO: 28914 - DNA, 765 bp, Glycine max
  unsure (1)..(765): unsure at all n locations
  Clone ID: TF_GmC160039_1
acgagctcaggctcagtctccaacgcttcctcggagagccagagcctgaggctaaacgacaacgtttcagaacacgaagtgggaaacggttcagggaacccttactaccatcaccgcaaggtggaagcaggggaagaagacgaccatcacgggttcgagctcgtgagcttgctcaccggctgcgtcgacgcaattggatcgagaaacgtcactgcaatcaaccatttcatagcaaaattgggtgatcttgcttcccccaaaggaacaacctcgataagccgcatttgcgcttacttcacagaagcattagccatcagagtcacgaggctctggcctcacgtttttcacatcgccgccgccaccacttcacgcgacatggtggaggacgatgaatccgccacagcattaagacttctcaaccaagtaaccccaattccaaagttccttcatttcacatcaaacgagatgctgctgagggccgttgaaggcaaagacagggtccacataatagacttcgacagcacgcgaggccttcaatggcccagcttgttccaaagcctagcttcgaggtccaaccctccgatccacgtcaggatcacggggatcggagagtccaaacaggacctcaacgaaaccggagagagactcgccggttttgctgaggtcttaaacctccccttcgagttccaccctgtggtggacagactncgagacgtgaggctgtggatgcctcacgtgaaggagcacgaaacgggtgctgtgaac

SEQ ID NO: 28915 - DNA, 1490 bp, Glycine max
  Clone ID: TF_GmC1774_1
ctcactaccaaaaagtaatatcttctgaaaaggaaaggaagaagaaaactcccaagtatcattgtctgattgacaaattgtatctggaactgtttttatcaaacatttacatgctctgagtagaatgaacatcctatattttctcttttcacacctacggctctcatttatgctaatccagctattatggatggattaggttcgccatcccagtggctgagggagctgagatgggactcccagggcttaaatccaataagccttcttattgactgtgccaaatgtgttgcatctggaagcatcaagaatgcagatattggccttgagtacatatctcagatttcatctcctgatggtaatgcagtgcaaaggatggtcacttatttcagtgaagcacttggttacaggataataaaaaatttgcctggtgtatataagtctctcaatccatcaaaaacatcattatcttctgaagatatccttgttcagaaatacttctatgaactgtgtccatttttgaagttctcatacctgatcacaaaccatgccattgctgaggccatggagtgcgaaaaggtggttcacattattgatcttcactgttgtgagccaactcaatggatagatcttctactaactttcaaaaaccgtcagggaggtccaccccatctgaaaattacaggaattcacgagaagaaagaagtattagaccaaatgaactttcatttgacaactgaagctgggaaattggattttcctttgcagttctatccagttgttagcaaactggaagatgttgactttgagaagttgcctgtaaagataggagatgctcttgcaatcacttctgttcttcagctgcattctcttcttgccactgatgatgatatggcagggaggatctcaccggctgcggcagcatctatgaatgtgcagagagcactgcatatgggtcaaaggacttttgcagagtggcttgagagagatatgatcaatgcatataccttgagtcctgattctgctttgtcaccgctttccttgggtgcctcacctaagatggggatctttctcaatgctattagaaaacttcaaccaaaactagtagtgattactgaacaagaatcaaatctgaatggttccaatttgatggagagagttgatagagcattgtacttttacagtgcattgtttgactgcttggactctactgttatgaaaacatcagtagagaggcaaaaacttgagagcaagcttcttggagagcagataaagaacatcattgcttgtgagggtgttgatagaaaggagagacatgagaaactcgagaaatggattcgaagacttgaaatggctggttttgaaaaggtacctttgagctacaatgggaggttagaagcaaagaatctgttgcagagatatagtaataaatacaaatttcgagaagagaatgattgtttacttgtctgctggagtgacagaccattgtttta

SEQ ID NO: 28916 - DNA, 1418 bp, Glycine max
  unsure (1)..(1418): unsure at all n locations
  Clone ID: TF_GmC170_7
ggctcgtgtattatttagatatctaaataattattactatacaaaatcattttatcgaatcatattgtttttattatcattattgccgagatttgatccgttctcttgagatgaaatgactagggttatctggaagtcaatcaaggacaagctcattttgcccttcttggagttggacatcaagtattatgacttaggccttccttaccgtgatgagaccgatgataaagttacaatttgaagtgcagaagccactctcaaggtcattgtggcattcaaggggcaactattactccagatgaagctcgtgtgaaggagtttggcctgaagtcaatgtggaagagtccaaatgggactattaggaacattttgaatggaactgtcttcagagctcgagccggtggttgttgcttattcaggctcttgcatctcgtccaggtggaccacctttcgttcacgtaaccggtgttgatgattcccaatcatttcatgcaaggggtggaggacttcacattgtagggaaacgcctctcagattatgccaaatcttgtggagtgccatttgagttccacagtgctgcaatgtgtggaagtgaggttgaactagaaaaccttgtaattcaaccaggggaagcactagttgtgaacttcccttttgttttgcaccacatgccagatgagagtgtgagcacagagaaccacagagacaggctattgagattggtcaaaagcttgtcacccaaggttgtgacacttgttgagcaagaatccaacaccaacacttctccctttttccaaaggtttgctgagaccttgagttactacactgctatgtttgagtccatagatgtggccctccccagagatgataagcaaaggatcaatgcagaacaacactgcgtggctcgcgacattgttaacatggtagcttgtgagggggatgagagggtggaaaggcatgaactcttggggaagtggagggcaagattttcaatggctggttttgcaccatgccctttgagttccttagtcacggatgcagttagaaatatgttgaatgaattcaatgaaaattataggctcggatatagagatggtgctctctatctaggatggaagaatagagctatgtgtacctcttctgcttggagatgttactgactcattgtcatagcctcataggtatatgtatattttcctccttgttaatttcttcccttttttggacacttagtcattattcagtcgtatcttcagtttctcaatagaactagctagttagagacttagctttcttccaacgtgtatcctttaccttttgtgggttcagctgagtcttttaacatttttgtacatttcaatgctacatagaaggtaagagaaaacctcagttattgacanaaaaaannnnnnnnnnnn

SEQ ID NO: 28917 - DNA, 347 bp, Glycine max
  unsure (1)..(347): unsure at all n locations
  Clone ID: TF_LIB3242-531-P1-J1-H3
nnnnncacttcgagatcttgatataatgcaagggttgcagtggcctggtttgtttcacattctagcttcaagacctggtggagcaccttatgtgaggctcacggggcttggtacctctatggaagcacttgaagccacgggaaaacgtttgtctgattttgcaaacaaactttgccttccctttgagttcttccctgttgctgagaaagttgggaaccttgaccctgagaggctcaatggtagcaaaacagaagctggtgctgttcactgttgcaacattccctttatgatgtcactggctcagacaccaacaccttgtggctttttgcaaagactggcacctaaag

SEQ ID NO: 28918 - DNA, 3720 bp, Glycine max
  Clone ID: TF_GmC3864_1
ccgggctcgatcttcgacccacgcgtccgatcatacacacttttttaccttttgaaggcaaccaagtttgtcaattagaaaatagtgaattatcatctctatggtttatgataattagacaatgtttatctgttaactcagaccacatatctattcatcggtacacttcttctctgtggtgatttaactttagttactgtctgaatgttccagatgatatgttataaatagttgactttggtttattctttttagtctatggacacagtcatcctagaagattcaacaagattacatcactgagagactctgcctggtttactatttcttaagccaaaaattcacgtgaagcaaataacaggcgaatcatgtcattagttaggtctgctgatctagctcctacatcatatgaaaatgctaagctcttctcactgaagggaactgatgttagaccaggcctgtcctcccaaatttttggtcctgataagcataggagcatgtacatgaccgatgcttactccggcgagtgttatgagaagtacttccatgactcacaaacagaagaattgatagaaccatctagttccagcatctctggaagttcaattcaccctgatgtagcctcttcttaccagctcagagccagttcaggagcttctatggttgccaataacccatctgattcttctttcatgtctacaaggcatcatgatgcttaccagtcaaactctggatcagatttgatggagaacggaagcctggattcacgcgacgatgaaggtctaatgagattaagactaaaagcactggaaagggcattgcttgatgatagtgatgctggggaggatgaagaggaggaggaggaggaagaggaagacatatttgaggctgcacaaagcatggaaattgatcctgacattgctgagtgggctgattcaattcataatatgctgctccatggttcaccaaaggagtcctcttcttcagattccaataccagcagcatcagcagcaccaaagaaatatcacaaacttctcagacccccaagaagttgctttatgaatgtgctattgcactttctgaaggaaatgaagtggaaggatcatctatgataaacaatctccggcagatggtctcaattcagggagagccttctcaaagaattgcagcctatatggttgagggacttgcagctcgcctggccgaatccggaaaaagtatttacaaagctctgagatgcaaggagcctccaacttcagatcgtctagcagctatgcagatactgtttgaggtttgcccatgtttcaaatttggattcattgctgctaacaatgcaattacagaagcagtgaaagatgacatgaagattcatataatagattttgacatcaatcaaggaagtcagtacataaatctaatccaaacacttgcttcaaggtcaagcaagccaccacatgttaggttgactggagttgatgatccagaatctgtgcagcgatctgttggaggcctacggaacataggacaaagactagaaaaactggcagaggcacttggtttgccatttgagtttcgagcagtggcatcaaggacttccattgtcaccccatcaatgctcaactgcagtcctgatgaagcactagtggtaaactttgcattccagcttcatcacatgcccgatgagagtgtttcgacagtaaacgaacgggaccaacttcttcgcttggtgaagagcctgaatccaaagcttgtgacagttgtggagcaagatgtgaacacaaacaccacccccttcttacctagatttgttgaggcctacaattactactctgctgtgtttgagtcacttgatgctactcttcctagagaaagccaggacaggatgaatgttgaaaggcaatgcttagcaagggacattgtcaatgttgttgcgtgtgagggcgaggataggatagagcggtatgaagttgctggaaaatggagagcaaggatgacaatggctggcttcacttcatccccaatgagcacaaatgtcaccgatgaaatccgaaaactcattaagacggtgtattgcgacaggtacaagattaaggaggaaatgggagcgcttcactttggttgggaagacaaaaacttgattgttgcttcagcatggaagttaccaagataatcaattgtgttaggcgatagactcattctagtatcagtaatctagtgtttgcttgcatgcttgtttagtctgtagattacttctgatattcctattgtggtgttttcttgcttttccacatgtatactaacgtacaatcttaagctaataacgaactttgattttatgtaagtgcttttcttaacgtggctggaggacaagggagcaagaagcaatgaagcttatgcttaagctaatgactattttctagtttgataatttgttaaaataaaagagttgattaaggcgaagggtgtgatgagattagttttgagaagaaaccagcaatcggcgattaggagtgagagagatatggagggaattgaaggaaatagcagcagatacagtctgaaaccctcgcgaatttgcaacgaagatgttctgatctgcgtcgacgtcgatcctcagtgcctcgtcgaaatgaaaggtgccaccggtcccaatggcagacccctcacccgtttggactccatcaaacaagccatcgttctcttcgtcaatgccaaactcaccatcaaccccgaacaccgttttgccttcgccactctctccaacaccctcgtctcttgggtcaggaaagagtttagcagtgaaattgagtcaacacttgcagcaatgcgtgttctttcagcttcttcttcttcttccaccaccgccggccaacccgatctcactcatttgttccgtcttgccgctcatgaagccaagaaatcccgtcttcagggtcgcatcctaagagtcattttgttctactgtagatcatcagagcgaccaaagcatcagtggcctgtgaaccagaagctcttcactttggatgttatgtaccttcatgataaacctggaccagataactgcccccaggaggtttacgatacactggtggaggcacttgaacatgttagtgaatatgagggttatatcttggagagtggacaggggttggcacgtgttctattccgtcatgtgctgatactattgtcacatcctcagcagcgttgcatccaagagtatgttgacataccaaagtcaattgcaaagaagcctccccaggtggagcctatggctactgaagatagtgctcccatatcaagccaataatactatgagttgggaagtggatggcagttgcatgtggtcaacctcttaaggggaatggaatatgatcataattcagcaatgttcaagttggaggttagtgtcactaggttgacaagggaatgattgttactagcgtaacagtttctgaaattggattcgattcctacaaccctctttcgttctcaagttgataccatttactattttgaatcaaatgtatgaaaagtgtactttcaaacatatccatattcattagtaatcaagcgtttaggtctggtaatgaaagtgagcaagggatgtgattatacacaagctgttagattttattttatttttcttgtcggtaactttcaaagacaaagacaatattaataaatttataacacaaagacaatattaataaatttatacc

SEQ ID NO: 28919 - DNA, 640 bp, Glycine max
  Clone ID: TF_GmC167117_1
ctaaagcctatacaaacacaaagaacaatataacactttctaatatgttctagagtctagatctactcattctccttattcactctttcttgagatataaatggaagattcagaggaagaagagcttctgaatcttactctttcagttgatgccggtagggagaggagaattaagaaaggaaggacaagggataataataataacactaattctgttattattcctatgaagtccaatgacgggtatgaagggaagatcttcaggctcctccaaatgagggagctgatgctaagacaagaccacagaagaaaaggagtgctacttgaagatgtgaacaacaacaacaacgatggccttcctttgattcatttgcttctctcaacagccactgctgttgatgatgatcaaagaaactattgtgccgctcttgagaatctcattgacttataccaaacagtttccctaacaggtgactcggtccaacgtgttgtggcctatttcgctgatggtttggctgcaaggcttctcacaaaaaagtcacctttctatgacatgctcatgggagaaccaacaagtgaggaagagtttcttgcattcactgatctctatagaggctcaccctattaccaatttgctcac

SEQ ID NO: 28920 - DNA, 2280 bp, Glycine max
  Clone ID: TF_GmC42017_1
ctgattctggtccttcttctgggacaagctcgaatggagaacatgcagagagtactaagcactccaatcccattctcagatacattagtgacatcctcatggatgaagaagttgatttggagcgaaaaccctgcatgttgcaggattgtttgagacttcaggctgctgaaaaatcattctatgatgcattggttcgtagttacccttcatcaactggtcaatttaatgataatcctgacccagatgataattttggtggaactactagttctgagagttttagcagttataccactgataattcatgcgagtctgattggtttaacggtgctagtgacttggattcctctttcctacaaagatctctaattgattctccggaacacgcatatgtagctcctgatccgtttagagagacacaagctggggtccatttttcaaatggagcctggaatttgattcacccacagaacaagccgcgtgtgattgaggatggtgtgatgcggggttctgtaacagccacaggattgagggagaagaggagttatctcatgaatgatatgtcacatgaagaagagagaagcaacaagctttcttctgtctactccgatgattcggagccatctagcatgtttgatgaggtgctgctttgtaaggatggtaagagtgccatccattttttatgctggccgtgaaccatcaccatcgcagattgctgactcaagaggatctaatgggaagaaaacacgatcaaagagaggttccaataaggggacaagggcaagcgtgacgacggtggatttatggactttgctaattcaatgtgcacaggctgtggctagctttgaccaaaggactgcaaatgaaacactgaagcagattaggcagcactcttcaccttttggcgatggacttcagcgtttggctcattacttcgccgatggcctcgagaaacggttagctgctgggacaccaaagttcatttcctttcagtcagcatctgccgcagatatgttgaaagcataccgagtgtataggtaagtcacgaaccagatagcgatgtctaatttcttggcaatccgcactattctgaagctagcgctgaatgaaatggtgaagaaggaataccataatgggtttgtagttggtgaggatggcacgtgggttttccaacggctttcagagaggccaggcgggcctccaaagcttcttatgacaggaattgatcttccccagccgggatttaggccggcggaaagggttgaggagacggggcggtggctggagaagtactgcaagaggtttggagtcccatttgagtacaattgccttgcacagaaatgggagactataagacttgaggacctcaaaattgataggagtgaagtaactgtggttaactgtttgtacagattgaagaacctttccgatgaaaccgtgactgcaaactgtccaagagatgctttgctgaggttgatcaggaggatcaatccaaacatcttcatgcacggggtcgtcaatggcacttacaatgcaccatttttcgtgacaaggttcagggaagcactcttccacttctcatcattgtttgacatgtttgaagttaacgtgcctcgtgaaagaagacgacagaaggggattgagaaaggggtgttcggaagggatgcaatcaatgtgatagcatgtgagggggcagagagggttgaaaggccagaaacctacaagcagtggcaagttaggaaccagagagcagggttcaagcaacttccattggccccagagcatgtgaatagagtgaaggaaatggtgaagaaggaacatcataaagattttgtggttgatgaggatggcaagtgggttttgcaaggatggaaagggcgaattctttttgctgtttcctcttgggttcctgcttgaggaatgaccaactcctaacccactcattggcaaggaaaattgttttaggtgtaaggtgcactaagggtatatttatccttgaatagaagtgaatcatgatcatattttgtttctatttgaatagtgaaaataccctcttatatgtgcacttttatgaacaagagtagaagacttaaactcctctgaaatcactgattttagaaggatatctaatatccacattaatgtactagttttctagtgatgcctaggagcaacatagaaagaagttggtagttattataaatcttcatttgcttaatgctcactgctgtactctaaactttattttctcgtttatgttacaagtggtgaatcattccc

SEQ ID NO: 28921 - DNA, 2980 bp, Glycine max
  Clone ID: TF_GmC640_32
ccacgcgtccggaagaatacattcattcatctcatggctttcttcttcttccctcatcacaccttcttcaactgtttcaatctcaacacgccacagaagtatcagatagaagaagaaaaaaacaagctttatttttagagggtgcccaagttgtttgttcttttgtttttcctgcagcactctatgtgtttgttcagtgttcctcgaagatttgtattgtccccaaaacaaaaacaaaaattcagcctttttagctcttccaacccgaaatttcttgttttttttatgtgttcttcatttggggtggtttaaatttgcttaatttgtaatcttttttttctggggtgggttgtggggaaataaaggtggtaccttttgaaaaactggagtcttttgggtggtgggttttgtggtcaccaattttattgttcttcccccccctaggcaactttcttagatgaaggtcatgcccttgccttttgaggaatttcaagggaagggagtgttggatttctcttcagcctcagattcattttcagtgcttttgcataacccacaaccaaagtggaccatagacaaagaggactattgctatgtgggcagcatcactgagcccacctcagttcttggctccagaagaagccttagccctcccacttcctcctccacaatgtcttcttctcttggcagcagcaacaacagcactagcaagggtggtggtggcacctcagccaacaccaccaacaacccaacaccaccctcagactacaacaacaacaaccctcctcaggaatccagccccgaaaaatgtggcatcaggatggaggactgggaktgccaagatcaatccatcctgaggctaatcatgggggatgttgaaracccttctgctggattgagcaagcttctgcaaagcactgcctgtggctctcaaagtgctgatttcaatgctggatttggtgttgtggatcaacaaggattgaatatgaatatgaatatgaatatggtgggtggtaatattgacccaaattaccctgctggtttccctttcattgctgagaatatggatggccagaatgccaaggctggttctgggactggccaggtttcagaatctgttgttttctctgccaacaatcctctcatggtgtcatcatctgtttcccctggtgtgttcacttctcagcagcagcagcaagagtttggagtggtggatgagaagcctcaggttattaatccacagtttatgttgaaccagaaccaagttcagttctcagataacccttctttctttttgccattgatgtaccctcaggtgcaggaacagcaggttttctctcagcatcaggcgaaacaccatctctttgacaccattgggcacaattttcaagctccaaggttgtcccttttggattcagggcaagaagtgtttggtaggaggcagcaaacacagcttccattgtttcctcaccatatgcagcaacaacaacaacaacaatcaatggttatgccttctactaaacagcagaagggtgagttccaccggagacgatgcaagccaccagcttcagcaggctatatttgatcagttatacaaaactgctgagctgatagaagctggtaatcccgttcatgcgcaagggatattgggcgcggctcaatcaccagctctcccctattggtaggccttttcagagggctgctttctacatgaaggaggccttgatgtcactgcttcattcaaatgctcacagtttcatggctttttcgccaattagtttcatttttaaaattggagcttataagtccttttctgagatatcacctgttcttcagtttgccaattttacttgcaaccaagccctcattgaagctgtggaaaggtctgacagaattcatgttatcgatttcgatattgggtttggagtgcagtggtcatcttttatgcaagagattgccttgagaagtagtggtgcaccttcactcaaagtcactgccattgtgtcaccctccacttgtgatgaggttgagctcaatttcactagagagaatttgattcaatacgcgaaagacatcaatgtgtcatttgaattcaatgttttgagcattgaatccttgaactctccttcctgtccactgcttggtaaattctttgataatgaggcaattgtggtgaatatgccagtctcaattttcacaaactatccatcattgttcccttccgttcttcactttgtgaagcaactcaggccaaaagttgtggtcactttggacagaatttgtgatcaaatggatgtaccacttcctaccaacgtagtccatgttctccaatgttattcggccctgcttgaatcgttggatgcggtgaatgtgaatcttgatgtcctccaaaagattgagaggcatttcatccagccagctatcaagaaaattatacttggccaccaccattttcaagaaaaattacccccatggaggaacctctttatgcaatctggattctctccattcacatttagcaacttcacagaagctcaagctgagtgtctagttcagagggcacctgtgaggggatttcatgtggagagaaagccttcatcacttgttctatgctggcagaagaaagaactcatctcagtttctacttggagatgctgaggactgaggagcagcagcagaagctaattaccttatatttttaaaggtgcatggtaacttacattgcagtttatgtaattgtttgtgtaatttaggcttattgatgagatccacacccaaatgttttcttaactgcatgggttggaatctaccattctgtagttctaatatttactagtatgtcactttgaacatgggtagtaattatgcctttccccattcccatcatctaaagatgggtaactgtttctttgttatcttgaacacaaagcaaattgcttagtaagaaacgaacaatttagctaagaatgcagcctctatt

SEQ ID NO: 28922 - DNA, 2345 bp, Glycine max
  unsure (1)..(2345): unsure at all n locations
  Clone ID: TF_GmC491_1
cggatgctttcgaatcttcttagaaaaaaaaaagtagttttcatggggggcaaaagactcatgcattgtttaactgagataagatccaagttcttgcactagttcgccttggatttggtcttaaccgccaaccttgaataataaaaccacaaaaacaaaagcccacatgcatgccaattcctcgttgcttttacctgcaaaagtgctaagtccttgcatcagttctctattgttttggcttcaaagttcagatcatgctttccttttcatttaagaatatcttagattttgagaacactgctcatgtccagctggaattggagtaaaatgtggacaacgatcacggaccttaaatagaagtacctgttgtttgttgttcaaaaaaagagagaaatcagaaaattcaggagtgtttataccagacaaacattttggtgttatttgcatatattcaaagcaccagttacttttcaaatgcaaatgtctcagaaacataaaatgtcctatgactctagcaggttcagcattgagcctgcgcaaaatctggggtcatgttgcttcctgcaaagtgggaacctagactactactcatcctctgataatggtagccatgcaacctacccttctgtttgtattttcgaacaatattgcaccctggaatcttctacaaacaacaatttcccttccctaaactctccatctactgtcagtttctcacctaacaatagcccagtctcaaagctgcagtcaaaaccaaatgtgttgagttcacagaattcgcttgaaattgttgatgaatcgctagaaaacaaatctttcttgacacttaacgatgatgagctgaggcacaagataagagagcttgaaagtgctatgttgggacatgatacagatattctggatacttatgataccataattccagaagaatctgattcatttttgaaagaggcagaaaggtggaagagaatgatggaaatgatatctagaggggatttaaaagagatgctttgtacatgtgcaaaagcagtggcaggaaatgatatggagacaactgaatggttgatgtcagagttgcgtaaaatggtctccgtctccggcaatccaatccaacgattgggagcatacatgttggaggctcttgttgcaaggcttgcctcttcaggaagcacaatctacaaagtcttgaaatgtaaagagcctactggtagtgaactcctttcacacatgcatctactttatgaaatctgtccatatctcaaatttggttacatgtcagcaaatggagctattgctgaagtcatgaaggaggaaagtgaagtccacattattgattttcagattaaccagggaattcagtgggtaagcctaatccaagctgttgctggcagacctggagcaccccccaagattagaataacaggttttgatgactccacttcagcttatgccagggaaggaggccttgaaattgttggagcaaggttatcaaggcttgcacaatcatataatgtaccctttgagttccatgctatacgagctgctcccactgaggttgaactcaaagatcttgcacttcaacctggtgaagctattgctgtgaactttgccatgatgttgcaccatgttccagatgaatgtgtggatagtcgaaaccatcgtgaccggttggtgagattggcaaagtgcttgtctcctaagattgtgacacttgttgagcaagaatcacataccaacaacctcccattcttcccccgtttcgttgagacaatgaactactacttggctatttttgaatcaattgatgttgctctgccgagggagcacaaagaaaggattaatgtggagcagcattgtttggctcgagaagttgtcaacttaatagcatgtgaaggggaggaaagagtggaacgtcacgagcttctgaagaagtggagatcgcgttttactatggctggattcgcaccatatccactgaactcgtttattacttgttcaataaaaaatcttcagcgaagctaccgaggacattacactctagaggagagagatggggctctgtgtcttggttggatgaatcaagttcttattacctcttgtgcttggaggtgatgatccaatggcaactggttcatttttgttatttcagacttttagttagtttatgtatcatcataatcttcttacgcagaattcatagtcaagttactctgtagtttgttataaaataaaataaaaaaagaaacactagatttatgttaataatgccagtaccagcaagctcgatctcatcaaagtagaacaagaagcangcagcactatgtattctgtattttgctatgata

SEQ ID NO: 28923 - DNA, 1105 bp, Glycine max
  Clone ID: TF_GmC172_2
cacagaacacgccgagtcgactcagttgctgttcgagtactcgctcttcttcaaggtcgcacgcatggtcgccaacatcgcaatactcgaatccgcattaaccgagagcgggaagctctgcgtggtggatttcgatatctgcgacgagaaccaatacgtgagtcttcttcacgagctttcggcccggcggaagggcgctccggctgccgtgaagatcgtcgtggtgacggagaattgcgccgacgacgagaggctgaatattgtgggcgtgttgctggggagacacgcggagaagcttgggattggcttcgaattcaaagtgctgactcggagaatcgccgagttgactcgcgagtcgctgggttgcgacgcggacgagccgctggcggtgaactttgcgtacaagctttatagaatgcctgacgagagcgtctccacggagaaccctcgcgacaagcttctgcggcgtgtgaagacactcgcgccgcgcgtggtgacgctggtggagcaggatgccaacgccaacacggcgccgttcgtggctcgagtaaccgagttgtgcgcgtattacggcgcgctgttcgactcgctcgagtcgacgatggcacgggagaacttgaagcgagtcaggatcgaggagggactgagtcggaaggtggtgaactcggtggcgtgcgaaggaagggaccgcgtggaacggtgcgaggtgtttgggaagtggcgcgcgcgtatgagcatggctgggttcaggttgaagccactgagtcagcgagtcgctgattcgatcaaagcgcgactcggtggcgctgggaaccgagtcgcggtaaaagtagagaacggtgggatttgctttggctggatgggaagaactctcaccgtcgcatctgcttggtgttaactagttaactcaactttttactctctttattttaaatttctttggatatttcatatttgtatacacattgttattatattttaatgttacctagagaaagtgaaaaatcatagagttggaaaattataattaaacaatatcccgcgccccttctttcttatgccaaacaggcaaatagtaaaaagtctttggattccgagtaaacac

SEQ ID NO: 28924 - DNA, 2540 bp, Glycine max
  Clone ID: TF_GmC829_1
ggcctttccgggcacacgcgtccacccactgggagcatacatattgacctttgtgacttgccatgtgttccaagatataatctccaactccaaaaaaacctctttacatgacacatgtgtatgtttgtgcatgataaattctctttcatttttgggctgcaaatccaactgggtcattattactggttctgagtggtcttgcttcagatcaggtttttttgctaagaacaactcagattttcagtacagtgttactgccaagcagaagttgaattaacgtggataatgattaccgcgcttgaagagtagaagcaataattcagcagtgtttgtgtcaaaatattttgcagctcgagtatatcaaagaactggctagttctcaatgcaaacatctcagaatcataaaatttcttatggctctggcgggttctatgctgagcctgtgcaaaatttggagtcatattgcatgccatcaagtgagaacatagacaattactcttcctctgataacagcagccaaacaacctacccttcagtccaaactttagaacaatattgcacccttgaatctgcttccacaggcaacagtttccctaaccaaaattctccacctgctctcagtttctcatctaacaatagtccattgtcaaagctagagtcaaactcatatgtgttaaggccacagcattctcttgaaattgctagtggctcgcctgaggatgattcttatttgacgcatgaccttgatgacctgacacataagataagagagctggaaactgctatgctgggacctaatgcagatatgctagatatctatggtaccgtaattccagaacctgattcatttttgttagaggctgagaagtggaagaaaatgatggaaatatcatctagaggggatttgaaagagatgctttatatgtgtgcaaaagcaatggctgtgaatgatatggagacaactgattggctggtgtctgagttgcgtaagatggtgtccatttcgggcaatccgattcagcgactgggagcatacatattggagtcctttgttgcaaggatcggtgcttcaggaagcacaatctacaaatccttgaaatgtagtgagcctactggtaatgaactactttcttacatgaatgtgctttatgaaatttgtccatacttcaagtttggttacatgtcggcaaatggagcaattgctgaagctctgagggaggaaagtgaagtccacatagttgactttcagattggccagggaacccagtgggtgagcctgattcaagctcttgctcgccgccctgtaggccccccgaagatccgaatatcaggtgttgatgactcctattcggcctatgccaggagaggagggcttgatattgttgggaaaaggttatccgcacttgcacagtcatgtcatgtaccctttgagttcaatgctgtaagagtacctgctactgaggtgcaacttgaagaccttgaacttctcccttatgaagctgtggcagtgaacttcgccataagtctgcaccatgtgccagatgaaagtgtgaacagtcacaatcatcgtgaccaattgttgagattggcaaagcgattatctcctaaagtggtgactctggttgagcaggaatttaacaccaacaatgcgccattcttgcagcgctttgatgagacaatgaagtactacttggctgtttttgaatcgattgatactgttcttccaagggagcacaaagagaggattaatgtggagcagcattgtttggctcgcgaagttgtcaacttaatagcatgtgaaggagaagaaagagttgaacgtcacgagcttctgaataagtggagaatgcgtttcacaaaggctggatttacaccttatccattgagctccgttattaattcttcaatcaaggatcttctgcagagctaccatggacactacactctagaagagagagatggtgcactatttcttggttggatgaatcaagttcttattgcatcttgtgcttggagatgaaaatcctataacagttcattttttgttactccaggcttctagttaggttatgtatcatccttaacttcttcatacaatttctcctcacttcatagtcaaattactgttttgtaagagagcttccttaatcattatgtcagcaatgcaagtaatatcaagaaaaactatatatcctgaaattttctgaggtgtattttagaacatgtaatgcttaccaaaggtcagagtgatgccaatctataactgcaaagcatgtaagatgaaatctatagcaaaacaatgagtatgaaacttctatttcttagctcttaaaacaaaaaagttccgttttataagcttaattggatttctcctaaactgggttgggtcagagtcttcatattcaccagtaccactgcagcactagcaattatcctacaaaccctctcactgttccttatattgtttactcttctggtaactttatacacgaatctccatgctacttgaatttaattgaatatgggtatattctaatttg

SEQ ID NO: 28925 - DNA, 1887 bp, Glycine max
  unsure (1)..(1887): unsure at all n locations
  Clone ID: TF_GmC509_2
gtaagctncgaattcggctcgagcaaccatgtcctccacacaaacaacaaccctaacaccttcacctacgaacccacctcggtcctcgacctatgccggagcccaagccccgaaaagaagctcactgttcccaagccagaaccacaacacaacaaccagctagacctggatgatcatgttttgcctaattctgattggtgggagtccatcatgaaggacttaaccctacccgaagactctcccactccccttttgaaaaccaatccatcatgcatccctgatttcccaccttcttctcaagacccatcctttgatcaccccactcctgacttcacctctctctccgaaatctacaaccaaaacatccccttcaattacccctccaacactttagaaccttcctttcatgaccttaaccatagcctccacccccacaacaacaactgggacttcatcgaagagtttatccgcgccgccgattgctacgacagcagccacttccagctggctcaagccatacttgagcggctcaacaaccggcttcttcgctcgcccatgggtaagccgctccaccgagccgcgtttcacttcaaagacgcccttcagtccattctatccggttcgaaccggaacggaaacggttcgaacctcctttcctccatggcggagattgttcagacaattaaaacgtacaaggccttttcgggaatttcacccatcccaatgttctccatcttcaccaccaatcaagccctacttgaaaccctaaatggatcttcatttgtccacgttatcgatttcgagattgggcttggaattcaatacgcttctcttatgaaagagattgctgagaaggccggtcccggaaccgcgccgctccttcgcatcaccgccgtcgtgccggaggagtacgccgtcgagagccgcctggtccgccagaatctcaaccagttcgcgcaggatctagggatcagcgcgcaggtggacttcgtgccgcttcggacctttgagacggtgtcgttcaaggccgtgaggttcatcgacggcgagaagatcgccgtgttgttgtcgccaacgattttcagccgcctcggaggcaacggaggcagtgtcggcgcgttcctcgccgacgtgaggaggatggctccaggagtggtggtgttcgtggacggtgaggggtggacggaggcggcggcggcggcttcgttccggcgtggcgtggtgagcagtctggagttttattccatgatgctggagtcgctggacgcgtcagtggcttctgggggaggcggcgagtgggtgagtaggatcgagatgctgctgctgcggccgaagatcttcgccgcggtggaaggcgcacggcggaggactccgccgtggagggaggcgttttacggcgccggaatgaggccggtgcagttgagccagttcgcggattatcaggcagagtgtttgcttgccaaggtgcaaatcagaggcttccacgtggacaaacgacatgctgagctggtgctctgctggcacgaacgagccatggtttccacgtcagcatggcggtgttagcatattatatagaagagaagacaagagaagtgatgtattaatctaatgacaccttaaacctgcttatgtgaactttattatcaagttcacttttgacaaagaatgtagtttaactttaatttagttttttttttaattattatggaaaattacaaaaagaaaaaaactggaaagtacataaaaacttgtattttttccagacttttttgttttatgtaatgtagataaattgtgggggtgtctgtatttaatttgtttgagaagagttaccatgtaatgctggatatatacatctggcttttcaatcaaagtatttgggaaaaa

SEQ ID NO: 28926 - DNA, 626 bp, Glycine max
  Clone ID: TF_GmC164_4
gcggtgaagtccgccgttgaagaggttctgggatggatccggattctgaaccctaaaatcgtgacggttgtggaacaagaagccaaccacaacggggaagggtttttggagcggttcacggaggctttgcattactattccagcgttttcgactcgctcgacgcgtgtccggtcgaaccggacaaggctgctttggcggagatgtatctgcagagggagatatgcaacgtggtgtgctgcgagggaccggcgcggctggagcgccacgagccgctcgctaagtggagggatcggctggggaaagccggcttcagagccttgcatttgggtttcaacgcctacaagcaagccagcatgttgctcactctcttctcagctgagggtttctgcgtccaagagaatcaaggctctttgactctgggttggcatagccgccccctaattgcagcttcggcttggcaagccgcgcctctgggagacgacgaaacgctgcgttttgagcattgaggaaaagaacagaacagaacagatcacttgtttttgtttattctagtaactagtagcagtagtagtagtacacgggaagagtggtgaataataataatgtggtcatttttgcgtaaaaa

SEQ ID NO: 28927 - DNA, 1048 bp, Glycine max
  Clone ID: TF_GmC1717_1
gtccagtgggcctccctcattcaggctctcgcctccaacaaaacgggcccaccgggcccacaccttcgtataaccgcattgtcccgcaccggctccggacgccgctccatcgccaccgtccaagaaaccgggcgccgcttagccgccttcgccgcctcccttggccaaccgttctccttccaccattgcaggttggagcccgacgaaacgtttaaaccttcgtcgcttaagctggttcgcggagaggctttggtttttaactgtatgctaaacttaccgcaccttagttaccgcgcgcccgaatcggttgcgtcgtttttgagcggagccaaagcgttgaagccgaggctggtgactttagtggaggaggaagtggcctccattgttggagggttcgtggcgcggtttatggattcgctgcatcactattcagcggtgtttgactcgctggaggctgggtttccgatgcagggccgggccagggcacttgtggagcgggttttcttgggcccgaggatagtgggctcgctggcccggatgggggaagaggaggaaagagggtcgtggggggagtggttgggtgcggcggggttcaggggagttccgatgagcttcgcgaatcattgccaagcgaagctgttaattggtcttttcaacgacgggtatagggtggaggagttggggagtaataagttggtcttggattggaaatctaggcgcttgctctctgcctcgctttggacttcttcctcccactcagattaattttcctttttaatttctttgactccataaatggaaacaaaatcagaaactgtatcttttacacttttagttgtacttcccatttatagtagttttagttttaggatctttgctaacacgacagtgacctacctagcagtcctagaaaaattccaacacttctcctaacatgttttctttctcacagatctttttctctctgatgaaatcttgatgaacttcattatatttacgataaattagtgaatgtttagaaattcagtacaaaatgatttctatcaaa

SEQ ID NO: 28928 - DNA, 184 bp, Glycine max
  Clone ID: TF_4282525
agttgtgacgttcgccaatttcacttgtaaccaaacactgcttgaagctgtggaagggttagatcgcattgacataatatattctgttattgggcttggtggacagcggtcttctttcatgcaagagttagctctcaagaatggcagtgcacctgaactcaagatcactggatttgtgttaccc

SEQ ID NO: 28929 - DNA, 879 bp, Glycine max
  Clone ID: TF_GmC82216_1
gaaactgataacgaccgttgagcaggatctaagccacgcagggagcttcctggcgcggttcgtggaggccttgcattattacagcgcgttgttcgacgcgctaggggatggtttgggtgcggacagcctggagaggcacacggtggagcagcatctgttgggctgcgagatcaggaacatcgtggccgtgggcgggcccaagaggaccggcgaggttaagttggagaggtggggggatgagtcgaaacgggccgggtttgggcccgtttcgctcaggggcaacccggctgcacaagcgagcttgttgctgggaatgttcccttggagagggtatacactggtcgaagagaatggttccctcaagcttggttggaaggatttgtctctgttgatcgcctccgcttggcaaccgtcagatttgatgattacttatcctgattgaaacttttatgaatcattgcaactatcaactatgcttttggaatttatttaaaaataattgtttaattgattcagactcaaattgttagggttttctcccattagatgggagaggttatgcaatatggtatgagatgatgggggttgtgtatagtaataaattaataataccgataatgatgtggttgtggataccaaacaccagtcctcataggttcaataaataatgatagtagtagtagaattaagaagggaatgacgttagatccacgtccactggttccactacgctacacacaaagcccaagaatatttctacttctacttctactagtcaatttcctcatcgccttcttgtggagagagtgagagttcaccttacaattttcttggtggactcaactttttttttatgtcttcccatgtttaatgaattgt

SEQ ID NO: 28930 - DNA, 229 bp, Glycine max
  Clone ID: TF_5760190
tgggggtgatccaattcacatgctacgtgcttacatgttggagggtttaatagcaaggttggagtcttcaggtagcataatctacaatgccttgaaatgtgaacaaccaacacgcactgatctcatgacttacatgcacattctgtaccagatttgcccatattggaagtctgcttacacatctgctaatgctgtcattgcagaagcagtgctaaatgattctagaatt

SEQ ID NO: 28931 - DNA, 2143 bp, Glycine max
  Clone ID: TF_GmC4051_1
gcacgcccccagggggccttccggcctctgcgacgtcttctcctccgccctccatgggggcccctggttggggtcctcctggttcgcaggcctcagctcttcctgggccgaaccctctctcggcttctgcctttcccccgttggcttttgccttcgtcacagggcccccggctgggtgttcggcaccttctccctcagcctccggcgaaacgcctgaattgtggcccaaattatcaggttccaaagacaccctttttggactctggtcaagagctgttacttcggaggcagcaacagcagctccaactgcttcctcaccatctgctgcagaggccatccatgttggctgcaccaaagcagaaaatggtgaactccggcagcgaagacttggcgacccatcagcttcaacaggctataactgaacagcttttcaaagctgcagagctgatcgatgccggtaatctggaactcgcgcatgggatattggcgcggctcaatcaccaactttctcccattgggaagccttttcagagggctgctttttatttcaaagaggccttgcaattacttctccatccaaatgccaacaacagttctttcaccttctcacccactggccttttgctcaagattggtgcttacaagtcattctcagaaatctcaccagttctgcagttcgccaatttcacttgtaaccaagcactgcttgaagctgtggaagggtttgatcgcattcacataatagattttgatattgggcttggtggacagtggtcttctttcatgcaagagttagcactcaggaatggcagtgcacctgaactcaagatcactgcatttgtgtcaccctcccaccatgatgaaattgagctcagtttctctcaggagagtttgaagcaatatgctggggagttacacatgtcctttgagcttgagattctgagccttgaatctttaaattctgcttcctggccccagccacttcgtgactgtgaagctgtagtggttaacatgcctattggctctttctcaaattacccatcatatctacctttggtccttcgctttgtgaagcagctcatgccaaaaattgtggttacattggatagaagttgtgatcgaactgatgcaccatttcctcagcatctgatttttgcacttcagtcttattcagggctgcttgagtcacttgatgcggttaatgttcacccagatgtccttcagatgattgagaagtattatcttcagccatcaatggagaagcttgtcttgggtcgacatggtttgcaggaaagagcacttccttggaaaaaccttctcttgtcatctgggttttcaccattgacctttagtaactttacagaatcccaggcagagtgtttggtgcagaggactcctagtaaggggttccatgttgagaagaggcagtcttcccttgttctttgctggcaaaggaaggatctcatctcagtttcaacttggagatgctaagcagagccattttgcacctttgaactaccaatttaattttaaattctaaagtgctacataacttacagcttctattgatctttcttgcttgaatttgccttgtctatggttctatgctaattgtctgtttttaggatttattattttcagttaaggaagggaagtgaacatattaattagcaactgaatgacgatttatgagcgtgatatgcagtgtattattataaataggggcattctatatatgcattttgtcctgttttaattgcctaaatttatgggcttttcttgtatgttttacaagaaagtaacactaattaccctgtaaagttgaggctttgtttgatgtctttgatcctgataagtagtctctctctagcacatgtgctctatgaaaactattcatgtagttgttgaaggtaacactttaacagttccccatactattcagtgtggaatggaatgggaattattcagttagtttggtagtttgcagaaattgcattacatatacactttatctgcacacttttcacctagagatatggagccaggttttttaggaatatttattgtggttgctcaatgctgatcagcacttgctgccttgtatgatattttaagcagaaaggaggaaataagtaatctgcac

SEQ ID NO: 28932 - DNA, 572 bp, Glycine max
  unsure (1)..(572): unsure at all n locations
  Clone ID: TF_9564347
aattcggcaccagacgttatttgtctgatgatagaaagggaattagctgccaaagtttttcccttagggatgcttttttgaatctaatcaaaggccttaaccccaggattgtgctcttggttgatgaggattgtgatcttagtgcttcaagtctcacatcaagaataaccacatgtttcaaccatctatggataccctttgatgcattggagacttttttgccaaaagatagttgtcagaggtcagagtttgaatccgacataggccagaagattgagaacatcataggctacgaagggcaccaaagaattgagaggttggaatctggggtgcaaatgtcccaaagaatgaaaaatgtgggctacctcagtgttcctttttgtgatgaaactgttagggaagtaaaaggtttgctagatgagcatgctagtgggtgggggatgaaaagagaagaaggtntgttagttctcacgtggaaaggaaacagctgtgtgtttgcgacagcttgngtcccctgtgaaatattgagggatcatcatatcggtatggatgcaagcctgtcttaaacacac

SEQ ID NO: 28933 - DNA, 2174 bp, Glycine max
  unsure (1)..(2174): unsure at all n locations
  Clone ID: TF_GmC214_1
cgtggcgtacggctgagaggcgaggggagggggatgcagtagaatagtaatagtggtaacaaaaggcaacagagaacagaagagaaaggaaaagagagggtttggtgagttacccaagagaaaggatgaagagagagcgccagcagcttggttccaacgcaggaacctcaagctgcggttattcaagcggaaaatcgaatctttgggaggaagaaggaggcatggacgagcttcttgcagtggtgggttacaaggtgaggtcatcggacatggcggaagtggcgcagaagctggagcgtcttgaggaagccatgggaaatgtccaagatgacctcacggacctttcaaacgacgccgttcattacaacccttccgacatctccaactggctccaaaccatgctttccaattttgaccctctcccctccgaggagcccgagaaggactccgcctcgtcggactacgatctcaaggctattccggggaaagcaatctatggagctggtagtgacgcgctaccaaaccctaagcgcgtgagagccgacgagtcaaggcgcgcggtggtggtcgttgactcgcaggagaacgggatccgcctcgtgcacagcctcatggcgtgcgcggaggccgtggagaacaacaacctcgccgtggcggaggcgctggtgaagcagatcggcttcctcgctgtgtcacaggtcggagcgaggtaacaaaaggcaacctacttcgccgaagcgctcgcgaggcgaatctacagagtcttccctcagcagcactccctctcggattctctacagattcacttctacgaaacttgtccttaccttaagttcgcgcacttcaccgcaaaccaggcgattctcgaagcgtttcaagggaaaaatcgcgttcacgtgattgatttcggaatcaaccaggggatgcagtggccggcactgatgcaagcccttgcgcttcgcaacgacggccctccggttttccggctaaccggaatcggaccgccggcggcggacaactccgaccacctccaggaggtagggtggaagctcgcgcagctggcggagaggatccacgtgcagttcgagtaccgcggcttcgtcgcaaacagcctcgccgatctcgacgcctccatgctggatctccgagaagacgagtccgtggcggtgaactccgtcttcgagtttcacaagctcctcgcccgccccggcgcggtggagaaagtcctctccgtcgttcggcagattcggcctgagatcctcaccgtcgtcgagcaagaagcgaaccacaacggactgagttttgtcgaccggttcaccgagtcactgcactattattcaactctattcgactcgctggagggttcgcctgtgaacccgaacgacaaggccatgtcggaggtttacttagggaagcaaatctgcaacgtggtggcgtgcgagggaatggaccgcgtggaaaggcacgagacgctgaaccagtggcggaaccggttcggttcgaccgggttttctccggttcacttgggttcgaacgcgtacaagcaggccagcatgttgctatcgcttttcgggggtggggatgggtatagagtggaagagaacaatgggtgtctcatgttgggatggcacactaggcccttgattgccacctccgtgtggcaactcgctacaaaatcggtggttgctgctcactgagtcgactcgccgattcctcagccagctttttctttttattttttgttttaaattaatttctaatcatgcccaccgaaaaaaaggaaaaaaaaaaaaaagaaggggaacttgaggggggattgagaggtcagtgtgtaattgtgctatgctgagctgtgagcactgattgcatgagcctgagacccaccattgtctattttcctgccccaacttatgtctctctccaacccttaatttacttattttgcatttgccgcatttgtaaaccttgattttattttacttggctttctttggggatgggttgggtggaaatctcttgtaatttttcagggttgggaaatcaaaaagcttaatgtgtatttatttattatggtttaattaatatattagttgtattatgtagcttgctggtgatataataaattagaatatatttttagtgtaaaaaaaaaaaaaaaaaaaannaaacaaaaa

SEQ ID NO: 28934 - DNA, 3106 bp, Glycine max
  Clone ID: TF_GmC3121_1
tttttgtttttttttttaaccaacaaaaattgttgtatgcctatattttattacaaaatgacaatcagtccaacactccagtctccagtcacacgcacataatgcatgtttactcccttcttttattttgaaaaatgtaaattatattaaatcaaaaatgatacaacaataaacaggacatacccgcagctagaaaaaaataaaagtctccctaatacaaaaaagggctagatcaagatacttaaacaaattccacaagttcgtttgtttttatatccgaaccatgacccagtggcggagaaattcatagtctaagaacataaaaaacagacaacaaacatcttaagttaaaatgattccgtgtcacgtttagcagccatcaaaccaccaaagcaaattacaatgtccagtgtgtgatctcttctcttcagccaaaggaagaaaacggttttgtgacatctacctcacaacaaaaaaaagcgtaggctcctctcttaaatcttcaaaccccttaccgcaccatccgctgccgccagctctcaacacgcttctatcggaaacggcccactcctgatgttgcacaggtttccgtttctctctttagattctccaatcactgataagtaaatgggtgcggttggttcctcaccgggtgtggatcacatgaactgccagaaggagctagaaaggtcccggtacagtcttgaatgggtgtccctcaaagcaagcatgaataacttcctcaacacgattcagtgcaaaggatgagctttggggtcaggatgattctctacggtaaacttctcgttggactctctctgctggggaacgggacttgatgcactactcttgtttcctctttgctcgtttttctctagctctctctcatttttctctttctcgtcttagtttaaacttcacaatccaattttcttttcctatgtacccaattccaaaatccaaatctagctaattctaattccattcttcaggagttgaattgaattcgtgatgaagagggaccacaaagatagctgcggcggcggcggcgccgccggagggactgtgaagggtgagtgttcctcaatgcagtcaaacgggaaggcgaagatgtgggaggaagagcaacagcagcagcagcagcaacaacagcaacaacaacaacaggggatggacgagttgctggcggcgttggggtacaaggttcgtgcttccgacatggctgacgtggcacagaagctggagcagttggagatggtcatgggttgtgcccaggaagacggaatttcccacctggcctccgacaccgttcattacgaccctacagatctctattcctgggtccaaagcatgttaaccgaactcaaccccgaacccaacaacaacctcgatccatcttctttcttgatcgacaacaacaacaacatcatcaacagcacagcccctgttttcaacgacgattccgaatatgacctcagagccattcctggcatagcagcctacccttcttctcttcctcaagacaaccacctcgacgaaatcgaaacggctaacaacatcaacaagcgcctcaagccatctccagcggaatcagcagactccgccgcgtctgagcccacgcgccatgtcgtcctcgttgaccatcaggaagccggcgtgcgtctcgtccacactctcctggcgtgcgcggaggccgttcagcaggagaatctcaagctcgcggacgcgctcgtcaagcacgtgggcatactcgcggcttcccaagccggcgccatgaggaaggttgcttcctacttcgcccaagccctggcgcgtagaatctacggaatcttccccgaagaaaccctcgattcctccttctccgacgttctccacatgcacttttacgagtcctgcccttatctcaaattcgcgcacttcaccgcgaatcaggctatcctcgaagcatttgccactgctgggagagtccacgtcatcgatttcggcctcaaacaagggatgcagtggcctgcactcatgcaagcccttgcattacggcccggcgggcccccgactttccgtttaaccggaatcgggcccccacagcccgacaacaccgacgcgctgcagcaggtgggctggaaattagcccaattggcccaaatcatcggcgtccagttcgaattccgcggcttcgtttgcaacagcctcgcggatctcgacccgaatatgctcgagatccgacccggggaagccgtggcggtgaattccgtcttcgaactccaccgcatgctcgcccggtccggatccgtcgacaaggtcttggacactgtcaagaaaattaatccccagatcgttaccatcgtggaacaagaagcgaaccacaacggaccgggttttctagaccggttcactgaagccttgcattactattccagtcttttcgactcgcttgagggttcgtcttcttcttcgaccgggttgggctcgccgagtcaggatctgttgatgtccgagttgtaccttgggagacagatttgcaacgtggtggcttacgagggcccggaccgggtcgagcggcacgagactttgactcagtggagggggagattggactcggccgggttcgacccggttcatctcgggtccaacgcattcaagcaagcgagtatgctacttgctctattcgcaggcggtgatgggtatagggttgaggagaataacggctgcctcatgcttggctggcacactaggccactcatcgctacctccgcttggaagcttccctcctccagcgagtctagtggcttgactcagtgaatgtaaaactatagattaattggacttgttccagtgaactgagtcagtgaccgagtcagtgagccttccaggcagcaagaggataaataaatgagagggtgaacaaaaaaaaaaaaaaaaagtaaaaagaaaacccaaagaaagactgtaatttgtaattgtgctctcataattaccgtttctcctctttagtgttttgttttcctttctctaaattattattattatataatttgtttaattcttcagtattatgatgtccttttcgttttaatctttatcttttatttccattttattttttatc

SEQ ID NO: 28935 - DNA, 430 bp, Glycine max
  unsure (1)..(430): unsure at all n locations
  Clone ID: TF_4292932
accaggtgaccgagcttgccgggtatgtggatctaattccttggcataggtttgggtattgtgcgtccaacaatgaaatttacaaagcaataacggggttccaaagggtacatattgtagattttagcataactcattgcatgcaatggcctacttttatagatgggttagcaaaaaggccagaaggacccccttcacttagaatcacggttccatcttgtagaccacatgtaccccccttggtcaatatttcaatacacgaagttggattgcgtttagggaattttgctaagttcagagatgtcccttttgaattcaatgttataggaaacacagaaggaccattaacacctgcggaattgagcgatgaatcgactagctntcactttgaagcaatgttaagtctcttaaatcctaccatgctaaacct

SEQ ID NO: 28936 - DNA, 929 bp, Glycine max
  Clone ID: TF_GmC104019_1
tttttttgggaccagaaaagattaatattgctgataaagaaaaatgctgcctacaattcgtaagcaaagatcctctagagcggccgcttttttttttttttttttttttttttttttctgacaattagattggatttaatgttgagacctttgtcattaacttgtacatagtaatggaacagaaaaagaagagggatgttatgccttattgcagaactttcatttccaagcgcaagaagcaaccaaatctctattcatccaacccagataaagagctccatctctctcttgaagtctatatctatcactgtagttctcgagcaacttcttgatggtaccattcaccaatgaacttaaagggtaaggagtgaaaccggccattgcaaatcttgacctccacttgccgagcacctcatgtcgttccaccctctcgaccccttcacaagctatgatgttaaccaagtctcttgccaaacaatgttgctcaacattgattctctctttatgctctctggaaagagtcacatctattgactcaaacattgctgtgtaatagtccagagtttcaaggaaacgtggaaagaatgcagcagtgttggtgttagattcttgctcaacaagtgtcaccacctttggtgataggctcctaaccaacctcaacagcctatccctgtgattctgagtactcacactttcatccggcatgtgatgtagcatgaacgcaaagtttacagccagagcttcccctggtcgtactccaaggttatgtagttgaacatcaaaacctgagatagctgcagcatgaaattcaaatggcaccttaaaatgctcagcaagctttgataacctccttcccactatgtgtagtccaccaccgcgagcataagccgatgttgaatcatcaatacctgtaatccggatgtggggtg

SEQ ID NO: 28937 - DNA, 1025 bp, Glycine max
  Clone ID: TF_GmC7815_16
cttgtggagttccatttgaattccgcagtgctgcaatatctggctgtgaggttgtacgaggaaatattgaagttctacccggagaagctctggctgtaagttttccctatgttttgcaccacatgcctgatgagagtgtgagcactgagaatcacagagatagattgctgaggttggttaagaggttgtctcccaaggttgttaccattgttgagcaagaatccaacaccaacacgtccccattctttcacaggtttgttgagaccctggattattatactgcaatgtttgaatctatagatgtggcttgccccagagatgacaagaagcggattagcgcagagcagcattgcgtggcacgagacatcgtcaacatgatagcttgtgagggggttgagagggtggagaggcatgaacttttgggaaagtggaggtcaagactttccatggctggatttaaacagtgtcaattgagttcttcagtgatggttgctatacaaaatctcctaaaggagttcagtcaaaattataggcttgaacatagagatggtgctctttatcttggttggatgaacagacatatggccacctcttctgcttggaggtgaaactcactgattcgagagtttgcctcctttttgacctttaattgagcataattcaccatatatccgtagtagtctctccataggacttgagatttacctctgttctaaaatgctttctgtagaatctcaaagctcgttgtaaatgctaatactgaaacgaaagaaaagaaacgtctgttatgactctagcattattttcctgccctcttccgctggctgtagtgttattttaactaatgtgatatgagttggatactcgtttagttccttgtactgactcaaatgagaaaccttacactacagatttacattaagctcaaggttttgttggtctactactctactatatatcaccctgtagtcataatagatacataattctacgcatgcataatgaatttacttcttcttgagttt

SEQ ID NO: 28938 - DNA, 665 bp, Glycine max
  Clone ID: TF_GmC191976_1
ttttagtcaacaacgttaacatttattagccaaaactctagaaaattataagttaaaatttatcatcattttgtgtgcagatttttaccaaaacgatgaaagttaggacctaggaatgaaggagtatcttattctttcaaactggttgccatgctgagacagtgagaagaaacctattttgccaccccaaagagataactctcccttcatccctttcagaaactctgaatcccccaccaccctcttcctcaaactgtagtggataataatgggtcctcatcttcagaagcagctttgcttggatcacacactttgagcttatttttctcccaacaaacccatgattctccattctccctttccatgtttccatcctgtcatatttggggcaataatattccacaccatcatccatgtcatagttaagcatgctcttgatctctttccccaaaagctgcttctcaatcctcaacctgtgagtgctctcaaggggcaagcaatcatccagtgaatcaaacatggctgcaaaatagtgcaaagactcatggaaccttgacaagaaggtcttgagactcctgcagctaccttcttgtttcaccaacaccacaatggaggggctaagataatgaacaaatccaatgtgtgagacaccttcatgaaactac

SEQ ID NO: 28939 - DNA, 322 bp, Glycine max
  Clone ID: TF_15001148
gccgtggcaagctttgaccaacggaatgcaaatgacttactcagccagattaggcaacactcttcagcttttggggatggactccagcgtttggctcattactttgccaatggccttgagacaaggttggctgctgggaccccatcatacatgcccctagaaggaacaacttccgctgatatgttgaaagcttacaaactatatgttacatcctctcctttgcagaggttgacaaattatttggcaacccagacattgttagtcttgtggaaaatgagggcagtgttcatattattgattttggcatttgctatggttttca

SEQ ID NO: 28940 - DNA, 2658 bp, Glycine max
  unsure (1)..(2658): unsure at all n locations
  Clone ID: TF_GmC170_3
ctcactgattaccattattttcttttatggactcctcattcacacaaggcttaactaaactaaacacctgtgtctgcaaaacaaaacaaaccaaatatactctcttccttcccacgaagnnnngtcacctatcgcatatcactgatcatatcctcctactacctagcctttgattnnnnnaacaaaaggctttggctcttttaacacattggtgaacctttgtgcacaacacttatcacagaaacaacaacgctcactgattaccaatccatcgtttttgaactccacataaggctaaactaaacacctctctctgcaaaacaaaaccactctcttccttccaacgaatctctgccacacaacaaataactctgaacatataatcaacctaagacccgcctctgattctgaacaacaaaaggctaatttggctcttttgacgacaatttttgctgacacctaaagcatctagcagcttatcaaaatggagactaaccatacagcaaaacggtgttgtaggactttagtatgcatttgatcaggagcagctaggaagcatttttacaattacaaagtttgaccactcattgttctgatcactgagtaaataatttctttttagatgcaaacttctaagaagcacccaacttcagctggtatccatttatacctgcagcctgcacaagatattgatccttacactcattaccaaatattgcaaagcaattcatgccatgataatagcagcagccagggaaccactatttcttttgaaaccagcaaggagcaatactttacccttgaatcatccccagcaatcaatgatctcataggttgtgattctccttcctatgctagtgtatcatccaataggagtcctttttctccacaagcttctcattcagaccagcatcagtcatcagacaacacctatggatcaccaacaagtgcacactctagatatgatgatgacggctacgaattgaagaacaagcttagagaactcgagatttcgttgttggggcctgattcagacattgttgatagttggcactgctcctacaagggtggccgccacagagcatcatctccaacggctaaacacaattgggatcagattgtggaaatgattccaaaattagacttgaaagaagtcctcattcggtgtgcacaagccgtggcagatgatgatattgaaacagcagtgggatttatgaacaatgtattggcaaagatggtatcagttgggggtgatccgatccagaggttaggtgcctacatgttggagggtctaagagcaaggttggagtcctcagggagcataatctacaaggccttgaaatgtgaacaaccaacaagcaatgatctcatgacttacatgcacatcctgtaccagatttgcccatattggaagtttgcttacacatctgcaaatgctgtcattggagaagcaatgctgaatgaatcaagaattcacataattgacttccaagttgcacagggcactcagtggctgttgcttattcaggctcttgcatctcgtccaggtggagcacctttcattcgtgtaaccggagttgatgattcacaatcatttcatgcaaggggtggaggacttcacattgtaggaaaacgcctctcagattatgccaaatcttgtggagttccatttgagttccacagtgctgctatgtgtggaagtgagcttgaactagaaaaccttgtaattcaacccggggaagctctagttgtgaacttcccttttgttttgcaccacatgccagatgagagtgtgagcacagagaaccatagggacaggctattgagactggtcaaaagcttgtcacccaaggttgtgacccttgttgagcaagaatccaacaccaacacttctccctttttccaaaggtttgttgagaccttgagttactacactgctatgtttgagtccatagatgtggccctccccagagatgataagcaaaggatcaatgcagaacaacactgcgtggctcgcgacatcgtcaacatggtagcttgtgagggggatgagaggctggaaaggcatgaactcttagggaagtggaggtcaagattttcaatggctggttttgcaccatgccctttgagttcctcagtcacagctgcagttaggaatatgttgaatgaattcaatgaaaattataggcttcaacatagagatggcgctctttatctaggatggaagagtagagctatgtgtacctcttctgcttggagatgttactgactcattgtcattgtcattggtatatgtatttttttttatccacaaatattatttgttagtaatatattagcttttattagcggggaatttgaacccatcacctctccccattcccatcattggtatatgcatattttcctccttgttaatttctttcctttttatgacattaagtcattatttagtggtatccgctgtttctcaataggattaattagagacttagctttcttccaacgtgtatcctttaccttttgtgggttcagcttagtctttaaactttcttgtacatgtcaatactagaaagaacgaaagagaaacctagctcatatttattgacaaaccctgttttgcagtttttagagtatagtggttactcattttaaaaa

SEQ ID NO: 28941 - DNA, 234 bp, Glycine max
  Clone ID: TF_700837816H1
gggaaatgcttgatatcaggccaggcgaggccttggctgtgatcttccccttgcaactctatcacacagctgatgtgagtgttcatgttagcaacccaagggttggacttttgagcttggtaaggttactttctcccaaggtgaccacatttgtggagcaggaatcaaacacaaacacaaccccttttttcaacaggttcattgaaaccttggattactacttggcaatctttg

SEQ ID NO: 28942 - DNA, 765 bp, Glycine max
  Clone ID: TF_GmC96540_1
gcggttatatcttcgttgaggaggttgaaaccgaggatcgtgacggtggtggaggaggaggctgatttggacattggattggaagggtttgagttcgtgaaagggtttgaagagtgtttgaggtggtttagggtttactttgaggccttggacgagagttttccgcggacgagcaacgagcgtttgatgcttgagagggcggcggggagggcggtggtggacctggtggcgtgttctccggcggattccgtagagaggcgggagaaggcggcgcggtgggcgaggaggatgcatggaggtggggggttcaatacggtggcgtttagcgaagaggtatgcgatgatgtgagggcgttgttgaggaggtatagggaagggtgggcaatgacacagtgctccgacgccggaatattcctgacgtggaaggagcagccggtggtgtgggccagtgcatggagggccttgacgtagagtagaggagaatgacttgacgtgagtaaggtgttgagggacggattcccacgtgctctctgttccggaaacacgtgcccaacgctgagggttctttttttcttttttcttttaaggtaattaattaatggctttttttacttcctgttttgagtttgctacgtaaggcagtgggattaattggaaggtatgagggtgataggaggaaggggattttcctgtattattcaaaaaaggaatcatcatcaagtaaattaattttcattattaactttttttcacatttcgtttttt

SEQ ID NO: 28943 - DNA, 881 bp, Glycine max
  Clone ID: TF_GmC164_3
ccacgcgtccgaaaggggcagaaatgatattagcaccagtatctatcaatttgatgcattagtactcaacacatcatggtcataacattatacaaggcagtttctccgtcaatttcctcacacacctactcttaacttataataattactaactccacaattctccccatggagcgtttagagggcgtgatttcagacacaatcctctacgatccctccaacatagggttaggttccttggtggacactctcctctccgacttggaccaaaccatgtcgttaccctcacactaccatctctcatcagaccttcccgatttcgccaccaccgtggaagaacactccgggatacgactcattcacacgctgatgacgtgtgcggattccctgcaacgtggccacttctcattcgctgcctccctcatccagaacatgcaaggcttgttggcgcacgtcaacaccaactgcggcatcggaaaagtcgccgcctgcttcatcgacgccttgcgccgccgcatctccaacaagtttccagcatcatccgcttacgagaacgacgttctctaccacaactactacgaggcgtgtccttacttgaagttcgcgcacttcaccgcgaaccaggcgatcttggaggccttcaacggccacgattgcgtccacgtcatcgacttcaacctcatgcaggggctccagtggccagcgctgatacaggcgctggcgctccggcccggaggaccgccgctgctgaggctcaccggcatcgggcccccctcggcggaaaaccgcgacaacctccgcgaaatcgggctgagactcgccgagctggcgcgctccgtgaacgtgcggtttgcgttccgcggcgtggcggcgtggcggct

SEQ ID NO: 28944 - DNA, 1281 bp, Glycine max
  unsure (1)..(1281): unsure at all n locations
  Clone ID: TF_GmC161879_1
gccgtcgcttggcgctctccggcaggcagggcggtcccccgtggcttcgcatttctcgtgcccagcttccgcagccaggatttcggcctgcagaaagggttgaggagaccgggcggcgtttggcaaactactgcaagaagttcaaggtaccttttgaatacaattgtcttgcacagaaatgggaaactataaaacttgcagatctcaagatagacaggaatgaagtaactgttgttagctgcttctaccggctgaagaacttgcctgatgaaactgtggatgtgaagtctccaagagatgccgtgttgaagttgataaggaggatcaatccaaacatgttcatccatggggtggtcaatggcacttacaatgcaccctttttcctgactcggtttagggaggcactctaccacttctcatcactgtttgatatgtttgaagctaatgtgcctcgtgaagacccggaaagagtgatgcttgagaatgggttgtttggaagagatgccatcaatgttatagcgtgtgaaggggctgagagggttgagagacctgagacctataagcagtggcaggttaggaaccagagagctgggttcaagcaagtccgatttgatcctctattggtgaatgatgaaaaagaaatggtgaagaaggaatatcaaaaagattttgtggtggctgaggatggcaagtgggtttggctggggtggaaagggcgtattctgaatgccatttctgcttggactcctgcttaagcaatgtccagaaagtgtcttgtaactagtaatctactcttaggtcggttaatgaaaatgcaataaactactatttactatttttctttctccatttgtttccacatttttagatattgctgttcaattcgcttcctagctggtatggcatgacacatttccttcttttttttttcatgaagcacaaatttaccactgatggtaaggaatggcagaagcaaaaataagaaaaaagggcaccccaatggaagactagatgtagtcaatcataggagcaactcaaacagaagaccagcagctacatctgactaaaagtagctgacaatactctctcaattacggattagaattagataggggcatcttcaataatgttccacgtattgcaatgtcttctgtgagaaatcagtcattagccttgaccatctgcacaccataaacagttctattttatcagcaaataaactgcccaataaacagtaatgtctgtttcgcttatttgnngtaatcagagctnnccttgcta

SEQ ID NO: 28945 - DNA, 550 bp, Glycine max
  Clone ID: TF_LIB4200-008-Q1-N1-D10
cacaaaataatttcgcaaaactgaccatttcaaaagaagaagaaaaggaaaagaaaaaagaaatagagaggagagagagagagagagatagagagagaaaaatttacattatacatcactcttgtttactagttactactataattaaacaatttttccggttcttgaaactcattgctcggaaacgcagcgtttccctgtcctgcatcggcgcagcttgccaagccgaagccgcaatgagagggcggctatgccaccccaaagtcaagcatccttgattctcttccacggagtacccttcagcagagaaaagagtcagcaacatgctggcttgcttgtacgcgtttgaccccaaatgcagcggcttgaagccggctttctcgagccgctccctccacttagccagcggctcgtgcctctcgactcgcgccggtccctcgctgctaccacgttgcatatctccctttgcaggtacatctccgcaagtgccttgtccggttcgaccggacacgcctccagcgagtcaaaaacggtcgagtagtaatgcaac

SEQ ID NO: 28946 - DNA, 2187 bp, Glycine max
  Clone ID: TF_GmC172_1
attcatcagaatcactccaacatttcaaccgaacgttatattcatcagaatcactccaacatttcaaccgaaagaaacctctctctctctctctcccatgcgtttctcaaaaaaccaaagctattagtttagttgcttccttattttcttcgccagagatcgcaggatgtcgtcgccgaggttcccaggtggtggagcctccgatttctacggcggagcaggaggatttcccagtcagttcacggcggttcaacccaccatgaacaaccactccgccaccacaccccgccctctctaccgatcccaaccttcaattctgcttaacccctcgtcccacatcgcccaacaccaaccatcccctctcatcgggaaacgcaccctcgccgaattccaaacccacaacctcaacagccgcaacaacaacaacgataacccactcctttcaaaccatctacttcgttctgtgaagcccagaactttccagcacacagaattatccacctttccgtcacgtcgttacggcctaccccttctccaccaccttcgccctaacgctgttaacgcacaacaacaacccgttacgaattcgatcctcgccaatacaaattatttgtctccggttcacagcagactaaccgcaacccacgaaccggagaagaacctaatagccctccgtctccaggagttggaaaagcagcttctagaagacaatgaagacgacgccgtttcggtcattaccaccaccacttctgaatggtcacacacaatacaaaacctaatcactccgcagaaacccgcgtcttcgtctcccacttcctctacgacgtcgtctaacacctccgtagaatccagcagttacaaacagtccctaacggaggccgcaaccgcgatttcagaaggcaaattcgatgccgccactgagatcctaacccgattattgctgaattcagatcaacgcttcgtgaattgcatggtttctgcgctcaaatcgcggatgaatcacgttgagtgtccaccaccggtagccgaattgttcggcacagaacacgccgagtcgactcagttgctgttcgagtactcgctcttcttcaaggtcgcacgcatggtcgccaacatcgcaatactcgaatccgcattaaccgagaacgggaagctgtgcgtgctggatttcgatatcggcgacgggaaccaatacgtgagccttctccacgagctttcggcgcggcggaagggagctccatccgccgtgaagatcgtcgcggtggcggagaacggcgccgacgagaggctgaacagcgtgggattgttgctggggagacacgcggagaagctagggattggtttcgaattcaaagtgctgattcggagaatcgccgagttgactcgcgagtcgctggattgcgacgccgacgaggcgctggcggtgaactttgcgtacaagctttatagaatgcctgacgagagcgtctccacggagaacccacgcgacgagcttctgcggcgtgtgaaggcactcgcgccgcgcgtggtgacgctagtggagcaggaggcgaacgccaacacggcgccgttcgtggcgcgcgtgtcggagttgtgcgcttattacggcgcgctgtttgactcgctcgagtcgacgatggcgcgagagaactcggcgcgagttaggatcgaggagggactgagtcggaaggtggggaactcggtggcgtgcgaaggaaggaaccgcgtggaacggtgcgaggtgtttgggaagtggcgagcgcgtatgagcatggctgggttcaggttgaagccgctgagtcagcgagtcgctgagtcgatcaaagcgcgactcggtggcgctgggaaccgagtcgcggtaaaagtagagaacggtgggatttgctttggctggatgggaagaactctcaccgtcgcatctgcttggtgttaattagttaactctactttttactttttattttctatggatattgtatacacattgttattatattttaatgttacatagagattatggaaagctaaaaaaaccatagagttggaaaattgtgttaaagtataccccactcctcttccttctcccaaccaagcaatagtaaaaagtgtttggattccgagaaaatttatgtgacttgatgcagcatttatgaatataatgattcatttatgtacttttataaccaa

SEQ ID NO: 28947 - DNA, 2043 bp, Glycine max
  Clone ID: TF_GmC997_1
aaggcagaataacaatatatacaaaattctctaatccaacgaccacaaagtcttgtacgtgaacatatgtgtaattatcagtacatgtacagaagcaaagtgattaaaatactaacgaaagcgatgacaagttgtgaaaaggaccctgtatataatttcaaaatcacggttttgtgttggccatttgagcggcgaagagattggaattaacatctccccgaggactagcctccatccaccttttgagttcaaaggggtagggggtgtcaatagtcaaaggaggaggactagtccattgctgtccataatagaaattaagcatcaagatggacataagtccttacactactccaaagaagctatcaccacactccaataaccataacaacatcattgccgatgaggctgcagcgttattagatcacaacaacatgcaccgcagcaaccacagccacacttccacgagccgttcctcggactcaagtgagcctagtgaagacggtaaatgggcacccaaacttctcagagagtgtgcaaaagcaatatccgagagagactcaagcaaaacgcaccatcatctttggatgcttaacgagcttgcttcgccttatggggattgtgatcagaaactcgcctcttatttcttgcaagcgttgttctgcagagccactgagtctggtgagagatgctataaaactctttcctccgtggctgagaagaaccactcgtttgactcagcgaggaggttgatactcaagtttcaagaggtaagtccctggaccacgttcggacatgtggcctccaacggggcgcttttggaggccttggaaggcgagccaaagctccacatcatcgacctcagcagcaccctttgcacgcagtggccaacactccttgaagcgttggccacgcgaaatgatgagacgcctcatcttaaactcacagtggtggccatagctgggtcggtgatgaaagaagttggtcaacggatggagaagtttgcaagactcatgggcgtgccctttgaattcaacgtcattagtggattaagccaaatcaccaaagaaggcttgggggttcaagaagatgaggctatagctgtgaattgcgttggagcattgagaagagtccaagttgaagagagggaaaacttgattcgtgtgtttaagtctcttggtcctaaagtggtaaccgttgttgaagaagaagctgatttttgcagctcgaggggggatttttttaagtgctttgaagagtgtctcaagttctacacactttacttcgagatgttgaaggagagtttccctccaacgagtaacgagaggttgatgttggagagggagtgttcgaggagcatagttagggttttggcttgttgtggtactggtcatgagtttgaagatgatcatggagagtttgattgctgtgagaggagggagagagggattcagtggtgtgagaggctgaggaatgcgttttcgccaagtggattcagcgatgatgtggtggatgatgtgaaagcattgctcaagaggtaccaatcagggtggtcacttgtggtgactcaaggagatgaacatatctcagggatttacttgacatggaaggaggaaccagtggtttgggcatcagcatggaaaccctagaatatacttacttgaattcaatgaatgtgtgtgtattgatgatcattgtatatatatatatatatctgtgtttggtgtatggtaccattactatatatatatattggggggctaggctaaagctaaagctagctaaccttaaaaccaagggactgaagagaagtacactggaaattaaggtgctctctggggatatataccaataccaagagtattattattagatggagctagcaatggatggatggatctggatttttcttttaactttctcgtatgattcttgcacactttgtaatttttctcccgtccaagtctcctttaaagggcaagactttttgcttgggagtttgtgttgttagacttttacacctttttattatagttaagttaatat

SEQ ID NO: 28948 - DNA, 1487 bp, Glycine max
  Clone ID: TF_GmC7815_18
ctggctgtgtctgacgatgatgttccgacagcaagaggctggatagataatgtattggggaaattggtatcagtctctggtgatccaatccagaggttgggtgcttacttgttagaggggcttagagcaaggttggaatcatcagggaatctcatctacaaatcccttaagtgtgaacaaccaacaagcaaagagctaatgagttacatgcacattttgtaccagatttgcccatactggaagtttgcatacatatctgcaaatgctgtcatccaagaaacaatggcaaatgagtcaaggattcatataattgattttcaaattgcgcagggcacacagtggcatttacttatccaggctcttgcacataggccagggggacccccctcccttcgtgtgaccggtgttgatgactcacagtcgactcatgcacgaggtggaggactttggattgttggagaaaggctttcagattttgccaggtcttgtggagttccatttgaattccacagtgctgcaatatctggctgtgaggttgtacgaggaaatattgaaatccgagcaggggaagctctggctgtaaactttccttatgttttgcaccacatgccagatgagagtgtgagcaccgaaaatcacagggatagattgttgaggttggttaagagcttgtctcccaaggttgttacctttgttgagcaagaatccaacaccaacacttctcctttctttcagaggtttgttgagaccttggattattatactgcaatgtttgaatctatagatgtggcttgccccagagatgataagaagaggattagcgcagagcagcactgcgtggcacgagacatggtcaacatgatagcttgtgagggggttgagagggtggagaggcatgaactttttggaaagtggaggtcaagactttccatggctggatttaaacagtgtcaattgagttcttcagtgatggttgctacccaaaatctcctaaaggagttcagtcaaaattataggcttgaacatagagatggtgctctttatcttggctggatgaacagacatatggccacctcttctgcttggagatgaaactgactggttcgagcgtttgcctcctttttgacttttaattgagcaagtagtctctccataggacttgagatttacctctgttctataatgcattttgtagaatctcaaagctcgttgtaaatgctaatacataaatgaaagaaaaagaaacgtctggtatgacttcagcgttattttcctgccctcttccacgggctttagttttatttaactcgtgatatgagtaggatactcagcttgtttcctcgtttagttccttgtagtgactgaaatgagaaaccttacaccacactacagatgtacattaagctcaaggttttggtctactactctactatatattaccctgtagttgtttcctgagtcataatagatacataattctacgcaaa

SEQ ID NO: 28949 - DNA, 622 bp, Glycine max
  Clone ID: TF_GmC3121_15
aaatcaggatctgttaatgtccaagttgtacctggggagacaaatatgcaacgtggtggctaacgagggcacggaccgggtagagcgtcacgagactttgagtcagtggagggggagattggactcggccgggttcgacccggttcatctcgggtccaacgcgttcaagcaagcgagtatgctacttgctctattcgcaggcggtgacggctatagggttgaggagaataacggctgcctcatgcttggctggcacactcggccactcatcgctacctccgcctggaagcttccctccccgaacgacttgcactgtaaactgtagattaattggctcctggatgggtggtaaataataaaaaatggtttggttgaacttgttcgagtggagtgaatcaatgacccagtgagtcagtgagtcagtgagcgagccagcgaggcagcaagaggataaataaatgagagggtaaaaaaacaaaaaagtaaaaaagaaaaacaaaagactgtaatttgtaattgtgctctcgtaattaccgtttctcctctttagtgtttttttttcctttctctaaattattatataatttgtttaattcttaccccctgatgtccccctcttttt

SEQ ID NO: 28950 - DNA, 746 bp, Glycine max
  Clone ID: TF_GmC979_1
ggaattcggcaccagtaaaaaatgggaaatatacatacccaattttattggatgcagattggggttcaggaattgtgaaggatagagaagctctttgcttatatgcggcatcgtatggaaatgctgctagaggaactgtgaaggatagagaagctctttgcttatatgctgcatcatatggaaatgctgctagatttattaatcacagatgtttggatgcaaacttggttgagatcccagttgaagttgagggcccaactcatcactactatcattttgccttcttcacatccagaaaagtagcagcacaggaagagctcacttgggattatggcatcaactttgatgaacatgatgatcagccaattgagctgttccagtgcagatgtagcagtaaattctgtaggaatattaagcgattaaatagatccatgagatcgtcaagttcatgatggccattctctggtaaacagattttttggtctgatgcatgccatcgatcagtagtaacaagtttcaacctactgaattggtctctttttgtattttagttttcattattttgcttggaggttggatacaagttactattgacagccttctaaaaactacaaggcagtcatgggacagaataagaaaataacctctaggtgttaataaccccgaatagttctgtcaaatgccaatgtatgattctgcctctgggttttatgttgtgctgaatgcatgccagattaatggtttag

SEQ ID NO: 28951 - DNA, 371 bp, Glycine max
  Clone ID: TF_uC-gmroLIB3258053g01a1
taatttatgatataattggatccaaaataggggccaggtccagagggtcacatgatttatttataaacacacttaaacttgatttggaaccatacatccactaaacttgaacttccaaactggatctggctctcaacataagatcatcctcctcttttcagccatgaaagcattgcccgtaccatgccggtcttgagcaactctaaccaaaagaaccacggcattttgatgatccgcataagcatttctttctgcctttggctgccatgctaccttcggcacgatcagattgggcaagcccataatcatatgttaactcagtcattggcggaatgtgtctgagtgcacaaaatgccacatggagggatgat

SEQ ID NO: 28952 - DNA, 2058 bp, Glycine max
  Clone ID: TF_GmC1246_1
ccacagcctcagcttaggcacagtatccgattgcgtttgaagactgaatgcatcaagtggtattccaccaacgaacggcactcgacggttttttcgagttggttatataaatacgttcacaccgtcgcttccatttcgttttccaatctctcactctcttctccaatcccatttcaggcaaagtttgcctttgaaggaatcaagtaagtcttgtatgtggattttgtggtattgattttcaatatccgctttatggtttgagcttctattaagaaactgagatacgagctgatcacataggagtatccagtactctctcagatttcatgcctgccatgaaaaagaatcctgagctaacttgtattggttctgtattcaacatgttggggaaggagcttggagaacctgtagactttgaacttccagattcatttaataaatccaagccaatgcagtacacctatataaaacgcaatatatatctcactaagaaggtcaagagatcccggtttgatgatgatggcatattctgttcctgtactccttcccctggatctactagtgtatgtggtagagattgccactgtggaatgcttctgtctagctgttcatcaggctgtaaatgtgggagctcctgtctcaacaaaccaattcagaaccgtcctgtgaaaaaaatgaaattggtcaagaccgagaaatgtggttctggaattgtggcggatgaagatatcaagcttggggagtttgtcattgaatatgttggagaagttgtaaaaggggttttaacttaattttggtcatggtattttggtcatggttgaatgcatgatatttagttatgaatatattaatcatttagtggtaaaaagtttttcgtccctcttaattacatcatggtccaggttttttaaagatccttcattgccattttcccatataatttttcatacttgtggaaattaacttcattcctcttctgtcacctatgctaacagggcgagcatctgacttatgattaccagtttgttcaatttggtgcagatcaagattgccactgtggtgctgctgagtgtaggcgtaagttgggtgtccgacctaccaagtctaaactttcttcagatgctgcattaaaattagttgcatatcaggtttatcagaatggaggtttgcaaattggaagttctcgtgttgttgaccaaccaaagtgcttgcacaattgcattggtgaagttattaggataaaacatcttgaaaatgagaggtttggaattattaaacgatttgataagtattcccgaaaacattcgatcatgtttgaggatggttgtgttgaaatttatgacatgtcaaaagaggactttgaacttgtgagatagtgatgcaactgttgggtgcaggtgaaaggaattgaaaagctgaaaattggactcattattctttcattgcatgtgcataattcttgtagttgctgaggctcttatcaacagaatatgaagcggaatagctcaacacaactcttactgattgaagataataaattcctttttctactaacaaactgtattatcgtgtaaacaacattgttgttcaaggttctggaaataaaccttgtattttttaaaatcctgaaagtactgtaaaatgagaatcatcttgtaccattagctaggatgtgtagttgttgtttcaagtgtattcttttactttcttcctatttttctagtataaggttattgataaatgtgggagtttcgattaggaaaaacttgttttaatatgcaattaccctttgatcaatgctaaagacatgtaccctatgaagggggtcatattatatcttaataaataggcaataggcatctctccaaattggtaggcttttccatttttattcccatacaatttgtccccgagtaatttgcataatcagttgtattgaaaatggtactacatatataccaagatatctgatactgaatgcgagattgactagcagcagtatgtatgattgtagatgccgatgcttaagctaatagaatgaagattgtattttttgtt

SEQ ID NO: 28953 - DNA, 343 bp, Glycine max
  unsure (1)..(343): unsure at all n locations
  Clone ID: TF_18690744
agcatgtgtcccaggtgatttgaactgctcttgcattaggagaaatgaaggtgatttcccatacactggcaatggcattctcgtgagccggaagccattggttcatgaatgtggccccacatgtcagtgttttcctaactgcaaaaatcgagtgtcgcaaactggtttaaagcaccccatggaagtgttcagaacgaaggatagagggtggggtcttcgatcgctggatcctattcgtgctggtacttttatttgtgaatatgcaggagaagttgttgacagaggcaaggtaagtcagcttgtgaaggaaggaaatgaatatgtttttgatacncccgtattt

SEQ ID NO: 28954 - DNA, 1144 bp, Glycine max
  Clone ID: TF_GmC270_2
tttcacagtggcatttgctcgtctctaatgttgcacgttttaattgctgataaagaatgattctgaaaacggttacagcatttgcatgctagttaagggttgtaattcaaatgttttatgtgccttttttgtattgcaggttgtcaattattgggcagggaagggaatatccggatttacagtttacaagtttagacttaggaggcttgaagggcaacctacattaacccaaatcaggtatattttacttatggacgtgtacctcaaactctaacaaaaatacgaggattggtttgtgaggatatcactgaaggtcaagaaaatatgcccattccggccaaattagggtgatgccccccctgttcccccaggcaagttcaataaggggtttgcaatatatacatatatatagtgatataattaatataattagtttttatttttcattcaatcgttgattgtcatggtttcgaattcggaaagtctctttgtatatgcaagggtaaggctgcgtacaatgaccttctcccataccttcacatagtaaggagtcgtttctggcacaggggtttcacatattgtaagtttgttaaggttgcaaaaaatgtgaagcttcccatgaatgccactggatgcgaatgtaaaggcatttgtaatgacccaacaacctgtgcatgtgcattgcgtaatggctctgattttccctatgtatctcgggatggtggcaggttagttgaagctaaagatgtagtatttgaatgtggtccggaatgtggttgtgggccaggttgtgtgaaccgaacttctcaaagaggacttagatatcgtctggaggttttccgtactgcaaaaaaaggatgggctgttagatcctgggattttataccttctggagcacctgtgtgtgagtacacaggattacttgccagggcttaatttgttcaaaacattttctgttttgtgcctttgttttacatgaatttctgtttatttatgatgatgtcaagcattgatgcaatgataatgttgtcctccatgatttacatttttagtggaatcaaagctgtaattttttaaccttgtgtcaatttttattctatttttaggatgcaataaatgatctaaagccccccctctgtcgtct

SEQ ID NO: 28955 - DNA, 515 bp, Glycine max
  Clone ID: TF_jC-gmXLIB3563P049dd06a1
tgagctcaagcacatcttcaaggactggtattattcttgcagacctctctacaggagttgagagtattcctgtatcacttgtcaatgaagttgacaatgagaagggcccttcttttttcacttatttccattctctcagagatccaaaaccattcagtttagcacaatcatcatatggctgcaactgtaacaaaacatgtgtccctggggatttgagctgctcttgcattcaaagaaatgaaggtgactttccatatactgcaaatggtgtcctagtgagtcggaaaccattggttcatgagtgtggcccattgtgtaagtgttttcctaactgcaagaatcgagtatcccagactggtttgaagcaccaaatggaagtgttcaaaacaaaagatagagggtggggacttagatcactggatcctatacgtgctggtacttttatttgtgagtatgcaggagaagttattgacattgccaaggtaaataagaataggggatatgatgatgagtat

SEQ ID NO: 28956 - DNA, 856 bp, Glycine max
  Clone ID: TF_GmC5793_1
gtcttcgcaccttagaggacctgccaaaaggtgcatttgtgtgcgagtttgttggagaaattttatccatgaaagagttgcatgagaggaacttgaaatgcactgaaaatgggaaatatacatgcccagttttactggatgctaattgggattcaggatatgtgaaggacgaagaagctctatgcttagatgcagcttcctttggcaacactgccaggtttatcaatcacagatgttctgatgcaaacttgattgaaatcccagtcgaagttgaggatcctggtcattattactatcattttgcctttttcacttccagaaaaatatcagcacaggaagagctaacatgggactatggcattgactttgatgaccacgatcatcctgtcaagctgttccagtgcagatgtggcagtaaattctgcaggaacatgaagagatatagcagatctcttagatatgcgtcaattgcaggatgatagcctttctccgtgaaaccaattttgttgtctcaccgtgcggctggatgagatgtaatgaggtccagtctattacgagtggcgctttttgtctagtttagtggttgggagactcgttattttgtacagatctgcgaaaactatttataggcagactgacctagaaaggaaagagtgatcgtttattctgggatttattttgatatactttaggttcaaacttagataagaccaaaatggatgtttgcgaaagaaaaagaaacggttaggcggtagtgaaggtgaatattttagtttctaactgcagcgtttgtggggcttttaatatcaacgtactatgtgttggatttcatgatatgaaatactgtagttatttc

SEQ ID NO: 28957 - DNA, 396 bp, Glycine max
  unsure (1)..(396): unsure at all n locations
  Clone ID: TF_9819698
tggaacttcccaaaactgtaaactctgaaattaacgagattgagccactgtctgcagcgagatgccgtgtgttcataaggccttcccgtaagaaggatgaagtgccaatcattcacttgcttgggaggacaaaccttncattctttaagtgcaataactcaattgaacagcaataaggatgctcaagtattttcatctcttaaggaacgtcttcaccatttacagaaaacagaaaaccaaaaagtttgcttaggaaaatcaggtattcatggatggggcctctttgctcgtagagatctggaagaaggagaaatggttgttgaatatcgtggcgagcagttacgacgtagtatcactgacctaagggaagcacagtatcgttcagaaggcanagat

SEQ ID NO: 28958 - DNA, 2954 bp, Glycine max
  Clone ID: TF_GmC67530_1
gcgcccacgcgtccgtacggctgcgagaagacgacagaaggggggttaaacaaggaggtaccaaatattgttagtgaatttgttgggggcaccagtttagaaattcaggagaggtacaaaactatcaaggaaaagaacattggaaggttggaccagccttctcaaaactcaggagaatatgaatctactattggcatatgtgtagagaaaacgctgagtgctgcattagattcttttgataatcttttttgtcgccgttgcctgatttttgactgtcgtctgcatggctgttctcaacctttaatatatcatagtgaaaagcagacagtttggtctgatcctgaaggagacaggaaaccttgcagtgatcagtgttaccttcagttaaaggtagtaaaaaatgtgacagaagattcaacttctgggtctgatcagaataagagaactacaattacagaagaggcagatgtgatattggctccctccattatagaggaacctagtaatcagagtatagtaccttttccaacagaagttgattgtcttggatctcttaatttaaatgttcctatctcaggcacgagggaaaaatggaaagtcccaaatcagtcagacacagcactccgtgactcatcactccctcctgatgattctcagcattcttataaaaagctgaagacaatatctgatgatgtagttactgcaaatagtgattctagcaagaacataaattttggtgcatgtgatgaaagtatacatacaattactagtggacttttggacaaatctgttaaagataattcaaataaattaatagattcttctagcacttgctgtagtgatgagcaggacaaaagtattggggatggaccaaaagatcctacaaataagacagaatttaagaagttgtccaattcaatggaagggaaagttgatgggatgctaaggggtttcagattggaaacctctggaaaaagaattatacttaaggggagtagaaatgtttggcagaaacagttgcctcatagcaaggaacttactttctggcctgaagacttgtatggaaatatctagttacatgcattctggaggagtgtcaatgccccatggatctacggttgctcctagttcaatcatggaagaaaagggaaaatttgatgcagagtgcacagaccaggagatgccatctaggtcacggttgctgaggaaaaggggtaaaacaaggaagtttaaatattcttggaaatctgctggccacccatcaatatggaaaagaattgctgatgggaaaaaccaatcttgcaagcagtatacaccatgtggatgtcagtcaatgtgtggaaaggaatgtacttgtattaatggtggaacttgctgtgagaaatattgcggttgttcaaaaagctgcaaaaatcggcttagaggatgccattgtgccaagagtcagtgtagaagtcgacaatgcccatgttttgctgcaggacgggaatgtgatccagatgtctgtcggaattgctgggttagttgtggggatggttcgttaggggagccacctcggcgtggagaagggcaatgtggaaatatgaggcttctattgagacaacaacaaaggattctcttggcaaagtctgatgttgcaggatggggagccttcttgaagaacccggttaacaaaaatgattacttaggagagtacacaggagaactgatctcccaccgagaagccgataagcgtgggaaaatatacgatcgcgccaactcatcttttctttttgacttgaatgatcagtacgttcttgatgcttatcgcaaaggagacaagttgaaatttgcaaaccactcatcaaaccccaattgctatgcaaaggtgatgctggttgctggagatcaccgagtaggcatatttgccaaggaacacatcgatgctagtgaggagctcttctatgattatcgttatggtcccgatcaagcaccaccatgggcacgtaaacctgagggttctaagagagacgaatcaacagctcctcaaggcagggctaagaaacaccagtctcattgatgagcctgggccaaagtctagcgcatacaaatttttggcttctacattatatatcctatgcataaacaaatttgtgatatcccatgggatagattcaagatcaacggtcacaaaaggagataattagtggtttgctgatgctaatgtgcctttaaataggcaagagaagcaggcatgaagcaaattaatgttagcggcaacaagctagtagaaacaaacctagcagttcgtttcggatgctaggcgtgacatttcggcgaacttgttctgttcaaacttggttttgctcttcattatgtgattgtgagacatccaagttattattaaatggcttggtattcaatttggtttcttagtttaatttaaatacttaattaagttccttggtttttgaatatgcaattaggttattttgttttctaattttatccaattagatcattttcgtcaaaaaaaaaaaaaaaaaaacaaaaatgagaattacaagcctttctgtttccatcttctttatcctacattcttgtgtcttgaccatctttttgttattttctttttggaggtgaggggaggattggtaaagctaaaataaagttttccatatgtaatataccagatggctccaactgttttgataagttgtgattttgtattataccaataggttatgaccaatttttttaaaaaaaaattatataaccagcatcattatattctgaagaattggtatttctatagtctagttgggcatcaaacttaaaaaatattatctttgattgtaggaatttttctagcttttttttttggcttcctaataaataggatgtttctaggttgaacatgtaaagagaaagattaagttacttgtgcgttgataaatgttattttcttctttctt

SEQ ID NO: 28959 - DNA, 536 bp, Glycine max
  Clone ID: TF_LIB4164-031-R1-N1-A11
ataccggaagggtatcacaaattcactatcaaactcttaaatgattgtttctgcccatgacaaatgaaaaataatggaacgtatgtcatagttacaggcaatgcatcctattcctgcttttttttttttttttacaaaaacctattcgcttttcctgctcatcgggagcatatttgccttttttttattatttaaattaatcaaaggggatacaaattaatttaacataaaaaaataaaatacaagaatcgacaaatatttccccatggttgggtaactgcaatggctccacccccaaaaacaggggaaaacctagttcataaatccgctacagttaggggctttacagggacagacaacctttttttcatcccgctcatcatcgaacgagtaattatacgttagttcttcaccagctgaaacattggtcttggcaataaaaacaatcctgttctcctgatcactcaaaggcacaatccttgcaaagcagtttggcatgcaaaaatggtttattaaacgtgcaatattgcccttat

SEQ ID NO: 28960 - DNA, 1271 bp, Glycine max
  Clone ID: TF_GmC387_1
ctcgagccgattcggctcgagatgttttccaatacataaattgtgaagatggaaagatgtctggtcctcctggggatgttgcaaattccctcatggacggctattccaagggtaataatgaagtgagacgaaggtctagattcttacgtagaagaggaagagtccgtcgattgaagtacacctggaaatctgctgcttatcattcaattaggaaaaggattccacagaaaggggatcaaccctgccgacagtataatccatgtggttgccaaacggcttgtggaaagcagtgtccttgtcttcaaaatggaacctgctgtgagaagtactgtggacgccccaagagctgcaagaatcgatttcgtggctgtcattgtgctaagagtcaatgcagaagccgtcaatgtccatgttttgctgcagatagggaatgtgatccagatgtttgtaggaattgttgggtcagttgtggcgatggtacacttgggattcctagccaaagaggggacaattatgaatgtagaaacatgaagcttcttctcaaacaacagcaaagggttcttcttggaaggtctgatgtatccggctggggagccttcttaaagaatagtgttggtaagcatgaataccttggagagtatactggagagttgatttctcatcgggaagcagataagcgaggaaagatatatgaccgtgaaaattcatcttttctctttaatttgaatgatcagtttgttcttgatgcttaccgaaagggtgataaattgaagtttgcgaaccattctcctgacccaaattgttatgcaaaggttattatggttgctggagatcatagggtaggcatttttgccaaggaacggatttgtgccggggaggagctgttctatgattatcgttatgagccagatagggctcctgcgtgggctcggaagccagaggcatctggatcaaaaaaagaggatggggctccttcaagtggtcgtgcaaagaagcttgcttaatgggtgtttgttcttcaaaaatcaattcttttaagttattctttaacacgtaggggaagcaatctcattggtagcggaaagaagtattgttttaagttttttgttcgtagcaaggccgtgcaattgttgctgcataggtaactaactacatttaaacaattcattttaatattaatcgactgtatattcaccattccaaacggaaaatacaagcttaatcaaaattccatgcaattctttcccggagggaaatgggcaaatgcacat

SEQ ID NO: 28961 - DNA, 577 bp, Glycine max
  Clone ID: TF_GmC312266_1
tcgcgaatgaagagaacaaccaatcatacctccatgttgcattttttgcactcagacacattccgccaatgactgagttaacatatgattatggacttgcccaatctgatcatgccgaaggtagcagtgcagccaaagggagaaagaaatgcttatgcggatcatcaaaatgccgtggttcttttggttagagttgctcaagaccggcatggtactggcaatgctttcatggctgaaaaggttttgagatctctttcatgtttcaaacctcctatagtcattcagatttgacattgtaataaacatgtgtgcctctctttgtcgctttctatttatcttttttaagaaacaaatcgttttgtataatttgtgtaatagtttttagttgggaatggccatgatgcgccagagaagcatataggtagtgctatgcattcacatgttttatctgtggttttttcctttttacgcgattttgttgtgctgtaatatatgtagctaagaagattagaattgtttttattatttatttgttttattattattattattattattattattattattattatta

SEQ ID NO: 28962 - DNA, 2835 bp, Glycine max
  Clone ID: TF_GmC6450_1
ggagtaaggagaatagattgttatctgagaggaagcataggaataatgaaacacatggtggtttggataatggagattatgcttctgatagagaaagcaggaggcgtttatcaaagttgaataagaaatatttcaactcggagagtgagacatctgatgactgtgatagatcttcggtagatggcaagagtgatagtgatactaccaccactgacattgaaagcgaccaagatgtctattcagaaaatggaattggggactcgaggggagatgtgtatttcacacctgatgatgggttggatttcattactgatgagcgtgaatggggggctcgcatgacgaaagcaagtttggttcctcctgttactcggaagtatgatgtcattgatcaatatatcattgtagctgatgaagaggatgtgcgaaggaagatgcgggtttcattaccagatggctatgcagagaagctgagtgtgcaaaagaatggcattgatgagtctgacatggaactgcctgaagtcaaggattacaaacctagaaaacagcttgaaaatgaggttgttgagcaagaagtttatggaattgatccctatacccacaatctcttactagattctatgccgaaggagttggattggtctctacaagagaagcatttgtttgtagaagacaagctccttcggatgttgaataagcaggttaatcattttactggaactggaaacactccaatgagctaccctttgcagcctgctattgaagaaattgaaaggtatgcagaggagcagtgcgatgtgagaacagtaagaatgtgtcaaggtatcttaaaagccatagcaagtcgtccggatgacaaatatgtagcttatagaaaggggcttggtgttgtttgcaacaaggaagaaggctttgctgaagatgattttgttgtggagtttttgggagaggtttatcctgtgtggaagtggtttgagaaacaagacgggattcgatctctgcagaaagatagtaaagatccagcaccagaattctataacatctaccttgagaggccaaagggtgatgctgatgggtatgacctagttgttgttgatgccatgcacatggctaattatgccagtcgaatatgtcattcttgccgacctaattgtgaagccaaggttactgctgttgatggtcaatatcaaattggtatttatagtcttcgtgaaattcaacatggtgaggagatcactttcgactataattctgtaacagagagcaaggaggagtatgaagcgtcagtttgtttgtgtggaagccaagtttgccgtgggagctatctgaatctgactggcgaaggggctttcgaaaaggtactgaaggagtggcatggaattcttgatcgtcattatttgatgctagaagcttgtgaattaaactctgtttctgaagaggactataatgacctgggaagagctggtttaggcagttgtttgcttggaggcctgccagattggctagtttcctatgcagctcgccttgtgagatttatcaattttgaacgaacaaaacttcctgaggaaattctaaagcataatcttgaagaaaaaagaaaatatttttcagatataattcttgaagttgaaaggagtgatgccgaggttcaggctgagggagtatacaaccaaaggcttcagaatcttgctgtcactcttgataaggtaaggtatgttatgagatgtatttttggcgatccacggaaagcaccacctcctcttgagaagctcagtcctgaagcaactgtttcctttctctggaaaggagagggttcatttgttgaggagcttcttcagtgcataactcctcatgttgaagaaggcatcttgaatgatctcaagtttaaaattcatgctcatgatccttcaaattctggagatattcaaaaagagcttcgaaaatctctgttatggttgagggatgaggttcgaaaccttccttgtacatacaaatgtcggcatgatgctgctgctgacttaattcatatttatgcttataccaagtacttctttagaatacaggattatcaaactattacttcgccacctgtctatattagtccacttgacttaggtcctaagtatgctgacaaattgggagcaggatttcaggagtatcgaaagatatatggtgaaaattattgtttagggcaactggttttttggcataatcagagtaatgcggagccagattgtaccctggctagaataagccggggttgcttgtcattaccagacatcagttccttttatgccaaagctcagaagccttcacgacatcgtgtttatggtccaaggactgtcagatctatgctggcaagaatggagaagcagccccagaaaccttggcccaaagaccggatttggtcattcaaaaattctccgaaattttttggtagcccaatgttagacgctgtaattaataactctccacttgacagagagatggttcattggttgaagcacagacctgcaatattccaggccatgtgggaccagtgaagttttgcttgcatggtttggggaaaacccttgttagagattagagagtggttcatcattcagaactgcctgcctcttttagcgtggggagtctaattattaatccatagcataagttcttgtttcgctttgtccttcattcttgtgtatagttttcttgacctttgatttgtaattcatttggttgtagggcattgttttactcttgtctaatgtgaaaagaaatgaagggaaaataggtttaattcaaaataggtttatttcaagccatctgtcttatctgacttgagtcaaa

SEQ ID NO: 28963 - DNA, 840 bp, Glycine max
  Clone ID: TF_GmC477_2
cttgatgcctgcgttgcatcttgtgagagggaagcctttgatttttgaatgtggcccattttgctcctgtcctcctcattgtcgcaatcgtgttgcgcagaaggggctgaaatataggttggaagtgtttaggtctaagcagacatcttggggagtaaggtccttggaccttattcaagctggttcttttatctgtgagtttgcaggggttgttttgaccagggagcaagctcaactcttaacaatgaatggtgattcattgatatatcctaatcggttttcggaaaggtgggcagaatggggggatttgtctcagatatacccggattatgtgcgtccattgtatccgtcaattcctcctctagatttttctctggatgtgtcaacaatgaggaatgttgcttgctatatgagccatagttcaactccaaatgtcttggttcagtttgttctgcatgatcacaacaatttgatgttcccacaccttatgctatttgccatggaaaacatccctcccatgagagagctcagccttgattatggtgtagctgatgagtggacaggcaaactctctatatgtaactgaatggtccatgcacttcttgagttttaggcatggttttgtgaggtaaagcctagttctatcattctactttgttgcttttacaactatcttccttttgtttacatcttacttttgtctggtactctgcgctgtctccaatgtaaactctgtttaccatataccataatgagttatagacataaaactattgtgatatttcagaagttcatgcatgctttggacaatgaaaaaatgttgtaattaggttgatcaaa

SEQ ID NO: 28964 - DNA, 1173 bp, Glycine max
  Clone ID: TF_GmC27513_1
aaggctacaaaactaaacaccttgttgattgcgttgcaaacgctggctagctcgtttcccaaacggtaacgttgctcccgcttccctccgcgtggactgcgttgcccccacccccgccccccaatgcgttgggtgacgaggtttcccagcgtcatgagcactacccgtgtgggtccgaacatgcaacggaaccctatatcatttacaactgccaatcagttcatatagcgcctgcaattttttgaattgcagtaacatggaatctttccttcgtcttcgtgattaaagtggtaatcatacgtaatctcttcaccaggaaatatgtccctctctgccaagaagacaaccttcttttcatgccttacggtgatcacttttgccacgcaatttggcaggcatgagtggttcacaaatcgagcaatcccccctttccttgtggcatcaataatatgctctttgtctatcctgaagaagtagcaggcagtcttgtactgaagtttccttccagattgatattccttctctcttttatcagccacacgcagccccacaatttcaccaatatactcaacaaccatttcaccccgggaaatgaatcgagaagtgtaaagacctagagcatgtatacgggacttgtatacaacaaggtgtttccatccctttgcttgtttgtatcgagcatattcctttcgacaatcatgctcaatatctaaatctgggaattttggaagtccccgtgaacataatttctgcccattaatgtgaatccaagcatttagctgctcctcaggaacaaggcatccaccttggcactgattattctgaaaaccatcccacctacggcccttgtaaccctctgccctggcacaggtgaattccttttcttcttgacttccaatttcatcaagaggatcatatatgggcagacatctaggttcaataatatgaagcgtgcatcttccataaaatccaatcttctcatcatcaatgccttcagtctcactttgcaagaggttcacatctgctcttggacgcgaaacaccagatacatcaaaagcactcatggtgtcaacattcggccctcctgtccattcagtcaggaatctgcgcaccagcttaatccattgctttccggttagatcaaatccggcgtcggtgatactgatatgtacc

SEQ ID NO: 28965 - DNA, 1723 bp, Glycine max
  Clone ID: TF_GmC121298_1
acccggggatcctctagagtcgacctgcagtgacattataattaagggctgaccattcttgctccagttgactctccaaacactgatggaatagatccaggtaaattattattattattatttccactggctttcagaggaaaacattagataaaaagaaaaaagggaaaaagctatgtgggattaacaatatactggtacttagttgtttattagatgctatatgtgagctaaatctctgttcaaatattaggcgactcatgtttaagaaagaatttgacacaagctatgtgggattcaattctggatcagagcttctctctcgtcagaatttatgtaatgcgtaccttgacttctaaatacatgtcatcttgctaccttctatatggctgctctgtgccactatatggaattgactcctatgcttttgacattagtttgtaaatattgcaattcaacttgtttatttatggaagaattcattcagccttattttggttgctaaagaaacgaggtatgaaccaccgcctaatccgtctggttgtgctcgaagtgagccatatgattactttggcaggagaggtcgaaaagaacctgaagcacttgcagctgcatcgttgaaacgtttgtttgtggagaatcaaccttacttagtaggtggatactcccggcatggttcattaaacaacctagagccttctggcagaggagtctgctctaaattcttttgtagccaacaaaggctgagaacctctcggattgacacatcaaacagcatactttctatctctgaaaaatatacgtacatgagggaaacctttcggaaacggctggcatttgggaaatcaagaattcatggatttggcatctttgcaaagcatccatataaaggtggagacatggtgattgaatacactggggaacttgttagaccacctatagctgaccggagagagcacttcatatacaattcgttggtgggtgctggaacatatatgtttcgtatcgatgatgaacgagtcattgatgctactagagcaggaagcattgctcatttgattaatcattcttgtgcaccaaattgctattccagagttataagtgttaatggcgatgaacatattataatatttgcgaagagggacattaaacagtgggaagagcttacatatgattacagatttttctcaattgatgaacgacttgcttgttactgtggcttcccaaagtgccgaggtattgtaaatgatactgaggcagaagaacgagcagctaccctatatgcaccacgaagcgaattaatagattggagaggagaatgagattttttactgtaatattatgcgtttaagttccttctgaagatgaattgtttgtccaacaacttctctcatggattgtaccatttccttgaaaggacagtgttgtacatagtacatctgattcttcccattgttttcgtcataaccccagctgagcggtatatgttggcggctcaaggcgatttccattggtgttctggttataatgaagggaaagatgtcaccaaactttttacaaatgtttcatttgaaattcatggccacaattacggcccgtttaacttcaagaaacttgctgagatattgtaacttgtcattggataggtacagttgtaattacatcgaaccttcataaaaatgaaaagattacgagaattcgaatggaaaaaaaaaaaaaaaaa

SEQ ID NO: 28966 - DNA, 1389 bp, Glycine max
  Clone ID: TF_GmC1138_1
tgagctcaagcacatcttcaaggactggtattattcttgcagacctctctacaggagttgagagtattcctgtatcacttgtcaatgaagttgacaatgggtggggcccttcttttgtctctgtttgccagtctccctgggctccccagcccttccgctgtgcgcaatccgcttctggctgcaactgtaacaaaacatgtgtccctggagatttgagctgctcttgcattcaaagaaatgaaggtgactttccatatactgcaaatggtgttctagtgagtcggaaaccattggttcatgagtgtggcccattgtgcaagtgttctcctaactgcaagaatcgagtatcccagactggtttgaagcaccaaatggaagtgttcaaaacaaaagatagagggtggggacttagatcactggatcctatacgtgctggtacttttatttgtgagtatgcaggagaagttattgacgttgccaaggtaaataagaataggggatatgatgatgagtatgtttttgatacaagccgtatttacgatacattcaaatggaattatgaacctagcttattggaagaaataagctcaaatgtctctagtgaggattatgatataccgtctcctctaattatcagttctaagaaatttggaaatgtggctagatacatgaatcatagttgctccccaaatgttttctggcagccagtcttgtatgcagaaaataatcaatcctttcttcacattgcattttttgccctcagacacattcctcctatgacagagttaacatatgattatggctgttctggtcatgctgatggtagcagtgcacccaaagggagaaagaaatgctcatgtggatcatcaaaatgccgtggttcttttggttgatgttttgttgcagttgctgatggacaggcatggtgctggcaaatgtattcacagctaaaagatggggacattcaatgtgaaggccagatacagcttggaagttccaacttcgctgatgcttgtttccaaatatggttgtcaagggtggatgtactcgattaaaagttaaccatgttagtccttaggcatggctctttcttggcttctacttgtagttagtgacttttgatcatcttaccccattcctagttttgaggggaaaaagttttagtgagcagcttgtgtaaaattattgttgtagggaatggccatgagtacttgaaaatatcattaacatgcatatctttgtacccttttggcttttgtaattgtaatagagttagtgttgatgttgattagaaggctagaactatatatcatattttggattctagaaactattttgttaaaacatgctatgtatcttttctatgccaattgaattgatctgaactcc

SEQ ID NO: 28967 - DNA, 1982 bp, Glycine max
  unsure (1)..(1982): unsure at all n locations
  Clone ID: TF_GmC6450_2
ggccaaagggtgatgctgatgggtatgacctagttgttgttgatgccatgcacatggctaattatgccagtcgaatatgtcattcttgccgacctaattgtgaagccaaggttaccgctgttgatggtcaatatcaaattggtatttatagtcttcgtgaaattcaacatggtgaggagatcactttcgactataattctgtaacagagagcaaggaggagtatgaagcgtcagtttgtttgtgtggaagccaagtatgccgagggagctatctgaatctgactggtgaaggagctttccaaaaggttctgaaggactctcatggaattctcgatcggcattgtttgatgctagaagcttgtgaattaaattctgtgtctgaagaggactataatgacctgggaagagctggtttaggcagttgtttgctcggaggcctgccggattggcttgttgcgtatgcggctcgccttgtgagattcatcaattttgaaagaacaaaacttcctgaagaaattctaaagcataatctagaagaaaaaagaaaatatttttcagatataattcttgaagttgaaaggagtgatgccgaggttcaggctgagggagtatacaaccaaaggcttcagaatcttgctgtcactcttgataaggtgattctgcactctgctatccatatttcctttttcactattcttgtttttgatgttgataagaagaaaaacactttgcatttaaaatatgatcatagaggagagaaatggtaaaggccaatgcttttggtgtgggcttgttgttaaccattaatgactgagccgatactgttaagataaagaagctacatggtaaggtatgttatgagatgtatttttggcgatccacggaaagcaccacctcctcttgagaagctcagtcctgaagcaactgtttcctttctctggaaaggagagggttcatttgttgaggagcttgttcagtgcataactcctcatgttgaagaaggcatcttgaatgatctcaagtttaaaattcatgctcacgatccttcaaattctggagatattcaaaaagagcttcgtaaatctctgttatggttgagggatgaggtccgaaatcttccttgtacatataaatgtcggcatgatgctgctgctgacttaatccatatttacgcttataccaagtacttctttagaatacggaattatcaaaccattacatcaccacctgtctatattagtccacttgacttaggtcccaagtacactaacaagctgggagcagaatttcaggagtatcgaaagatatatggtgaaaattattgtttaggacagctgatattttggcataaccagagtaatgcagatcctgatcgtagcctggctagagccagcaggggttgcttgtctttaccagacaccaattccttttatgccaaggctcagaagccatcacgacattgtgtttatggtccaaggaccgttagatctatgctggctagaatggagaagctgccgcagagatcttggcccaaagaccggatatggtcattcaaaagttctccgaaattctttggtagcccaatgttagatgctgtagttaataactctccgctggacagggagatggttcattggtttaagcacagacctgccatattccaagccatgtgggatcgttaaatttttgcatggtttggggaattttggtcagagcacactcgataatttatagatatggaggatggttcatcattcagagctgcctgcctgttttagcttggggggaggaggtatgtaattattaaaatccaaaagcgtcattccttgtaccgcttttcagtcattcttgtgtacagttttttttgccattgatttgtaattcttttgattgtagggaattgtttaacacttatgtaatattaaatgaaagttaggaagaaaaaaaaaaggttaattccagtcatccnagcttacgtacgc

SEQ ID NO: 28968 - DNA, 1133 bp, Glycine max
  Clone ID: TF_GmC1246_2
ctctcttctccaatcccatttcaggcaaaatttgcctttgaaggaatcaaaatcctgagctaacttgtattggttctgtattcaacatgttggggaaggagcttggagaacctgtagactttgaacttccagattcatttaataaatccaagccaatgcagtacacctatataaaacgcaatatatatctcactaagaaggtcaagagatcccggtttgatgatgatggcatattctgttcctgtactccttcccctggatctactagtgtatgtggtagagattgccactgtggaatgcttctgtctagctgttcatcaggctgtaaatgtgggagctcctgtctcaacaaaccatttcagaaccgtcctgtgaaaaaaatgaaattggtcaagaccgagaaatgtggttctggaattgtggcggatgaagatatcaagcttggggagtttgtcattgaatatgttggagaagtcatgataggtcaatggatcgattgcttctgctgatagcgtaagttgggtgtccgacctaccaagcctaaactttcttctgatgctacattaaaattagtggcatatcaggtttatcagaatggaggtttgcaaattggaagttctcatgttgttgaccaaccaaagtgcttacacaattgcattggtgaagttattaggataaaacaacttggaaatgagaggtttggaattattaaacgatttgataaatattcccgaaaacactcgatcatgtttgaggatggttgtgttgaaatttatgacatgtcaaaagaggactgggaacttgtgagatagtgatgcaactgttgggtaggaactacgtgcgaatatttcttttgcatgattgtatctatctgcatgacattgtgaaatattatatcttaataaataggcaataggcatctctccaaattggtaggcttttccatttttattcccatacaatttgtccccgagtaatttgcataatcatttttattgaaaatggtactacatatataccaagatatctgatactgaatgcgagattgactagcagcagtatgtatgattgtagatgccgatgcttaagctaatagaatgaagattgtattttttgttaccttggtgttgatt

SEQ ID NO: 28969 - DNA, 594 bp, Glycine max
  Clone ID: TF_GmC91094_1
gggaaaaagggttatggactgaaggcaattgagaatgtagctcaaggccagtttcttattgaatacgttggagaggtacttgatatgcaagcatacgaggcacggcaaagagagtatgctttgaagggtcatcggcatttctattttatgaccttgaatggcagtgagggcacagatgcaagtgcaaaaggaaacttggggcgtttcattaatcatagttgtgatcctaattgtcggacagaaaagtggatggtgaatggggaaatctgtattggactgtttgcattgagggatattaagaaggatgaagaattgaccttcgattacaactatgtgagggtttttggtgctgctgccaaaaaatgttattgtggttcacctaactgtcgaggttatataggtggtggtgatccacttaatgctgaactgatagttcaaagtgattcagaagaagaatttacagaacctgtcatgctcaccaaagatggtgaaattgaagattctgtacctacacccgagtattctaataatgttgatacacaatctgctaaacatatgttgaaagacagggatatattggacaattctacaact

SEQ ID NO: 28970 - DNA, 571 bp, Glycine max
  Clone ID: TF_LIB4367-007-R1-K1-A4
tgctttttgtgaatttttgctttgggacatgatatacaggggtgttcagaatttttacatgtgtgagattcggaaagacttcacagtagatgcaactttcaaaggaaatacttcacgctttttgaaccatagctgtgatcccaactgtgttttggagaagtggcaagttgatggtgaaacacgtgtgggtgtatttgccgcttgttcaatagaagctggagagccgttaacatatgattacagatttgtgcaatttggtccagaggtgaaatgccactgtggtgctgcaaattgtcaaggctttctagggacaaaaaagaaaattggcaagctagacctctattggggttcaaaacgtatgagaacatcgaaagcttcttgcattacgttagtaacagctgtttgatttgccatcaacgttgtaatgtatacaataaagtgataagctgcttatatagggatggatggtcgaatggaggagtctggttgtgtaggaatgacgggagtagaacatctgaaacattctgttctattgttgtagagggaaatgacaatttaatcggatttagga

SEQ ID NO: 28971 - DNA, 565 bp, Glycine max
  unsure (1)..(565): unsure at all n locations
  Clone ID: TF_LIB4203-002-R1-N1-B11
ccaacaccaagttcaagttttctttattcaaatttgaaaaatgtcccatactgcattattgcaaaaactcactggtccaaaacactttgcagctggggaaaaggcaataaaaagttgattttaaaacattactataaattactgttacagtcctttgcaaattcaaaatttcaaactgcatttccgttttctaaattgcccacagtactcaaggttcctgaagctaaggcagctgtttcaaaaaaaaggggaaaaggtagtaaatgtcaagggatttccatttctcgttcgatgcccacatacttaagggcatcagcctggctgtatctgtaatcaaaaaacaactcttcaccagtctggatagcccttttagcaaaaatgcctatcctggggtcaccattaaccatcataacttttgcatagcagtttggatttactgaatgattagcaaaacaaattttgttgccctttcgggttgcatccaccacaaaatcattgttcaagttgaacaaaaagctgcacatgtatttgncatacacttttcctcttctggctgcttcatcct

SEQ ID NO: 28972 - DNA, 1368 bp, Glycine max
  Clone ID: TF_GmC138311_1
gaaacttgtgatcatgtatacctttttggcaatgactatgatgatgcaaaagacatatttgggaaaccaatgcgtggcaggttcccatatgatgagaatggccgaataatcttagaggaaggttatcttgtctatgagtgtaatcatatgtgcagatgcaataaatcctgtccaaacagagtattgcagaatggagtacgagtcaaattggaagtcttttaaacagagaaaaagggatgggcggtaagggctggtgaagctattctacgtggcgcatttgtgtgtggatacattgcagaagttttagatgtgcaggaggcacgtgataggcgcaagagatatggcgcagagcattgtagttatttgtatgacatcgatgctcgtgttaatgatatgggcagattggctcgagaacaagctcaatatgtaattgatgctactaagtttggaaatgtctcaagattcatcaatcatagctgctcaccaaatcttgtcaatcaccaagttcttgtagagagcatggattgtgaacgtgcacatattggtttttatgcaagtcgagatattgctttgggtgaagagctaacatatgactatcagtacgagcttatgcctggagaaggatctccttgtctttgcgaatccttgaagtgcaggggacgcctttattagaacctaaatctgtgtgttgttgcaaccatattttctgattttcaatttggaacacaaatgatctgctcaacattaaaagattccaacatggaatggcccaactctgaaggattccattagccttgatgtcttccaacagatgataacaaatcaatcacatgaggcaggcaacttgtgagggagtcagctgtaatttgttggctgtctggtaaattcactggattcaagtgatttggattgtttgccatgtacaatctgccgttatccccatctggtagagtaggcatgttttttgcagcttactgcacaaatgttctcctttctcttttgctttattctccaatttttcactttagtgcctgatgtcatgaaataatttggcaatcccccactccttttcttccgccttcacccttccacccactaccaaagaaagaaatccccaagagaagttcagcaaaaaaacatatatgcaattaaagctgtctggattagcaattgttacgattttccaaaattttttttcctccggatcatggttctcaatttctttcgccagtgtttcgggaatgtaaatatgttaagttttaacttattcgttcctccttttctatgttaagtaacttattcatagaaatagcttccttgtaaattgtgtcatttaaagatgagtgcagcttttgctccttttaattt

SEQ ID NO: 28973 - DNA, 1065 bp, Glycine max
  Clone ID: TF_GmC195940_1
gtcaaatagcctaagaaggcatactttaagataatttccatataaaacgatccctcggattgttatctcaaattatccttaactaaaaggatgattcaatcctaattgactacaataaaattctgacttaaattcaaattgagttatttatattcccactttgggtaggatgttacaattacaaatcaattaacaacaaatgcctaaaacatttgcagacaaaaataacataaaaagtctaaactactcccacctgtacatctagacacctgagtttcatagttttcattttcagcattgtacttccttccccaaatgatgaatagtagtagacaggcaacggcatcttaagccaaggcaccaagcagatcaaagagtgcttcatagaagacatcattggagagaaaaatttccagacaatcatctaattaaaagtgataatctgtacgaacatgatgcttcaatatatgaagtgaaccaaatggaggtgaaataacagtttagacacataatgaaaatagaacaaggaatccctcaaggaatttatttgtttcccaccttcgagttcttcactttactccaattgtttgagttcagacatccctcttgttacattaatctgattttctatttttccttttcctttttgtttcttatcacagcaaaagacgcttccacaacaacaccgaaatgctttaataggatggtcgtgatcatcaaaatcaataccataatcccatgtcaactcctcatttgcactcactgtcctgttggtgaagaaggcaagatgataataatgatgatcaggactctctatttcgacaggaatgtctatgagatttgcatcatagcatctatgattgatgaaccttccgacatttccattctttgttgcatctaaacatagtgcctcctcgtcctttaacccctgttctgagccccagtccgcatcaagagttacaggatatgtatgttttttcgtgccagtatcctgcataatccttttatataactccataattggtaatatttctcctacatattcacatacaaaagtttcttttg

SEQ ID NO: 28974 - DNA, 1057 bp, Glycine max
  unsure (1)..(1057): unsure at all n locations
  Clone ID: TF_GmC195137_1
aaacaaacacgcccctttattactaatataattagattaatacaccacaaaaatttctccttgcgttaaatacaggaagtaggctaagcttttcacaagtatgttcggatctataatagctgaaagcattttgataatatttgttttttaaatttagaaagctatattcacaataatgtccgcaatttagtcagcacaatcgccatgggcacacaagtatgacagtcgtactgtaaaacccgttacaccacgaccataaaatggcaacctaccaatttagcgtcacccttagggttaacaacattgattactaaccttcgtcttccttacattgaagaagaaggatattgatgaacttcgcattaagactgcagaaaaacactattacattaattaaccttgttgccctcaatacatcctgccagtacaatccacagaaccacaatagcaatacttcttttttatattgccatcagaatcacgaacttgatctatttcataattgtaatcataagtcagctcttgcaagggaggaatgttatcagcagcaaagaacattatgtgaggcatcctggtgtcatggtgatcataaaggacattctgagcaataagattaggggagcagctatggttgatgaatctccccaaattaccaaactgagcagcgtcaatggtgaaaccaccatccttcacaacttcacaagaagctgtgtgtgcatcaggcatgagagtcgtgagagtctaaagatcatcccaaagagtactgttgcctcgagcctcgacnctatagttatttccaatatcaaaaagatactcatcattaccggttctttgttcagcttccttgtcctcaagaagctcccctatatattcacagataaaacttcctgaagggattgaattcagggatctcacaccccatccccttgtatcggttttaaatatttcaagttggaactttatgccaagttggctgactctattatgacatgttgaaggacatttacaagtaggtccacactcatagaccagaggttttgcttgtacaatagcccca

SEQ ID NO: 28975 - DNA, 2123 bp, Glycine max
  Clone ID: TF_GmC270_1
cttaaggtcaaccggacgttaaggctgtggcatttgtattgcccccacttcctgcgcgtgggcgcaaagaggtgtgggaaggcagaggctgagcggaaagctgctaaaaaggcctcgttgaagccttcaaaattgaagaaaggtgctccacctgaagaatcaaagaccactgctaaacgaccagatctaaaggccgtaagcaagatgatggaaaataatgagatattgtaccctgagaaaagaattggcaacattccaggtattgaggttggatatcagttctattctcgtgctgaaatggttgcagttggctttcatagccactggttaaatggcattgattatatgggccggagctatgccaaagcgttttgctatgaactcaaaattgctgaagcttctcatatttcgggcatgtatggagaggatctggataatgcatgacccaacgagtacactggtcacggtgggcatagtctgactggtgataagcgtcaatttcgggatcaaaagttggagcgtggtaacagatgtcttatgtgattgtgggagggatttgtgctgtggagagtcattcgtgatcaggactcttcaagcagttacactggtaaagtatacacatatgatggcttgtacaaggttgtcaattattgggcagggaagggaatatccggatttacagtctacaagtttagacttaggaggcttgaagggcaacctacattaactacaaatcaggtatattttacatatggacgtgtacctcaatctctaacagaaatacaagggttggtttgtgaagatatcactggaggtcaagaagatatgcccattccggctacaaatttggttgatgacccccctgttccacccacagatttcacatattgtaagtcactcaaggttgcaaaaaatgtgaagcttcccatgaatgccaccggatgcaaatgtgaaggcatttgtaatgacccaacaagctgtgcatgtgcattgcgtaatggctctgattttccctatgtatctcgggatggtggcaggttaattgaagctaaagatgtagtatttgaatgtggtcccaaatgtggttgtggtcctggttgtgtgaaccgaacgtctcaaagaggacttagatatcgtctggaggttttccgtactgccaaaaaaggatgggctgttagatcctgggattttataccttctggagcaccagtttgtgagtacaccggaatacttgctagggccgaggatatggatagcgttctagaaaacaattatatttttgagatagattgcttgcaaactataaaggggctcgggggaagagagcgacgatcacaggatggagagattcctgcaaatcttttggacaaatatcatgatcaatgttctgaaagtgtgccagagttttgtattgatgcaggatctactggaaatattgctaggtttataaaccattgttgtgagcctaatctgtttgttcaatgtgttttgagcacacacgatgatttgagattggctcgtataatgttgtttgctgcagacaacataccccctttgcaggaattaacatatgactatggttacgtgcttgatagcgtgttggactcggatgggaagattaagcaaatgccatgctactgtggagcctcagtctgcaggaagcgattattctaatactctggaagttgtatgtggtatttttgcaattgcaaaactagtgcggttaagtattggttgtttaaaacatgagctgcaaagtggtctctattcattcacggttaatttgcgcagtttatgtattgggctgaaatggcagcagaggaacattgtaactttttgtgcagatgcaaggaaatgatataggtttattttttggctagtatatatatatatatatatatatatatatatatatatatatgggtaggctcctgtttcgcttgtggtatttttttttctaaagatataaggagtcgttcaaagcatgtatatgtatagagatatggtaacaactattaattggctatggagtagacaccagaaatactgaatatttatttgtatagagaaaaaataactgcacgaagcaaggattcctgatcaaaatgagcaaaaaatagaac

SEQ ID NO: 28976 - DNA, 3230 bp, Glycine max
  Clone ID: TF_GmC793_1
tgtccaaaacgccgagcagttcgggtttttggagaagtttcatggactctgattgaagcttagtttaatatgcaaaaaccacttcaggaactgtgttgtatttcccagtgttgactccaaggattgcatctttcattccttgtgtgtggtcttttgtacttaatttatattatctagcatttcattgatttttcggtacactgagattattgggtactatactgtgggcaaggttgcttgtagaagagagagtatttgtacttctttaaaattgtaccaatggaacaccattttggtcaaggcactacacctgcatctgaatcctttgataaggctagggttttaaatgtgaagccattaagaactcttgttcctgtgttcccttcaccatctaatcctgcttcatcttcaactccacaaggtggtgccccttttgtgtgtgtttctccttctggccctttcccttcaggtgttgcacccttctatcctttctttatctcctcggaatcccagaggctctctgaacagaatgcgcaaaccccatctggtcaacgcgttcctgcagctccggtatctactgcagttccaattaattcatttaggacacccactggtgctgcaaatggagacgtgggctcatcgcaaaagaatacccgaagtcgtggatgggtcacagaggaagatggctatagtaatgttgagatagaggaaattgatgcagatgaaggaactgggactgggaggtcaaagcgcaagtcaaataagaagactaaggcaagacagagtggtggttctgtttctgttgatgttgatccggatgcagtcgctgctgatattctcaaatcactcaatgcactggttttcgatgtacttagtcaaccagaaggtagcagggattcagttgcatatacactcatgatatatgaagtgatgcgaagaaagcttggacaaattgaagattcaaatagggcagctaactctggagcaaaacggcctgatttgaaggcaggtgcaattatgatgaataaagggattcggaccaacagcaagaaacgtattggagttgtgcctggtgttgagattggggatattttctttttcagatttgaattgtgcttagtgggcttacatgctccttctatggctggaattgattacattggcaaaaccagtcaagaagaagagcctttagctgtaagtatcgtctcatctggagggtatgaagataatgtggaggatggggatgtgttgatttacagtggccaaggtggggtgaaccgtgacaagggagcaagtgatcaaaagcttgaaaggggtaatcttgcattggagaagagtgcgcatagaggtaatgaagtaagagtaattaggggtttgagggatccacaacatccaactgggaagatttacgtctatgatggcctttacaagattcaaaattcctgggtggagaaagcaaaatctggtttcaatgtattcaagtataacttagtcaggttgcctgaacagcctcaagcatatatgatttggaaatccattcaacaatggactgagaaatctgcttcaagagctggggttatattgcctgatcttacttctggggctgaaaatgtacctgtttgtcttgtgaatgatgttgataacgagaagggccctgcatatttcacttacatcccaactctcaagaatttgaggccaactgctcctgtggaatcttctactggatgcccttgtgttggtggatgtcaatctaaaaattttaactgcccttgcattcaaaagaatggaggctatcttccatattcttcagctttgctacttgcggacctaaaatctgtgatatatgagtgtggcccttcttgtcaatgtccttctaattgtcgaaatcgagtttctcaaagtagcttgaaatttcgtttggagcctttcagatccacgaataaaggttggggtcttagatcatgggattctattcgtgcaggaactttcatatgtgagtatgcaggggaagtcatatatattgctaaaccgaagaagcttggaggtgacaatgcaaattatttaatttttgattctactcacatttatctgcaactggaagtttttcctgatgatactgatagctcctaaaattcccatcccccctttatatatcagcaaaaaatgaaggaaatgtttctcggtttaggaaccacagctgctctccaaatgtattatggcgtccagtcatacgtgaaaataagaacgagtcagatctccacattgctttctatgcaattagacatatccctcctatgatggagttgacttatgattatgggactgttcttcctctcaaagtaggtcagaggaaaaagaaatgcttatgtggatctgtaaaatgcaagggttacttttgttaattaattgtctatgatgaattttggaggaggaggcctccgaatgaatatacttaaggataagctttagctatgtaagtcagacagcaggatggaactgtgtagaaagatgatagcagaccaacttttcttttttggcaaacctagtaaattggcacatgaaagagcaagttgtctattttgctaatgagggtaagttaaggtgtaaaagttaactgtaagacacattttgtgtagattgtttctttttctgctgttagaagtacccttttattttttttgggatggattttgagtagtagggcttttttagtagtccacatggtaaaattaaatttgacctgtagaattgaatattttgtttgttgcccatcatttccaaaaaccatcctgatattctattcttttgcatgatggagttgccttatgattatggggctgtttttcctctcaaagtaggtcagaggaaaaaaaaatgcttttgtgggtttgttaaaagcaaagggtacttttgttaattaattgtctgtgatgaattttggaaaaggaggcctctgaatgaatatacttaaggataagctctacctttgtaagtcccccggcaggatggacccctgtagaaaaattatagccgcccccctttttttttttggccaacctagttaattggcccatgaaaaagcaagttgttttttttgctaatgtgggtaatttaaggggtaaaagtttactgttagaccccttttgtgtagattgtttttttttttcccgtttaaaaaaaaaaaaaaaaaaaaaaaaaaaaaaaaaaaaaaaaaaaaaaaaaaaaaaaag

SEQ ID NO: 28977 - DNA, 1970 bp, Glycine max
  Clone ID: TF_GmC88400_1
ggctcgagggaggtcgttgtttcttgattctgtgcccaagcaagtttttatatcatcaagcaccataaagaaacatttcaagtctgatggtcataagaaaagaaaaacggtcaatgcaagcaaggaacatttgaatagtgctacttctggactgggaagagtgaaggaaggagcaaagagttcttctgaagttcctccggtgattggaaagtatacctattgccgcaagaaactgtcaaggaaggagttaatttcctcaaaatctgtagcagaaaatgattctaggccaggtaagcagcctgtggccaagttgaggaaacatttttctggagatgttggtgaggctgcagaggttaaaatagcttctgttatacatggaaagacaaagatgattaaagggaagaaggatacaacttctaagggcaaatcttctgtcagtgtcaatagtagctcacacaatgatcaattatctttaaagaataaagctggtcaaaaagtgttgaagttttcgggtgaagttcaaaatgatgttaaagattttgtaaaatccaatgtaaagaagctttcagcatcaactgataatagcgttgtcatgaagaagattgtcaaaagtgatggcactgttaaagagaaggtcacaagtcattgctccagagagatacaaaatgcaacaatgaaagtatcaaaatcaaaaaggaaacatcaaatggatggtacagcatcttcacatcctacaaaggttttgaaaatttcaaatggtggtgcttatctgggagccagtaaacaagttactgtggcaagtaggaagtctgctaaatccaagccactgaatttgtgtcctagatctgatggatgtgccaggacttctattgatggctgggaatggcataaatggtcccgaagtgccagtcctgcatataaagcacgtgttaggggtcttccatgtgtccagaacaagtgcatagattctgaaaataatttatctcagttgtcaaatggcaagggtctttctgcaagaacaaatagggtgaaattgcgtaaccttcttgctgctgcagagggtgcagatcttctgaaagtgcctcaattgaaggcacggaagaagcatttgcgttttcaaaggagcaagatccatgattggggtcttcttgccttggagccaattgaggcagaggattttgggattgaatatattggagaactgattcgtcctcggatatctgatatacgtgaacgtcagtatgagaagatgggaattggaagcagttacctttttagacttgatgatggttatgtggttgatgctaccaagagaggtgggattgcaagatttgttaaccactcttgtgagcccaactgctatacaaaggttatatctgttgagggtcaaaagaagattttcatatatgcgaaacggcatatagctgctggtgaagaaattacatacaattataagttccccttggaggagaaaaagattccctgtaactgtggctccagaaagtgtcgtggatcattgaattaggctttgattgggtttctgatgctggttgttcttttcaaggtccacttgttaaattgttgagtgggcagaattttttccataggttatactcctgctattgttggatgttgcattctgaagacttgactcttattttatatttcaccttgcatcaaattggatgagttgcaaggtgcttgtttgtgatcataccttgttcattcttgtggacttttttgtggcagttgagtttcttctctcaaaacaatctggtgttcatgggggttattattagcatgttatatttatattacttgatagttgatatagatctggggtggctacctctggattgagataggtgactgccaaaggaatatataggggaatagttgtagagacagtttcctttgtataaagacttgatatgttcatctattaataaatgcgttgccttatacttatt

SEQ ID NO: 28978 - DNA, 1682 bp, Glycine max
  Clone ID: TF_GmC477_1
tcgggaattcggcttaattcggctcgaggggatgaagtatgaggggagtgctgctgggtctggtaaggtgtatgtgtatgatggggtgtataggattgttgattgctggtttgatgtggggaggtcgggttttggggtttataagtttaagctttggaggattgaggggcaggctaagatgggtagtgctattttgaaggaagctaggaatgttaggaggagtgagctggatttgaatcccacatctgcttgatgtttcaaataggaaggagaatgtggcggttcggcttttcaatgacattgatgctaactatgaccctctgcagtatgagtatcttgtgaagacaaattttccgcagtttgtgttccatcagagcgggagggggacaggttgtgagtgtgcggacgggtgtgttgaggggtgcttttgtgccatgaagaatggaggggattttccttataatcagagtgggattctcttgagagggaagcctttggtttttgagtgtggcccattttgtcgttgtcctcctcattgtcggaaccgtgtcacgcagaaggggttgaaaaataggttggaagtgttcagatctagggaaactggttggggagttaggtccatggaccttattcaagctggtgcttttatatgcgagtacacaggggttgttctgactagggagcaagcacggcttttgactatgaatggtgattccttgatatatccaaatcggtttactgatagctgggcagaatggggggacgtctctttgatagactccaattttgtgcgtccatcatatccgtcaatacctcctttggattttgctatggatgtgtcaagaatgaggaatgttgcttgctatatgagtcatagttcaactcccaatgtgttggttcagtttgttctgtatgatcacaataatttgatgttccctcgccttatgctatttgcgatggagagcatccctccgatgagagagctcagccttgattatggggtagctgatgagtggacaggaaagctctctatatgcaatgaatgattttgaaagtttcatacactttataatatactgaagctgactttcgggcattgtttgcagagatagtcaagttgatgcagcacaagttttcaacactgccaatttacaaagagcagtagtagaattgcttgctatacgacggtgtcaggaaatcaaaattcaaatataaagaaatgtctattacgttattctggtttttatctaactgtcaatggctagtacacggtgctcctctggtgaggaaggtcaagaattgaagttcccatttctgcttaatcttgaagacttcagtagttttctcacttgttgatgccatttgtttgttctgtaattgttgatgtcttcctcagctcggcgaagcattttcaaatcacatttttgtaagcaataatagtgcaagctgtattaactctttcttcttttggagaacttgtttgtatatagtataatttcaaagcttgtaaaggttttataatagtgactggtatcggatgcaacattttaattaatttagaagcgggtaaattgggcatctggatattaagattactaggatatagccattgttgctaatgatcttgtatgaggaaaatcaaattatgatgaaatggacaatttggttgttaatttcaaaaa

SEQ ID NO: 28979 - DNA, 1403 bp, Glycine max
  unsure (1)..(1403): unsure at all n locations
  Clone ID: TF_GmC276_2
atcttgggtttgtaaggcttgtgaaacacctgacatcaagcgggagtgttgtctttgtcctgtaaaaggtggtgctctaaagccgactgatgttgacacattgtgggttcatgtcacttgtgcttggtttcgacctgaagtctcttttgctagtgatgagaagatggagcctgctttgggtattctaagtattccatcaaattcttttgtaaagatttgtgttatttgtaaggaaattcatggttcgtgtacacaatgttgcaagtgttctacttatttccatgccatgtgtgcttcaagggctggttatcggatggagttgcattgtatggagaaaaatggtaagcagacaacaaaaatggtttcttattgtgcttaccacagagctcccaatccagacactgtttcaattatgcaaacccctcttggggtcatttcaaccaaaagccttcttcaaactaagagaaaagctggatcaagattgatttcatctaaaagaataaaggttgaagacacttctcctgcagagaacactagacatgagccattctctctgctaggtgtcgaatatatcgaagaacaaatcatacaaaaaagagagcagcaggtgaagccattgctcatcatgtgaggggtcactaccatcatcctttagatgcaatacagagtttaaatgcagacagaatggtagacaagcctccagcattttcttctttcagggaacgccttcatcatttacagagaacagaaaatgaaagagtttgctttgggtagatcaggcatacatggatggggcctctttgcacgtcaaaatattcaagaaggggaaatggttcttgaatatcgtggtgaacaagtgaggcggagcattgcagatctaagggaggcncgctatagattagaagggaaagactgctatcttttcaagataagtgaagaagtggtagtagatgccactgataaaggaaatatagcacggctaattaaccattcttgtatgcccaattgctatgcaaggattatgagtgtgggtgatgatgagagccggattgtactcatcgctaagactgatgtgtctactggtgatgagctaacgtatgactacttgtttgatcctgatgagccagatgaatttaaagtcccttgtttatgtaaagcatcaaactgccggaaattcatgaattaggatttattcagatcatgatgatagtattgcttctccgcaaggagcagtagcacatccccctcatcagtgggaacctcagttacacccaagctgtaattttaatcaaatcataagagaagtataggaaaaaaaaattgtggcataggtttgtcttctatccttctaatattctattatttgacattcatcaaggcctaataaaagatacagatttacc

SEQ ID NO: 28980 - DNA, 696 bp, Glycine max
  Clone ID: TF_GmC230545_1
ggtccggattcccgggtcgacccacgcgtccggtttctattactcctccgtcccgcggtccgaacggaccaactccaccgccatcttcggcgtcattgtaactgtacttcaccagcaccactaaccggaaatctggcccttgccagaaaatttatccgccagtgctggcggaggtcttctctttccacttggaaccgctaactgcattcgaagtttgttgatcattacgcatttttgcagtacaggttacaatacaaccatttgctctgatggatcctcatactgaagagttgcctcagtacatacatataaatcagaatgagttttgcatacgaaggcataagaagcagaaggaggaggatattgctatatgtgaatgcaaatatgatgctgatgaccctgacaatgcatgtggggatagctgcctgaatgtattaaccagcactgaatgcacccctggttattgtcattgtgatatattatgcaaaaatcagaaatttcagaagtgtgaatatgcaaaaacaaagttgtttaaaactgaaggccgtggatggggtcttttggctgatgaggatattaaggcaggacaatttgtcattgaatactgtggacaagggatatgatggaaagaagccaaacgtggatgccaggcttatgaaaatgagggtcttaaagatgcatttatcattttcctta

SEQ ID NO: 28981 - DNA, 555 bp, Glycine max
  Clone ID: TF_17020590
gctaggttcatcaaccatagttgtgatcctaacctatttgttcaatgtgttctgaactctcattatggggtcaaacaagctcgactcgtactatttgcaggaagaaacattcgtcctaaacaggaacttacttatgactatggttaccgacttgatagtgttgttgatgccgatggaaaaatcaagcaattgccatgttactgcggtgaagctacttgtcgcaagcgtttatactagttcggtaacacagcaatgcacatttgtctgattttagagtggagttattacacaaaattgtgtttaaaaatgatgacccaaaatttgaaagcgtgtatgagttgattaaatatggatcttgggtttgcttgaatgtctaataagatgaacaatttttccttttctttttatgattgatcgatgaacctcatgaaagacttcaaggaaattgagtcaattgctgtataagaagggttgaatgttatttggcatggctactatgtttggttttatatcatggcccttattacccctcatttaatacattgattttcttgc

SEQ ID NO: 28982 - DNA, 1351 bp, Glycine max
  Clone ID: TF_GmC143160_1
ccacgcgtccggaaaaaccaaaacggggaccgcttttggtagatgatgatgatgacgacaaggatttgcaaacaatggacagttcaagtcaaatgttaagtgcagaagacaataaaatatcaccaaagacatttgaccagaaaatcattgagtcctctcaaacattcatgaaagatattaagcccaaaaccagttcacaagcatcacatacaatgttgagtgaggtagaaaagatctcaaatttacctcgtgtggcagctaaagacagaaaatcataccctgagaatgcatcatctgcagttgagaaagagctcgtgaagccaagaactaagaaactcaagatgcaacttgcttcaacgaatcatattggtttacctgatgcgtcggatgaaaaactgtgtctcaaacctctgtcaactcaggatcaggatatggaaagtaaagatgatgttatatccgcctgcgaccgtaataccccagcttataatggaaatattacgattgctagttcttcacgtctgggagaagtaaaaatatctttgaattgtgactctgcgttgggacaaccaaacttcagtattcctaatttggatattgttatgaagttcatggacaagaagtacattcgctcttgcaacgctgttgagcctcaattttctatggcaaagctattggatgacctttgcaggatttatctcaagttgggatatcgaaagggatcaaattccaagcgtgccaatttacagcaatatgttaatcaaggtgaaaggaatccctttcgttttatcagtgacataacaaaaggttcagaaaaggtgaaaatatcattaatagatgaaactggcagtgaagacttgccaaagtttaattacataccatgtaatataacttatcaaagtgctaatgtaaatatttctttggctcggatttcggatgagggttgctgttctgattgttcaggcaactgtctttcctcaccattgccttgtgcatgtgctcaggaaactggtggagagtttgcttacactcctcatggtttgttgaaagaagaatttttaacagcttgtgtatctatgaagaatgaacctcaagaccatcattatgtgtactgtcaagagtgccctttggagaagtccaagaatgagtacatgcccgaacgatgcaagggccatatggttagaaaatttataaaggaatgttggagaaaatgtggatgtgacatgcaatgtgggaatcggatagtgcaacggggcatagcatgcaaattgcaggtgttttcaactcgtgaaggaaaaggctggggccttagaacgttagaagattacccaaagggaactttgtatgtgatatg

SEQ ID NO: 28983 - DNA, 307 bp, Glycine max
  Clone ID: TF_LIB3049-034-Q1-E1-G9
aggggaacatataggtgtcgtatcgatgattaacgagtcattgttgcaactagagcaggaagcattgcacatttaattaagcaatcgtgtgcacgaaattgctattccagagttatgagcgttaatggctatcagcataatacaatatttgcgatgagggacattaaatagtgggaagagcttacctatgatgacaggattttctcaattgatgaacgacgtccttgttactgtggcttcccaaagtgcctaagtatactaaatgatactgacgcagaagaacgagctgctaccctatatgcaccac

SEQ ID NO: 28984 - DNA, 1265 bp, Glycine max
  Clone ID: TF_GmC78230_1
attatgttgccgcggaaaaaggagattacttatctatgcaaacatgactgagcatcagaagaatttgcaggatcatttagttaataagacgttggggaactatttgaaagaaaatatgtcaagtggactttctgttcctgcaattatgattcgtaatttggctattcaacttaggaaggtgtgtaaccatcctgatctccttgagtcagcatttgatgattcatatttgtatcctcctttggaagagatagttggacaatgtggaaaattccatttgcttgatcgattgctgcaacgtttattttcaaggaatcacaaagttcttatcttcagtcagtggactaaagtgttagatataatggattattattttagtgaaaaaggctttgcagtttgcaggattgatggtagtgtgaaactggaagagaggaaacaacagatccaggacttcaatgatgtaaatagcaattgtagagtttttcttctttctactagggctggtgggttgggaatcaatctcactgtagctgatacatgcattctttatgacagtgactggaatcctcaaatggatttacaagccatggatagatgtcatagaataggccaaactaaacctgttcatgtttacaggctctcaactgcccaatctatagagggtcgcatgttgaaaagagctttcagcaaattaaagcttgagcatgtagtgattgagaagggacagtttcatcaagaacgtacaaaacctgccagtatggatgaaattgaggaagatgatgttttggcattgcttcgtgatgaagaaacagccgaagataaaaagatacatacagatattagtgatgaagacctggagaagctcttggatcgcagtgatcttatagtcaacgactcaaacgatgataacttcaaagctccagtcagtgcctttcctcttaaagggccggggtgggaggtggtgattccaactgcgactgggggcatgctctctactcttaactgctagtttcttgtcactatttatggccggagtataaaaaacttgctttttgtggtataagatggaatggctttttgaaacattcttttatgtcacggtggtaatgccctggatggcattcattttttgtagatgcttctaacggaactatgtttagaaatgaagctactctggatatgttttttgcgagttggaattgaacattctacttgtgtagtggcgaaagtgaattggtttggatacaataaaccttaatttaacagtt

SEQ ID NO: 28985 - DNA, 743 bp, Glycine max
  Clone ID: TF_GmC636412_1
acaattaagaacaagatatctcttgctgagttgtttgatagtaatcgtgggcagctcaatgagaagagaattctgaatttaatgaacattgttattcaactaaggaaggtttgcaaccatccagagttgttcgaaaggagtgagggaagcacatacctttactttggagagattccaaattcccttccacctcctccatttggggagatggaggatgtatattattctggtggtcacaaccccatatcatatgagataccaaaacttgtctatcaagaaattatacaaagttctgaaactctcagctcagctgttggtcctgttgtctccagagaatcttttcataaacattttaatatttttagacccgaaaatgtttatcggtctgtcttctcagaagatatgtacagtaaaagtggaaattttggttttacccatatgatggatttgtctccacaagaggtgacatttctggctactggttcttttatggagcgactactattttctatgatgagatgggaacaaaaattcattgatgaagctgtagactttctaacggagaccatagatgatgatccggaatgtagttaccttgagaaagaaaaagtgagagcagttacacgaatgttattggtgccatcgagatctgagaccctggttcttcaaaaaaaattccaaactggacccagccatgccccttttgaggccttggttgtcccccatcaagatagggtgttatc

SEQ ID NO: 28986 - DNA, 617 bp, Glycine max
  Clone ID: TF_uC-gmroLIB3259P248f08b1
caactacttaaagagaccgagaagtatcttcaaaagcttgggtccaagctacaggaagcaaagactgcagcaggacgttttgggcaggacgttgatgagacaggaaatgtcagttttcttgagaatagtgaaacagaaaatgtggatgaaagtgatcaggcaaagcattatatggaaagcaatgaaaagtattacaagatggctcacagtataaaggagagcattgcagagcagccatctagtttgctaggcgggaaattgagggaatatcaaatgaatggcctgaggtggctggtttccctatacaacaatcatttgaatggaattcttgctgatgaaatgggactgggtaaaacagtacaggttatttctttaatttgctatctgatggaggcaaaaaatgatagaggaccatttcttgtggttgtgccctcttcagttctacctggttgggactctgaaataaatttttgggctcctggtagttcataaaatgtctatgccggtccaccagaagagaggcgtcggctattcaaggaaaggattgttcaccagaaattcaatgttcttttgactacatatgagtatttgatgaataagcatgatagaccaaagct

SEQ ID NO: 28987 - DNA, 159 bp, Glycine max
  unsure (1)..(159): unsure at all n locations
  Clone ID: TF_700978727H1
cctgcntcngacaggaacaccnttgcagaatganttgaaggaactgtggtcgctttnaaatnnacttctnccagaggtttttgacaanaagaaagccttnaacgantggcttncaaagccanntcaaaaggaaggncccacacaacanacgacgcnnca

SEQ ID NO: 28988 - DNA, 829 bp, Glycine max
  Clone ID: TF_LIB4164-006-Q1-K1-F3
gtccggaattcccgcggtcgacccacgcgtccgattggcctgtgataccctatactgatgttcatctggagtttgtaagaagagttaccattgaccatgtggaaacatatacagtgttgttatctggtatttttgatggacctgatgaaggtgttactggtcttcttcacttggcaagtttgaagtttgttacattgaggccagttcttggggctaggctttctgaggaaatttcctccctccggataagggttgaggtattaaagagtgcctttgatgcatgcgagtcgcttcttgatagttctagacaactatggaaaaagagtatggtgaatgtaatgtcttggctacgtccagaaataatgacttcggaagttaggtatgggtttggtacctgtatgaaaatggaagttgatccgcagatagagatggcagatgacacttgcaaggcaaggaaacatgcaaggttcgatcctgcaggtttctgtgaagccattaagccttcaaaatcagagccaatgctcaaagatgacataccagagttacttcctaaattgaggccatatcaacggcgtgcagctttctggatggtagaacgggagaaagcagtggaagaaagtcggggtgaaagagaaaggaatctgtttcattctccattatgtatacctgtggattttctggacaccagttctcaaatcagtcaaatgtttttcaatccattcagtggaagtatttcattgtgcccagagacttcttcaccttatgtatttggaggcattcttgctgatgagatggggtttgggaaaaactgttgaattgcttgcttgcg

SEQ ID NO: 28989 - DNA, 415 bp, Glycine max
  Clone ID: TF_uC-gmflminsoy021g09b1
cacgcgtccgcccacgcgtccgcggacgcgtgggaagaatgttcagtttgcacccacagttctgtgcggcatttctgttggtggaataaatatgttgccacaccaattcaatcttatggaaatggggatgctgggaaaagagccatgatattgctcaaacacaaagttttgaagaacatagtattaaggcgcactaaaataggcagggctgctgatcttgcacttccacctagaattgtttcattgagaagggattgcttggatattaaagagcaagattattatgaatcattatacaatgaaagtcaggcacaatttaatacatatattgaagcaaatactctgatgaataattatgcctcatatatttgaccttcttacacgactgcgtcaggcagttgatcatccatacctt

SEQ ID NO: 28990 - DNA, 1598 bp, Glycine max
  Clone ID: TF_GmC1170_1
cttattgtcttgtctcaaaatggtggatcaaatagaggaggtttcaatatagtatcttcaagtgccaaaagcagcattcatctggatggactattcaacattatctcatacgatttggtgccaaagctacagaatatgcttatgacatgtaactttaaggttgtgattgctgatgagtcacattttctgaaaaatgctcaggcaaagaggacaactgcttctcttccagtcataaagaaagctcaatatgcattattgcttagtggaacacctgctttatcacgaccaattgaactattcaagcagctggaagctttgtatcctgatgtatataggaacgttcatgaatatggtaaccggtactgcaagggtggattttttggagtttatcaaggtgcaagtaaccatgaagagttgcacaacttgatcaaggcaacagtgatgattcgcaggcttaaaaaggacgttctttctcaacttcctgtaaagcgcaggcaacaagtcttcctagacttggctggcaaggacatgaagcaaattaatgctttatttcgagagttggagatggttaaagccaaaattaaggcagctaaatcacaagaggaggctgaatctctcaagtttgctcaaaagaatcttattaacaagatatatactgattctgcagaagccaagattccatctgttcttgattatgttggaactgtcattgaggcaggatgcaagtttcttatatttgcacaccatcagccaatgatcgattcaatacacgagtttcttcttaagaaaaaagtgggttgcatacgaattgatggaagtacacctgctgcatccaggcaacaattggttactgactttcaggaaaaagattctatcaaggcagcagtgctatctattaaagctggaggcgttgggttaactttaactgctgccagcacagtaatcttttcagaattgtcttggactcctggtgacctaattcaggccgaagaccgtgctcatagaattggccaggtgtcttcagtgaatatatactacttgctagcaaatgacacggttgatgacatcatatgggacgtagtgcaaaacaaactggaaaatttggggcagatgttagacggccatgagaacgccttggaggtctcagctagtctgccggtgaatagcccttcaaagcagaaaactctagaccagtttgttagaagatgtgataacacggatgggttggaatatgagcccaaccccaaacgtccccgaaactgagccttgaaacggtgctcaaagtggagaaagaataatcgcaatattggcactcttgctcgtcccattagaagagggtgtagcttgtcagcacagtttacaactctaaactatgcagctgatgccgaaggagcttaacggttttgaggaatatgtatgggatgaaaatggtgatcaagtttcctaacagattttaggcttaagatttcctgtcccctaaagttgttagtggaaattgtacagagtacatgatcatatgaatgtaacttgtaaattgctttactcaatataatttcgttgccatgtcataaatggtatttaaaaaacaagaaaacagt

SEQ ID NO: 28991 - DNA, 142 bp, Glycine max
  Clone ID: TF_7795170
tattgagtctacctacgaaagggcattaattggcactccccttcaaaaccatgttggggaactgttttctctgattcggttcctgctatttactccttattcctattacttgtgcatggactgtgactgcttgatttttgat

SEQ ID NO: 28992 - DNA, 401 bp, Glycine max
  Clone ID: TF_GmC157_5
atcaaagcaagctaagaaaaagaaaagagaagttaccaaggggaagaccaagaaatctgacagtaagatatcaaagagttctaacacgaaaaaggaagaggaaatgtggatggatgaagaagatttagatgcacctgtgcgtagcgataggtcaattcttcatgctgtgaaatggcagcggatcatattggatgaggcacactatataaaatctagacattgtaacactgctaaagcagttcttgctttagagtctacctacaaatgggcgctaagtggcaccccccttcagaaccgagttggagagctgtattctctgatacggttcctgcaaataactccttattcctattacttgtgcaaggactgtgactgcaggattcttgatcatagcactaaag

SEQ ID NO: 28993 - DNA, 1798 bp, Glycine max
  Clone ID: TF_GmC1248_1
ctgcagccttagagccaaaagaaggtggtgcttatctggaactcctattcaaaatactattgatgatttgtatagctactttaggttcctaaagtatgatccttatgctgtatacaaatcattctacaatacaataaaagttccaatatccaaaagtactattcaaggttacaagaaacttcaagcagttttaagggccataatgctacgtcgtacaaaaggaactttgcttgatgggaagccaataatcaatttgcctcccaagacaattgagctaagtaaggtggatttttcgattgaggagcgagcattctacaccaaattggaatcagactcgcgtcttcaatttaaggcatatgctgctgctgggacagtgagccaaaactatgctaatattcttttaatcgcttttacgtctccgacaggcttgtgaccacccgcttcttgttaaagattttgattctgatcctgttgggaaagattctgttgaaatggcaaaaaatcttccaagggatatgctgattaatctttttaattgtttggaagcaacatttgccatatgtcttgtttgcaatgatcctcctgaagagcctgttattacgatgtgtggccatgtcttctgttatcaatgtgtatcagaatatttgactggtgatgataacatgtacccttcagttaattgtaaagaactaattggcgacgatcttgttttctccaaagctactttgagaagttgcatctctgatgatggtggcagtcttagttcagcaaattcacatctttgtgattattcactagtgcagcagcgtgactacacttcatctaaaatcaaagctgttcttgaggttctgcagtcaaattgtaaattgaagatttctagttctgacttactgaactcctctggaggttgtagagattcaccgtcttcggataatttatatgttgaagactgtgattcagatgttagggttacaaaacacacaataaagtattcagagtccacaactgaaggaccaataaaggctatagttttttcccagtggactagcatgttggacttagttgagacatcattgagacaatttagtatacagtaccggagacttgatggtaggatgactctgggtgcgagggacaaagctgttaaggatttcaatactgaacctgagattgctgttatgctgatgtcactaaaagcaggaaaccttggtttgaatatggttgctgcatgtcatgttatacttttggatctttggtggaatccaacaactgaagatcaagctattgatcgagctcacagaattgggcaaactcgtcctgttactgtgacacggatcactataaaagatacagttgaagataggatactggctcttcaggaagataagagaaaaatggttgcatctgcttttggggaagaccatgctggcggtactggaactcgcctcacagtagatgatctgaagtatcttttcatggtctagactctagaccactccttgcttgttctccccatttgaagttttgggcggtttggcatggagttaggagttaggacttaggatggttcttaaggagggtatggctgttttttcagtgcctgctgacatcggttgcacaagttggcaggcgaggccaggcttgcttgatccaagtcgtaacttgatctgttttgaagtccacaagggcatttttgtcctccaaactgctatatagctgaaggctgtgtctgtaaatatactaattaaattatatggtttatgaaaatatgtccttgcgcaactgccctttctgttgt

SEQ ID NO: 28994 - DNA, 654 bp, Glycine max
  Clone ID: TF_GmC154492_1
ggaagtttagaggagtttcaggaagagtttaaggatatcaatcaagaggaacagatttcaaggcttcataaaatgttggccccacatctcctgcgaagagtgaagaaagatgtcatgaaggagctacctcctaaaaaggagcttattctacgtattgaattgagcagcaaacagaaagaatattataaggcaattttgactcgcaattatcagatattaactcgtcgtggtggtgcacagatttctcttatcaatgttgttatggaactgcgtaagctctgttgtcatccttacatgttagaaggagttgaaccagatattgatgacgcaaaagaagcattcaaacagctgctggaatcatcggggaagttgcaattgctggacaagatgatggtgaagcttagagagcaaggacatagagtcctcatatattcccaatttcagcacatgctggacttgcttgaagattactgtgcgtacaagaattggcagtatgaaaggattgatggcaaggttggtggagctgaaagacaagttcggatagatcgattcaacgccaaaaattcttcaagattttgctttcttctttctactagagcttgggggcctggagataaaccttgcaactgctgacacagctattatatatgatag

SEQ ID NO: 28995 - DNA, 3274 bp, Glycine max
  unsure (1)..(3274): unsure at all n locations
  Clone ID: TF_GmC1755_1
ngaggggnnggngncgctcgaggcactaatgaaaagccagttactatgtctattgagtctgttaacgatcctcagaccttgattaacaatatccaggtggtgcgttctgttgctcccgtcttaaatgaagagttgaagccaaaactgttgacacttcttccatgtatttttaaatgtgttcagcattctcatgttgcagttagattagctgcttcgcgctgcatcacttccatggcacagtcaatgactgtgaaagttatgggagctgtggttgaaaatgctatccctatgttggaagatgcatcatcagtttatgctcgacaaggagcaggcatgttgattagttttcttgttcaggggctgggtgtagagttggtaccttatgctcctctattggtggttccgcttctaaggtgcatgagtgattgtgatcagtctgtcagacagagtgtgacccatagttttgctgctcttgtacctttacttcctttggctcgaggccttcctcaaccaattggattaggggaaggtgtatctagaaatgcagaagatttgcagtttttggagcaactacttgacaactctcatattgaagattacaagttgtgcactgaactgaaagtaacattgaggaggtatcagcaggaaggcataaattggttagcttttttgaaacgtttcaagcttcatggaattttatgtgatgacatgggacttggaaagacacttcaagcatcagcaattgtggcctctgatatagctgagcatcgaacttcaattgggaatgaggatcttctgccatctttaattatttgcccatcaactctagttgggcactgggcctttgagatagagaagtatattgatgtttctgttatctctagtcttcaatatgttggttctgctcaggagcgaatgcttcttcgggatcatttttgcaagcataatgtcatcataacgtcatatgacgttgtccgtaaagatattgattttctaggacagctgttgtggaatcactgcatcttagatgaagggcatataatcaagaatgccaagtctaaagttacacttgctgtaaaacagttgaaagcccaacaccgcttgatattgagtggtacacctatacagaataacatcatggatttgtggtccctttttgattttctgatgcctggatttcttggaactgagagacagttccaagccacatatggaaaaccacttttagctgcaagagatccaaaatgttctgctagggatgctgaagcaggagcacttgctatggaggcattgcataagcaggtaatgcctttcctccttcgtaggacaaaggatgaagtcttgtctgatctgcccgagaaaataattcaagacagatactgtgatttgagccctgtacaatttaaactttatgaacaattttctggttctcgtgctaaacaagaaatgtcatctgttgtaacaacgaatgagtctgctgcagcagaaggaagtagcagttctactaaagcatcttcacatgtattccaggcgctccaatacttgctaaaactctgtagtcatccattgcttgtcattggtgagaagattccggagtcactttctactatcctctcagaactgtttcctgctggctctgatgttatttcagaacttcacaaactctatcactccccaaaattagttgctcttcatgagattcttgaagaatgtggaattggagttgacaattctggttctgagggtgcggttaacgttgggcagcatagggtcttgatattcgctcaacataaggctttcctggatataattgaaagagatttgtttcacacacacatgaaaagtgtcacatatttgcggttggatggatcagttgagccagaaaagcgttttgaaattgtcaaagctttcaattcagaccctatcattgatgtcttgctgcttacaacacatgtcggtgggcttggtttgaacctgacatctgcagatacccttgtttttgtggagcatgactggaaactgatgcgagaccatcaggtctatggatagagcacacaggttaggtcagaaaaaagttgttaatgtccatcggctaataatgcgtggtactctggaagagaaagttatgagtctacaaaggttcaaagtgtcagtggctaatgctgtcattaattctgaaaatgctagcatgaaaacaatgaatacagatcagttgcttgatttgtttgcgtcagcagaaacctccaagaagggcgcatctgttgtgaagagtccagagaacaactctgatggagacgctaaattagtaggcagtgggaagggattgaaatcaatactggggggattggaggagctatgggaccaatcacagtatacagaggagtacaatctgagtctctttttagcaaggcttaatggctaatgttccagattcatttcagagtcagagtgtacatatccatgagtacaaattttggcattgtaacatcttattttttttcccaccatgcccttcagtcatttttggtcgtcactttttttgtataccccaatgctggctggaatctgctcgtgtgcatgcagaccaggtaaatcagtgtctgtattttacagggcatttgagtgactggtggaagcccttggtggtgatatgtagagaaatgaatcggtgacggcttcaggagggatggagtaatattttttggattttgtacatatacagtcaatcctaattatagttataattgttgctaacataaaaaatgccctgcattttgcaatgttatttggaaagctactaataccaaaatacccattcagagaacaactcttatggagacgctaagttagtaggctgtaggaagggattgaaatcaatactcgggggattggaggagctatgggaccaatcacaatatacagaggagtacaatctgcgtcaatttttagcaaggcttaatgactaatattccagattcatttcagagtcagagtgtacatatccatgagtacaaattttgccattgtaacatctcaatttttttcccaccatgcccttcagtcattttttgtcgtcactttttgtataccccaatgctggctggcatctgctcgtgtgcatgcagaccaggtaaatcagtgtctgtattttacagggcattttagtgactagtggaagcccttggtggtgatatgtagagaaatgaatcggtgacggcttcaggagggatggagtaatattttttggattttgtattaaactttatgaacaaat

SEQ ID NO: 28996 - DNA, 267 bp, Glycine max
  Clone ID: TF_701101675H1
attgcaggatatcagtcaacctaaaacagaatatgacttacctgctggtgtactgtctgtctctcttctgagacatcagaaaattgcattggcttggatgcttcagaaggaaaccaagagtttgcattgcttgggggggattttggctgatgatcagggccttggaaagacaatttcgatgatttccctcatcctggcacagaggacattacagtcaaaatcgaaaatagatgatacatgcagtcataaaactgaagctttgaattt

SEQ ID NO: 28997 - DNA, 443 bp, Glycine max
  Clone ID: TF_GmC129655_1
acgcatgcaggagatgtgtcgatttggggttaagaactgtgcttatagtcacacctgtcaacgtgctacataattggcgtcaggagttcatcaaatggagaccttctgagttaaagccactcagggtcttcatgctggaagacctatcgagagatataagggcacaattgcttgcaaaatggagatctaaaggtggtgtctttttgattggttatgctgctttccgaaatttgtcttttgggaagcatgtgaaagatctgcacatggccatataaatttgccatgctttgcatgatggaactgacattcttgtttgtgatgaagcccatatgataaaaaatactaatgatgacgtaacttaagccttgaaacaagtaaaatgccagagaagaattgcacttactggatcacctattcaaaacaatctcatggaatatcactgt

SEQ ID NO: 28998 - DNA, 428 bp, Glycine max
  Clone ID: TF_7589119
cgtgttcttcataattatgcttcaatattggagttacttttacgtcttcggcaatgttgtgatcatccatttcttgtaatgagtcgaggtgatactcaagaatttgcggatctaaacaaactagccaagcgcttccttagaggaacctatactgcttcagaaggtgaagtaaaagatacaccttcacgggcttatgttcaagaagttgtggaagagctacgtaaaggggagcaaggagagtgtccaatatgtcttgaagtatttgaagatgcagtgttaacgccttgtgctcaccgcttatgccgggaatgcctcttgtcaagttggcgaaatgctacatctggcttatgtcctgtttgtaggaaaacaatcagcaggctggatcttatcactgcccctactgagaatcggtttcaggtggatattga

SEQ ID NO: 28999 - DNA, 620 bp, Glycine max
  Clone ID: TF_GmC423697_1
cagaaatcgaaagattcaatagattgcggtttagatccagcaagttttcctctggtaaacaaaaaaacagtgttaaggatgatgcttaattgaagaaacagcagaaagaatttcaacattatactcaaagtcctgtgtttctttctgaaggtacattacatccatatcagcttgaaggcttgaacttcttacgattctcttggtccaagcagactcatgttatacttgctgatgaaatgggacttggaaaaaccatacaaagtattgctttcttagcatcactttttaaagagggtgtctctccacatctggtggttgctccactttcaactttgcgaaactgggaacgtgaattcgccacatgggcacctcatatgaatgtgctaatgtatgttggatctgcccaagctcgtagtgttataagagagtatgaattttactttccaaagaaacagaagaagatcaagaaaaagaaatctggtcatttaattagtgaaagcaagcaagacaggattaagtttgatgttcttttgacatcatatgaaatgatcaactttgacacagcatcactaaaacctataaaatgggagtgcatgatagttgatgaaggtcaccgtctc

SEQ ID NO: 29000 - DNA, 452 bp, Glycine max
  Clone ID: TF_GmC131581_1
ctcgagccgaatcggctcgagggctgcgagaagacgacagaagggcatgacaattgctttgatactcagtaaccaggcaggggtaactcagaaaacaatgatgtggagaatggagatgataattttatcacaaataaaagaaagaatgctaataccttacataaatttgagggtggcactcttattgtttgtcccatggctttgttaagtcaatggaaggatgagcttgaaacacattcaaaggaaggtagtatatccatatttgttcattatggtggagcaagaaccactgatccctggatgatctcaggccatgatgttgtcttgacaacgtatggtgtcctacaagctgcatacaaaaatgatggagagaatagcatctacaacaaggtcaagtggtacagggtggtgctagatgaagctcataatataaaagcccatcggaatcagac

SEQ ID NO: 29001 - DNA, 518 bp, Glycine max
  Clone ID: TF_GmC2542_21
gcgctcgtgaggctgctatggcagttcaaggaaagatggtagattctcagcgtaagaagagcaaagcaagtttgcggaagcttgagaaacaacctgaatggttgaagggtggagagctccgtgattatcaacttgagggtctgaattttcttgttaacagttggagaaatgatacaaatgtcattttagctgatgaaatgggccttggaaaaactgttcagtcagtatcgatgcttggttttctacagaatgcccagcaaatccatggtccttttcttgtagttgttccattgtccactttatcaaattgggccaaagaattcaggaagtggcttcctgatatgaatattatcatatatgtaggtactcgtgcaagtcgagaggtttgtcaacaatatgaattttataatgagaaaaaacctgggaagccaataaaattcaatgcactgttgactacatatgaagtagttttgaaggataaggctgttctctccaagatcaaatggaattatctgatg

SEQ ID NO: 29002 - DNA, 1170 bp, Glycine max
  Clone ID: TF_GmC189298_1
agggaaacacaaggttgaaaatgagctgcctgaaaagattgagagactaataagatgtgaggcttcatcatatcaaaaacttttgatgaagagggtggaagaaaatcttggcgctattggcaattcaaaggctcgatcagtgcacaactctgtcatggagcttcgtaatatatgcaatcatccatatctcattcagtttcatgcaaaggaggtggataacttcatacctaaacattatctgccaccaattattagactttgtgggaagcttgagatgtaggaccgtttattaccaaaactgaaggcgacagatcatcgggttcttttcttttcgacaatgactaggcttttggatgttatggaggaatacttaacttcaaaacagtatcgctatctccggttggatgggcatacatcaggaggtgatcgtggtgctctgattgaactatttaaccaacccggttccccatattttattttcttgctcagcattcgagctggtggcgttggagtgaatcttcaagctgctgacacggtgatcttatttgacactgactggaacccacaggtggatctgcaagctcaagcaagggctcatagaattggtcaaaagagggatgttcttgttcttcggtttgaaacggttcaaaccgttgaagaacaagtcagggcttcagctgagcacaaacttggcgttgctaatcagagcattactgctggttttttcgacaataatacaagtgctgaagatcgaagagaatacttggaatcactcctgcgtgagtgtaagaaagaagaggttgcacctgttttggatgatgatgctctaaatgatctcttagcccgaagtgaaacagagttggatatatttgaggctgttgacaaagaaaggaaggaagatgagctggctacatggaagaaattagtgcttggacaggccgctgatggctctgactctgatattcctccacttcctgctcgtctggtcactgatgaagacctgaaacagttctatgaagcaatgaagatatccgatgtgcctaaggctgaggtagaatctagtggagtaaagagaaagggtggatatattgggggccttgatactcaacattacggcaggggaaaacgtgcaagagaggtacgttcctatgaagagcaatggacagagga

SEQ ID NO: 29003 - DNA, 2296 bp, Glycine max
  Clone ID: TF_GmC300_1
tggaggattcaggttttaagcctctgctcaagccgtatcagttggttggcgtcaattttttgctcctactgtatcggaaggggattggaggagccatattggcagatgaaatgggtcttggcaaaacagttcaggccatcacatatttaactttgttgaaacacttgcacaatgattctggtccacatcttatagtatgtcctgcttctgttctggaaaactgggaaagggaattaaaaaggtggtgtccatccttctctgttcttcaataccatggggctggacgggcagcatactgcaaggagttgaactccctgtccaaggcaggattgcctcctccatttaatgttcttcttgtgtgttattcactttttgaacgacacagtgcacagcagaaagatgatcgcaaaatcctgaagcggtggaggtggagctgtgtgaagaaagctggtattagatgctgctgttctcgagtccatggaggagattaaaatctaatgtctgtccgagaaaatgatgggagaggcttgatgctgcaattgtattgagttaaaaatgagatctaagaaaaacagtttaagttggagtcacttcattcctatatttttaatcttgaagatgttgacctaaaaaagttacaaaatgcagaagatggagatttatgtggtcgtatgaagtccatcttaggtccatttattttgcggcgactgaaatctgatgtgatgcaacaacttgttccaaaaatacagcaggttgaatatgttataatggaaaagcagcaggaaactgcttacaaggaagccattgaagagtatcgtgctgtttcacaagctcggatggaaaaatgttccaatcttaattcaaagagtgttcttgaagttcttcctcgacgacagataaacaactattttgttcagttccgcaagatagcaaaccatcccttgttaataaggcgaatctacaatgatgaggatgtcattcgctttgctagaaagctcgagaagacaacagaagggggttttgaatgtactttggacagagttatagaggagcttaaaaattacaatgacttctgtattcaccggcttttacttcattatggtgtcaatgatagaaaggggatccttccagataagcatgttatgctttctgcaaaatgtcgggccttagcagaacttcttccttcactaaaggagggtggtcatcgagccttgatctttagtcaatggacttcaatgcttgacatattggagtggactttggatgtcattggattgacctataaacggcttgatggaagtacacaggtggcggagaggcaaacaatagttgatacgttcaataatgatacttcaatatttgcatgcttactttccacgagagctggtggacagggcttaaacttaacaggagccgatacagttgtaattcatgacatggattttaacccacagattgatagacaagccgaagatcggtgccatcgaattggtcagacaaagcctgtaaccatatatcggctggtgacaaagggaacagttgatgaaaatgtgtacgagattgcaaaaagaaagctagtattagatgctgccgttctcgagtccatggaggagattaatgaaggtgacatgcccgagaagaccatgggagaaatattgtctgcaattttattgagttaaaatattgatctaagaaaaacagtttaatttatcgtcactcctttcctatagttccaatcttgaattaatctgttgatttgggatagaagagaactggcagcctacaaattagtgagattcttctctcctaattatgtttttttctttaactcgagattttgtttaaagggatcgaatacaatacaatatcaattgaccaaccacttgttggttggaatgaggtgtttataccaagaaaaagagagatcagaaataaagaaaaaaaaaacaaatatgataaattatgtataaaaagtcatggcgaagattaacaaatttgttggacattaattattcctgaagcactaatgaagccttaccctttccagtgaaaagagaaatggaggcaaaaaaaaaaacataacaaaaaaaggagcgcgatgagggaaccgaacgagccctaattgaaacgggatttcaagagggagaaaacagaatgctggaactgtattagtggagcgtggtatgcgacgacgaccccttttgacctgtaccaatttctgaccgtgcagtacttgccgctgcataactggtcttcgttaccctgctgtgtccgatggtaaagaaatttaatgctg

SEQ ID NO: 29004 - DNA, 1881 bp, Glycine max
  Clone ID: TF_GmC300_2
tgacgtcctgccgcgtcgtagctcggattcgctcgggccatatggggcgagaaagggtcttggcaaaacagttcaggccatcacatatttaactttgctgaaacacttgcacaatgattctggtccacatcttatagtatgtcctgcttctgttctggaaaactgggaaagggaattaaaaaggtggtgtccatccttttctgttcttcaataccatggggccggacgtgcagcttactgcaaggagttgaactccctgtccaaggcgggattgcctcctccatttaatgttcttcttgtgtgttattcacttttcgaacgacacagtgcacagcagaaagatgatcgcaaaatcctgaagcggtggaggtggagctgtgtgataatggatgaggcacatgctttgaaggacaaaaatagctttaggtggaaaaatctgatgtctgttgcaagaaatgcgaaccaacgcttgatgctgacagggacaccacttcagaatgatctgcatgagttatggtcattgttggagtttatgctgcctgatatttttgcttctgaagatgttgacctgaaaaagttattaaatgcagaagatagagatttaattggtcgtatgaagtccatcttagggccatttattttgcggcgactgaaatctgatgtgatgcaacaacttgttccaaaaatacagcaggttgaatatgttataatggaaaagcagcaggaaactgcttacaaggaagccattgaagagtatcgtgctgtttcacaagctcggatggaaaaatgttccaatcttaattcaaagagtgttcttgaagttcttcctcgacgacagataaacaactattttgttcagttccgcaagatagcaaaccatcccttgttaataaggcgaatctacaatgatgaggatgtcattcgctttgctagaaagctacatccgataggtgcttttggttttgaatgtactttggacagagttatagaggagcttaaaaattacaatgacttctgtattcaccggcggtggcatgattatatgctgagattgagctactccatggataatgtaggccttagcagaacttcttccttcactaaaggagggtggtcatcgagccttgatctttagtcaatggacttcaatgcttgacatattggagtggactttggatgtcattggattgacctataaacggcttgatggaagtacacaggtggcggagaggcaaacaatagttgatacgttcaataatgatacttcaatatttgcatgcttactttccacgagagctggtggacagggcttaaacttaacaggagccgatacagttgtaattcatgacatggattttaacccacagattgatagacaagccgaagatcggtgccatcgaattggtcagacaaagcctgtaaccatatatcggctggtgacaaagggaacagttgatgaaaatgtgtacgagattgcaaaaagaaagctagtattagatgctgccgttctcgagtccatggaggagattaatgaaggtgacatgcccgagaagaccatgggagaaatattgtctgcaattttattgagttaaaatattgatctaagaaaaacagtttaatttatcgtcactcctttcctatagttccaatcttgaattaatctgttgatttgggatagaagagaactggcagcctacaaattagtgagattcttctctcctaattatgtttttttctttaactcgagattttgtttaaagggatcgaatacaatacaatatcaattgaccaaccacttgttggttggaatgaggtgtttataccaagaaaaagagagatcagaaataaagaaaaaaaaaacaaatatgataaattatgtat

SEQ ID NO: 29005 - DNA, 450 bp, Glycine max
  Clone ID: TF_GmC128210_1
ccattgctgaataagtgcagcaatgcccaaaaatttgaactagaaactttgaatctggatgcagatgatgatcagcttcctgagaatggaatagtaaagaacgaatctaatatgtgtcaggatttgtctagtagaaatccaaaccagaacatgaatttgttagtgcctgcgaagggaaggccatctgcaggaacccttattgtttgtccaacaagtgtcctgcggcaatgggccgaggagttgcacaataaggtaacctgcaaagcaaaactctctgtgctagtatatcatggaagcaatcgaacaaaagatccttatgagcttgccaaatatgatgttgttctgacgacttattcaattgtcagcatggaggttcctaagcagccttttgttgacaaagatgatgaagaaaaaggaacttatgatgatcatgcaatatcaagtaagaaa

SEQ ID NO: 29006 - DNA, 575 bp, Glycine max
  Clone ID: TF_7685168
acgcgtccgcagatgatgaagatgcactggttgactcttcagatgtgatgcccgatgaggaggtagatcctgaagaggctgaattgaagaaggaagctttgaaggctgcacaagaagcagtttctaagcagagaatgttgacaagtgcttttgacactgaatgcttgaggctgcgccaagctggtgaaactgattcacttccaccagatgttgctggagcgagtaatattgatttgcaaaccccctccaccatgccagtggcatccactgttcggacacctgaattatttaaaggggttcttaaagaatatcagctaaaaggtcttcagtggcttgttaattgttatgagcagggtttaaatggtattctagctgatgagatggggcttggaaagaccattcatgccatggcttttttggcccatttagctgaggaagaaaatatatggggaccttttctggttgttgcacctgcttctgtattaaataattggaatgaggaacttgagcgcttctggcctgcactgaaaagacttccatattggggtgggctttcagataggacaggactttgg

SEQ ID NO: 29007 - DNA, 637 bp, Glycine max
  Clone ID: TF_LIB4167-054-R1-K1-B3
ccacgcgtccgctttagaggaaggctaaaaaggcagttgctgccatgctgacaagatctaaagaaagtgagaagactgaagatatgaacatgactgaggaagaaagagttgagaaagagcagaaagagctcatgcctttactcacaggtggaaaattgaagaattatcaactgaaaggtgtaaagtggttgatttccttgtggcaaaatggattgaatgggattcttgctgatcaaatgggtcttgggaagacaatccaaacgattggatttctctcacatctaaaagcaaaaggtctggatgggccgtacatgataattgctcctttatcaaccctctcaaactgggtgaacgagatttctaggtttgcaccatcactccctgccgttatctaccatggtgacaagaaacagagagatgatatccggaggaaacatatgcccactagaacaattggcccgcaatttcctatagtcataacttcttacgagattgctttaaatgatgccaagagatatttcaggtcatacaattggaaatatcttgttgttgatgagggacacagactcaaaaactcacaatgcaaattagtgaaggcattgaaattcataaatgttgaaaacaagcttctttttac

SEQ ID NO: 29008 - DNA, 2892 bp, Glycine max
  Clone ID: TF_GmC795_1
ccacgcgtccgggcatggcattgaagctaaaggcatcgtgcaacacgggccgagaaattgagattccaatccttaaatgccgatgttcaggaagcttacatgagaatggtaaaagagagtaataatgaaagattgactttgcttcttgaagaaacaacttgattacttgtaaatttgggagtagcggatcaagcatataacaaataaaaacaatgctaagtcatggaactctatgaagattcagaatcgaatttccctgagtccgctggattaaagaatgtaatttctaaggaatcccctcttgaggaagatgtggatttaatagattctgatcgtaacggtggtgatactagtgatttacttgaaggtcagcggcaatacaattctgccatacattcaattcaagaaaaggtaagcgagcaaccatctattcttcaaggtggagaattaagaccataccaactagaaggcctccagtggatgctttctttgtttaataacaatttaaatggaatattggctgatgaaatggggcttgggaagacaatacaaaccatctcattgatagcatatcttatggaacacaagggtgtgactggtcctcacttgattgtggctccaaaggctgttctgccaaattggatcaatgaattctcaacatgggctcctagcatcacaaccattctttatgatggacggctggatgagagaaaagcaatgaaggaagagttgtcaggggaggggaaatttaatgttctgataacacactatgatcttataatgagagataaagcatttctcaagaaaatccattggctctacttgattgtggatgaagggcatcgattgaagaatcatgagtgtgctctagcaagaaccctggactctggctatcacattcaacgaagactgctgttgactggtaccccaattcagaacagtttgcaggaattatggtccctgctcaattttctccttccaaacattttcaattcagttcagaatttcgaggactggtttaatgctccctttgcagaccgagtggatgtctctctaactgatgaagaacaactattgatcattcggcgtctgcatcaagtgataaggcccttcatattgagaaggaaaaaagatgaggtggaaaaatttcttcctagtaaatctcaggttatactcaaatgtgacttgtcagcctggcagaaagtatattatcaacaagtcactgatgttggcagagttggcttagacaatggttctggaaaatcaaaaagtctacagaacttgacaatgcaactcagaaaatgttgtaaccatccctacctctttgtgggtgactatgatatccataaacacaaggaggagattttcagagcatcaggaaagtttgaacttcttgaccgtttgcttccaaaacttcgtagagctggtcacagagtcctccttttttctcagatgactcggctcatggacattcttgaaatttatctgcgacttaatgattttaaatttcttagacttgatggctcaacaaaaactgaggaaagaggttccctactacggaaattcaatgcacctgattctgcatactttatgtttctcttgagcacccgtgccggaggtcttggtttgaacttacaaacagcagatactgttataatctttgacagcgattggaacccacaaatggatcaacaagccgaggatcgagcacatcgcattggacaaaaaaaggaagttagagtttttgtgttagttagtgtgggatctattgaagaggtgattttagagcgtgctaaacaaaagatgggcattgatgccaaagtcattcaggcagggctctttaacacaacttctacagcacaagacagaagagaaatgttgcaggagattatgcgtagaggtactagctcacttggtacggatgtcccgagtgagagagaaattaaccgccttgcggcccgatctgatgaggaattttggctgtttgagaaaatggatgaagagcgaaggcaaaaggagaattacagatctcgtctcatggaagagcatgaactgccggattgggtatactctccactaaataaggatgataaggtcaaaatatttgacagtggtagtgttactggaaagcgtaaaagaaatgaagtggtatatgcagatacattaagtgacctacaatggatgaaggctgtggagaacggacaggacatatctaagctttcagtcaaagggaaaagaagagaccacctccctgttgacaaccatgcacaagctagtgatgacatggggacagaagaacggttatttagaagtgaagacactttcgacgtgacacctgcctctaagagactcaagcccgaagaaataaattcccagaaacatgaaaacgaagatgtcagtgttggtggtttgaacgagcatatattttcctggaatactcgtagaaagaagagatcaggctaccttggccagggttcattctctgatagtagagggcagaattcaaatggaagagcaaactggaactgatagttctaatttagtcatggatgccagaaattttccctacatttgtattgtgattctgcttcattgtgtttgtcaaggtaaatggtagattacactcgatcagcaaatgtagataccagcaaattccttctggcagttgtgaagtttatcagtgtgaatgtaaaatctaattgatgaaacacatttccccttgttcatttttcaatctgagagaaagaaagagccatgagagagagcaagagagtgtgagaaaaagacctatgttaaaagtatgaagtgatccttggtaattgtaatggagccctttacatttatgaaatatttagatatttccaacaaaaaagttgggttttcctaatcctc

SEQ ID NO: 29009 - DNA, 441 bp, Glycine max
  Clone ID: TF_GmC78074_1
gctcggaagggggctcgagttggaacttctacaaaactcagagaatatgaacttcagtacatacttcaggacaatggagttcttctcacaacatatgatattgtccgcaacaattctaagtccttacaggggaataattattttgatgatgaggataatgaagaaggcgcaacatgggactacatgatacttgatgagggacaccttataaagaacccaagcacacaaagggctaaaagtttgcttgaaataccaagtgctcatcgcattatcattagcggcactcctttgcaaaataacctgaaggagttgtgggcattgttcaatttctgttgcccagagttgcttggtgaccacaaatggttcaaagaaagatttgaaaatcccatacttcgtggaaatgacaagcatgcttctgacagggagaagcgtgttggttca

SEQ ID NO: 29010 - DNA, 541 bp, Glycine max
  Clone ID: TF_uC-gmrominsoy142a11b1
cctattcgtccgagataacttagatcccttagtgaaacgtgctgttgctgcagcgtctgcagttccagatcttcaagatcgataccacaagatccctagttatattgaatcaaagctattgccatttcagcgagaaggtgttaggtttatattacagcatggaggacgtgttctcttagcagatgaaatgggacttgggaaaactttgcaggcaattcactgcctaatattaaatcatttccatacgtccactgtgcattatgatgcatagcagtgttttgcttctttgcaaacaaacatacaattatttgtgctagaagttaaatcttggcaggatttctgcttttctatctaatatctattggtgggttgtaaattttgttatctatcttctacaaattaagaagtgcatcttagtgtcttagatgctaattggctaatgatagaaaacatcctgaatgatacagtaaaatatgtaacttaattaacaattaacactagtacacataaataacatcagtcacagtagcatcttatgagc

SEQ ID NO: 29011 - DNA, 694 bp, Glycine max
  unsure (1)..(694): unsure at all n locations
  Clone ID: TF_LIB4280-051-Q1-K1-E4
ccacgcgtccggagaaacctgtgtctcaagagagtctagagctggcaagagatcaatgtcatcgtcttcattagccttggtctttgaatcttcttcagggatctgcttctcctgagaaacctgtgtctcaagaaaatgataacgtttgggtgttaattcccgaacttaaagcaaagttgcacgcccaccagaagaaagcatttgagtttctttggcaaaacattgcagggtccatggacccgggattgatggaagcagcatccaaaagaagaggtggctgtgtggtatctcatactcctggagcgggaaaaacttttctcatcattgcttttcttgttagctacttgaagttattcccagggaagaggccattagtccttgctccaaagacaacactctatacttggtacaaggaatttatcaagtgggatattcctataccagtgtatctgattcatggtcgtagaacctaccgtgtattcaagcagaaatcctcgattgttattcctggagttcctaagcccactgatgatgtcaagcatgttntggattgccttgagaagatacaaanatggcattcgcacccgagtgttctgatcatgggttatacttcatttttaacattgatgcgagaggattcanagtttgcacataggaaatacatggcttaaggtattgagggaaagcccctggg

SEQ ID NO: 29012 - DNA, 3711 bp, Glycine max
  Clone ID: TF_GmC143184_2
atgatgcatagaaaaagtcatttacgtcaacggaagcatccattccatgcttgtcccttcgaggcatatttgtctcggtcatggcgagctgtggagctcataaaatttgagtctggaactacgaccctatattttgtagataatcaccatatgaccattaagaaaggctccttttcagacgttcgagttaggtcaaggaaagctactttatcagattgctcctttttacgaactgggattgacatatgtgttctctcagcctctcagggtaatgacaattcagatgaatctagtgctaatcatgtgtggcttgatgctaaaataaattccatacagagaaaaccacataatccagagtgctcatgtcagtattatgtaaacttctatgttaatcaaggttcacttggtacagagctgagaactcttaggaaggaggttaaagtagttggaataaatgaaattgccatcctccaaaagcttgaacgtaatacttgtcaacacaaatactatcgatgggaatcatctgaagactgctccaaagtgccacatactaaattgttaggaaaatttatatctgacctttcatggttggttgttgcatctgctataaggaaggtttcattctgtgcaagatctgtggaaaacaatattgtgtatcaaattttagggagtgatgctacaacctcttcattatacatggattctgaaataagtgttgtgaactttaaagtgaacgaagacggcatgcaaatgcctgttattcatctagttgatttatttgagactgacaccaatacaagcggcgataaacatgattcccactatgatgaagtgccatcatcttatggttttgagggcttacgacgatccaaacgtaggaacatacaacctgaacgttactctgattgtggtaatgtttctgagataaaggttggtaatgttcgaacctggccatacaagttaaacaaaaggaaagatgatgatggtggtggtgaagagtcattgccattagcacaagagaatagtgacaatagtcaaaaggtcaatgaactgagttcttgccgggagattatagtgtaccatgggaggaatgaaacgctggaattaaagtcaggtgaggccaatcaaactcaacttgctagtgttcctcttcttcaagaaggtgattcattagcccttgagcatcatcatctcaatgacaatgttactagaagaagtgatgcatattatagcacccctaagcttaagaggaagagattagttgatctggaagctgatgtagattttgatcctggaagggaaggcataaattccaataaaggagttagcgagaaaagacatggttcatcatggtattcaagaagcagaagccatgctgcagaacacagttataaagacagaagcttaaatgcaactgcctacaaggaaatgatagattcatacttgaaggatgtcaatagaacaccaactacagaagagccacctgtaatggaccagcggaaggaaataggcaactttgggcaaaagaaggaagcagaaatacctgaaagagaggacgaggaacaaatctctgagatcgatatgttgtggagagaaatggaaatggcactggcatcaagttatcttgaagaaacagagggttcaaatagtgccaattttgccaagactacggaagaatctaatcgcacttgtccgcatgattacagattgtctgaagaaattggaatttattgctacaaatgtggctttgtgaaaaccgagataaaatatattacgccacccttcattgaaatgcaacgctcagtgaggcaccaagaggaaaagcaatgcaatggaaaagatacaaaggaaaaggctagtaaagatgatgatttccatctgctctcaactcatgctcctacagatgaacataactctatggaacatgataacgtttggaagttaattccccaatttagagaaaagttgcatgaccaccaaaagaaggcttttgaatttctttggcaaaatattggagggtctatggagccaaaacttatggatgcagaatccaaaagaagagggggttgtgtgatatctcatgctcctggagctggtaaaacttttctcatcattgcatttctcgttagctatttaaagctattcccagggaagaagcctcttatccttgctccaaaaggcacactttacacttggtgcaaagaattcaacaagtgggaaatttctatgccagtgtatctgattcatgggcgtggtggaactcagaaagatactgagcaaaattcaattgttcttcctggttttccaaatccaaataaatatgtcaagcatgttttggactgcttgcaaaagataaaactgtggcaagagaaaccaagtgttttggtcatgagctatactgcatttttagcattaatgagagagggttcagagtttgcacacagaaaatatatggctaaagcattgagggaaggtcctgggatcttgatacttgatgaagggcacaatccaagaagcaccaagtcaaggttgaggaaagggttgatgaaactgaaaacagatctaagaatactactttccggtacattatttcagaacaatttttgtgaatacttcaacacactttgcttggcaagaccaaagtttatctccgaagtgcttgatacattagacccgattaccagaaggaaaagcaaaacagtagaaaaggcaggtcatttgctagaatcacgagctagaaaattgttcttagataaaattgctaagaaaattgactcgggtattggaaatgagaggatgcagggtctaaacatgttgagagaaaccacaaatggttttgtagatgtttatgagagtgaaaattttgatagtgctcctggtttacaaatctacacgttgctaatgaatacaactgacaagcagcgtgagattttgccaaaactacacacgagagtggacgagtgcaatggttaccctctagagctagagcttttggtaactcttggatcaatacatccatggttggttaaaacaacctcatgcgcaaataagtttttcactgcagaccaattgaagcagctagacaaatacaagtatgatatgaaagcaggatcaaaagttaaatttgttctgagccttgttttccgtgttatgcagagagagaaagtacttatcttctgccacaaccttgcacctgtgaagttattgatagagttatttgagatgttcttcaaatggaaaaaagatagagaaattctgctgcttagtggggaactagacctctttgaacgcgggaaagtgatagataagtttgaggagcatggaggagcatcaaaggtactccttgcttcaattacagcttgtgctgaaggcattagtttaacagcagcttctagagtgatttttttggactcagaatggaatccatcgaaaacaaaacaggctattgcacgggcttttcgtcctggtcaagaaaaaatggtttacgtttatcagctcttggtaacaggcacattggaggaagataagtacaaaagaaccacttggaaagagtgggtttctagcatgatttttagtgaggcttttgaggagaacctttcacattcgcgagcagtgaacattgaagatgatatactgagggaaatggttgaggaggacaagtctaaaacaattcatatgattctaaagaatgaaaaggcttcaacaaattga

SEQ ID NO: 29013 - DNA, 2396 bp, Glycine max
  Clone ID: TF_GmC290_1
ggctcgagaaaagattctctggagagtcaaaattttactgatgtgaggagaagctctaatggttcaggtactggtggacgggagaaagctattgtgtcttctcagtggacgaggatgctagatttgcttgaagcgtgtctcaggaattcttcgattaactatagagggcttgatggaacaatggcagttgttgcaagagataagagctgttaaagattttaacacttgtcccgaggaaaccgtgattactatgtctttgaaggccgccagacttggtctcaatttggtggtagcttgccatgttcttatgctagatttatgggggaaccctacatctgaagaccaagctttagatacagcacatcggatggcgcacactcgtgctgtgactggctcgaggctaagcgaagatggtgtttgtcagggactcctatccagaatgcaattgatgatctctacagttacttcagatttctaagatatgacccttattctgaccatgcatcattttgtactagaattaagaacccaattagcagaaatccagcaaacgggtatagaaagttgcaagctgtcttgaagacaataatgttacgccggaccaaaggtacacttcttgacggggaacctattatttccttgccgcctaagtatatagagctgaaaaaagttgatttttcaatggaggaacgtgatttctattccaaactagaggctgattcacgtgcacagtttcaggaatatgctgatgctggaactgtcaagcaaaattatgtcaacattttgctgatgcttctgcgccttagacaagcttgtgatcaccctctgcttgtcaagcgatacaattcaaactctctatggagatcttcggttgagatggcaaagaagcttcctcaggaaaaacaaatctctcttctgaaatgtttagaggtttccttggccctctgtagcatttgtaatgatcctcctgaagatgcagttgtctcagtttgtggccatgttttctgtaaccaatgcatctgtgaacatctttctggtgatgacaatcagtgccctgctgcaaattgcaaaagtcaactgagcacatcaatggtattttcaaaagccacactgaacacttgtctttctgaccatggttgttatatttcacccatttatggtggtactgtagcagaagaaactgagccttggtcagaaagtaagccatatgattctctaaaaatgaaggcggcacttgaggtattgagagcaatatagaagaagatcgtgtactaatcctgcagtaatagaaaagatagaagtttgcgtctgcatttggagaggatggaactggcgatcgtcagactcgcctcactgtggatgatttaaaatatttgttcatgatgtgattagacgtacatatttacagatataatctacattttttggattggtgattttttgacctgggggcagatgtcatcttgagtttctttccggtgactgctgacgaaacagaaacagaacatttctagcaagggattggaagtggtaacaaggttgctagtaacttttgacattaagattatatgaagaaatgtttatatgtttagaatgagatgttcattctttgacatggaaattttagtttaatctcacgtatagctagccttgagagtatggtagcttaaagtggaatcctcaaactgaagaccaagcaatagatagagcacatcgaataggccagactcgtcctgtgactgttttgcggttaactgtgagagatacagttgaagatcgtattctagctctgcagcaaaagaagagaatgatggttgcatctgcatttggggaggatggaactggtgatcgtcagactcgcctcactgtggatgatttaaaatatttgttcatgatgtgattagacgtacatatttacagatataatctacattttttggattggtgattttttgacctgggggcagatgtcatcttgagtttctttccggtgactgctgacgaaacagaaacagaacatttctagcaagggattggaagtggtaacaaggttgctattgacttttgacattaagattatatgaagaaatgtttatatgtttagaatgagatgttcattctttgacatggaaattttagtttaatctcacatctttgtaggatgtagagagcagtagcatatatagcaacacacagaagatttttatggattgttcttttcactgtaaataatagaaatttttgctttaccgttttgttcctttttatttctccatttcgtgttcagtttttaagtgcaatgtcaccgcaggtgaaaatcgatatccatgtataccttgagattatctcgaactgaacaattgtgaatgtttttgtaaagctgcattttgtcgaat

SEQ ID NO: 29014 - DNA, 664 bp, Glycine max
  Clone ID: TF_GmC737624_1
gtatgggttgtacaagaacaatcatggaggcatacttggagatgacatgggtcttggaaagaccattcaagcaatagcatttcttgccgccgtctttgctaaagaaggacattctactctaaatgaaaaccatgtagagaaaagagatcctgcattaataatttgccccacttctgttatccacaactgggagagcgaattctccaagtggtctaacttcagtgtttccatttatcatggtgcaaaccggaacctgatatatgataaattggaagcaaatgaagtggaaatactcattaccagttttgacacatacaggattcatggaagttcgttgttagatattaactggaacattgtgattatcgatgaggctcatcgacttaagaatgagaaatcaaaactctataaagcatgtttagaaattaaaaccctaagacgctatggtctcactgggactgcaatgcaaaataagatcatggaattgttcaatctctttgattgggttgcacctggatcccttggaacacgggaacattttcgtgagttctatgatgaaccccttaagcatggcccgaggtcaactgcttctgataggtttgccaaattgctaataagagaaaacaccaccttgggtgagttctttattaaatatctgttgaga

SEQ ID NO: 29015 - DNA, 3968 bp, Glycine max
  Clone ID: TF_GmC143184_1
atggaggcaagtgttcttcttggaaacagttatggggtggtagctcgcgtggctgtggcgggtcttcgtggtggagtgatgggttcggccatatctcccttcgaggcatatttgtctcggtcatggcgagctgtggagctcataaaatttgagtctggaactacgaccctatattttgtagataatcaccatatgaccattaagaaaggctccttttcagacgttcgagttaggtcaaggaaagctactttatcagattgctcctttttacgaactgggattgacatatgtgttctctcagcctctcagggtaatgacaattcagatgaatctagtgctaatcatgtgtggcttgatgctaaaataaattccatacagagaaaaccacataatccagagtgctcatgtcagtattatgtaaacttctatgttaatcaaggttcacttggtacagagctgagaactcttaggaaggaggttaaagtagttggaataaatgaaattgccatcctccaaaagcttgaacgtaatacttgtcaacacaaatactatcgatgggaatcatctgaagactgctccaaagtgccacatactaaattgttaggaaaatttatatctgacctttcatggttggttgttgcatctgctataaggaaggtttcattctgtgcaagatctgtggaaaacaatattgtgtatcaaattttagggagtgatgctacaacctcttcattatacatggattctgaaataagtgttgtgaactttaaagtgaacgaagacggcatgcaaatgcctgttattcatctagttgatttatttgagactgacaccaatacaagcggcgataaacatgattcccactatgatgaagtgccatcatcttatggttttgagggcttacgacgatccaaacgtaggaacatacaacctgaacgttactctgattgtggtaatgtttctgagataaaggttggtaatgttcgaacctggccatacaagttaaacaaaaggaaagatgatgatggtggtggtgaagagtcattgccattagcacaagagaatagtgacaatagtcaaaaggtcaatgaactgagttcttgccgggagattatagtgtaccatgggaggaatgaaacgctggaattaaagtcaggtgaggccaatcaaactcaacttgctagtgttcctcttcttcaagaaggtgattcattagcccttgagcatcatcatctcaatgacaatgttactagaagaagtgatgcatattatagcacccctaagcttaagaggaagagattagttgatctggaagctgatgtagattttgatcctggaagggaaggcataaattccaataaaggagttagcgagaaaagacatggttcatcatggtattcaagaagcagaagccatgctgcagaacacagttataaagacagaagcttaaatgcaactgcctacaaggaaatgatagattcatacttgaaggatgtcaatagaacaccaactacagaagagccacctgtaatggaccagcggaaggaaataggcaactttgggcaaaagaaggaagcagaaatacctgaaagagaggacgaggaacaaatctctgagatcgatatgttgtggagagaaatggaaatggcactggcatcaagttatcttgaagaaacagagggttcaaatagtgccaattttgccaagactacggaagaatctaatcgcacttgtccgcatgattacagattgtctgaagaaattggaatttattgctacaaatgtggctttgtgaaaaccgagataaaatatattacgccacccttcattgaaatgcaacgctcagtgaggcaccaagaggaaaagcaatgcaatggaaaagatacaaaggaaaaggctagtaaagatgatgatttccatctgctctcaactcatgctcctacagatgaacataactctatggaacatgataacgtttggaagttaattccccaatttagagaaaagttgcatgaccaccaaaagaaggcttttgaatttctttggcaaaatattggagggtctatggagccaaaacttatggatgcagaatccaaaagaagagggggttgtgtgatatctcatgctcctggagctggtaaaacttttctcatcattgcatttctcgttagctatttaaagctattcccagggaagaagcctcttatccttgctccaaaaggcacactttacacttggtgcaaagaattcaacaagtgggaaatttctatgccagtgtatctgattcatgggcgtggtggaactcagaaagatactgagcaaaattcaattgttcttcctggttttccaaatccaaataaagatgtcaagcatgttttggactgcttgcaaaagataaaactgtggcaagagaaaccaagtgttttggtcatgagctatactgcatttttagcattaatgagagagggttcagagtttgcacacagaaaatatatggctaaagcattgagggaaggtcctgggatcttgatacttgatgaagggcacaatccaagaagcaccaagtcaaggttgaggaaagggttgatgaaactgaaaacagatctaagaatactactttccggtacattatttcagaacaatttttgtgaatacttcaacacactttgcttggcaagaccaaagtttatctccgaagtgcttgatacattagacccgattaccagaaggaaaagcaaaacagtagaaaaggcaggtcatttgctagaatcacgagctagaaaattgttcttagataaaattgctaagaaaattgactcgggtattggaaatgagaggatgcagggtctaaacatgttgagagaaaccacaaatggttttgtagatgtttatgagagtgaaaattttgatagtgctcctggtttacaaatctacacgttgctaatgaatacaactgacaagcagcgtgagattttgccaaaactacacacgagagtggacgagtgcaatggttaccctctagagctagagcttttggtaactcttggatcaatacatccatggttggttaaaacaacctcatgcgcaaataagtttttcactgcagaccaattgaagcagctagacaaatacaagtatgatatgaaagcaggatcaaaagttaaatttgttctgagccttgttttccgtgttatgcagagagagaaagtacttatcttctgccacaaccttgcacctgtgaagttattgatagagttatttgagatgttcttcaaatggaaaaaagatagagaaattctgctgcttagtggggaactagacctctttgaacgcgggaaagtgatagataagtttgaggagcatggaggagcatcaaaggtactccttgcttcaattacagcttgtgctgaaggcattagtttaacagcagcttctagagtgatttttttggactcagaatggaatccatcgaaaacaaaacaggctattgcacgggcttttcgtcctggtcaagaaaaaatggtttacgtttatcagctcttggtaacaggcacattggaggaagataagtacaaaagaaccacttggaaagagtgggtttctagcatgatttttagtgaggcttttgaggagaacctttcacattcgcgagcagtgaacattgaagatgatatactgagggaaatggttgaggaggacaagtctaaaacaattcatatgattctaaagaatgaaaaggcttcaacaaattgaagagaggagcttgcgcgatacttgaaacaggagcagggacagtggaaaataaaggagccatagcgccatctgcttgcttatgtaatgtaacccaatctgtctatatttcaatacacaccccattacgataaaattatgctagggcttaatttgaattgatttctattttatcggaaattttcaacagaaaaaagtatttgaatttaattttcaag

SEQ ID NO: 29016 - DNA, 276 bp, Glycine max
  unsure (1)..(276): unsure at all n locations
  Clone ID: TF_701010777H1
gcaggatctatctcagccaaagtcagaagttagtccaccagaaggattgctgngcagttcctcttttaagacatcancagaattgctttatcatggatggttcaaaaggaaacatcaagtttatattgctcaggaggaattcttgcagatgatcagggacttggaaaaacagtatcaactattgcattaatattaaaggnnagacctccattcacttaatgggtgcaccaatgcccganaaagtgaattggnaactctgaatctggntgtggatga

SEQ ID NO: 29017 - DNA, 2124 bp, Glycine max
  Clone ID: TF_GmC27_1
cttatgatgatcatgcagtatcaagtaagaaaaggaaatgccctcctagttctaaaagtggaaagaagggattggacagtgcgatgcttgaggctgttgctcgtcctcttgcaaaagtggcttggtttagagttgtcctggatgaggcccagagtataaagaatcacagaactcaagttgcaagggcctgttggggtcttcgagccaagcgtagatggtgcttgtcagggactcctatccagaatgcaattgatgatctctacagttactttagatttttaagatacgatccttatgctgtgtacacatcattctgttccacaattaagatccctatcagcagaagtccatcaaaaggatacagaaagctacaagctgttttaaagacaataatgttacgtcggacaaaagccacacttcttgatggggagcctatcatttccttgccacctaaatctgtggagttgaaaaaagtggaattttcaccggaggaacgagatttctattccagactagaggctgattcgcgagcacagtttcaggaatatgctgatgctggaactgtgaagcaaaactatgttaacattttgttgatgcttttgcgccttagacaagcatgtgatcatcatctccttgttaagcgtgacaattctaagtcgctctctaaatcctcatttgaggctccgcaaaacaattcttcgaaaataaagtctggacttgagatgtttcagttggtgtcttaaccacaatgtggtacttccaaaaacaattctgaacatactgctttttgagatggtgctgatggcctttgtagttagtgtactggtgatgtaatgaatgaagctatagagttttcccaggggacaaacatgaaagatatactaagcacgccttcagtgttttccaaagtcacactgaatagttctttttctgatcaggctggtgataatttgcctgattactctggttgtgaagtggaggaatctgagtttttttctcaggctcagccatgttattcttcaaaaattaaggctgcacttgaggtgttgcagtcgttgtctaaaccacaatgctttgcttcccaaaacaattctgtgcagagcacttctggggaaagtactgatggccttggtagttcatctagtgctgacagaatgaaatccttgaatgaaattcctgagagtcaaaatgtgctttgaggagagaagctctaataattcagttggtgtaggggagaaagctatagtgttttctcagtggacaaggatgctagatatacttgaagcatgtcttaagaattcgtcgatccagtatagaagactggatggaacaatgtcagtcactgcaagagataaagctgttaaagattttaacactctccctgaggtttcagttatgattatgtctttaaaggctgctagtcttggtctgaatatggttgctgcctgccatgttcttatgctagatctatggtggaatcctacaactgaagatcaggcaatagaccgagcacatcgaattggacaaactcgtcctgtcacagttttacggttaactgttagagatacagttgaagaccgtattttagctctgcagcaaaaaaagcgaaaaatggttgcgtctgcctttggagaggatggaactggtggttgtcaaagtcgccttacagtggatgatctaaaatacttgtttatgatgtgattagacatatatccatacagatatataattttaattttttggattggtgattttttttttctgggagcaggtgtcagtgggttgttcttttggggggaagcagaagaaacagggtgctgaaaattttgtagcatggcctctgttgacactcgacatgaagattatatgaattgtcttttatagagagatgattcaattgtttaccttgaaattttggtttagttgttaacatttgtataggttgtagagagtagtagcatagacagaaacatagaaattgtgctcattgtaaatattatagatagataatatctcttttccttttccaatcttaatctatttcgtttcttttaattttcaggtggttttgacttttcattttaaagtgaaccttctgataataaagtgcacttgttgaatttc

SEQ ID NO: 29018 - DNA, 1195 bp, Glycine max
  Clone ID: TF_GmC358725_1
ttcggctcgagtccaaaatccaatagagaatggacagcacaccaattcaactctgatcgatgtgaaaattatgaaccagaggtctcatatcctctatgaacagttaaaaggctttgttcaaagaatggacatgaatgtggtgaagaaggatctaccacccaaaactgtcttcgtgataactgtcaagctatctcccttacagagaaaattgtacaagagattccttgatgtgcatgggttcactactcaggtgcatcctgaaatgttaaggaagagatgtttttttgctgggtaccaggcattagctcggatatggaaccaccctgggatcttgcagttgacaaaagaagtcaaggactatgtaaaacacgaagatgctgttgagaattttcttgtggatgatagttacagtgatgagaattctgattataatgtacttgctggaggtaagtcttcatgaataggatacgtaggtacctgttcttttatgcttctaatatttgttttgtttattgattaatatagttattacttgattgaactgtctaatttcagtgagttttttttttctgtttgtactttcttaatcaattattattgttagttttattgtaagtgatgaaagctgtatttgtttctgtataaatattgagataatacacttagcagggacttatattgaggaactattggttctaaaaatgtatgaacatagttcagttgtctttagtgccatcgattttatgatggaacaaatactttctctttgttttggaggcacaataagaactggtcaaatttcttttctgatggatttcctaattttactatttttttgaatgtttgtgaaagtacaaatgagaaaagggaactataaagcatagtatgtgaagagcaagggatatggtatttataggctttatattttataaatttatataatttgtaaagtcttcaggaattagtttcctgtttttcaaacattatgttattgttggctttgcaatttcatagttccagtgacattatgtcaacaataaaatttggtgtccaagcttagtctcagctttaccttacagcacttacaataggctgaatagcatgatgaatgccaatgctgtttttatatcctcatgcttggtgctagaaagttatgttttttaccttagaaattagagtttcaggtagtttctaa

SEQ ID NO: 29019 - DNA, 457 bp, Glycine max
  Clone ID: TF_GmC122791_1
cggagaatatgtatgtcagatgtgctctgaactaatacaagctactgaatctcctattgcctctggtgccactctcatcatctgcccagctcctattttgccccagtggcatgacgaaattatacgccatacacatcagggctccttgaaaacttgtatttatgaaggtgtgcgagacacatctttttccaatacgtctctgatggatatcggtgatcttgccagtgctgacattgtattaactacatatgatgtgcttaaagaagatttgtcccatgattctgataggcatgaaggtgatcggcactttctgaggtttcagaaaaggtttgctccaaagagtgccatattcctcctttgtcaatatatatttatatcatatgtaggatattttacctatacatttctagatgagtttgaaattcaccgttcttttcattcatcaagttttcatttt

SEQ ID NO: 29020 - DNA, 640 bp, Glycine max
  unsure (1)..(640): unsure at all n locations
  Clone ID: TF_LIB4167-057-R1-K1-E8
cccgcgtccggactccctcgattgattgtttcttattatatgtccaccaaattgatttctattatgtgtgttgtctggtattttgtttgctttggttttcttgtttgtttgacaattcccctcccctctccctccctgttttgtagggctttgcttcatttccttgatccagacaagttcaggagcaaggatgaatttgttcaaaactataaaaatctgagctcttttaatgagaatgagcttgcaaatctgcatatggaattgagacctcacatacttcgaagagttatcaaagatgtggagaaattattaccccccaaaattgagcgtatccttagggttgaaatggcgcctcttcagaaacagtattataagtggattttggaacgtaattttcacaatttgaacaaaggagttcgtgggaatcaggtttctcttttaaatattgtggtggaattaaagaagtgctgcaaccatcccttcttgtttgaaagtgctgaccatggctatggtggggactcangaagtagtgacaacagtaaactagagaggaatggttttagcagtggcaagcttggcatacttgacaagctccttgttaaattgcatgaaaccaagcatcgngggtttgattttctct

SEQ ID NO: 29021 - DNA, 1979 bp, Glycine max
  Clone ID: TF_GmC291_1
ggctcgagattgacgctgacatgaacaatagagggaaggggcgtctgaagtatctcttgcagcagactgagctgtttgctcattttgcaaaaggggatcaatcttcgtctcagaagaagtcaaggggaaggggtcgccatgcatccaatttcaccgaggaagaagaagatgaagaatacctaaaaggagaagaagatggtctagcaaacacacgtctggtgacacaaccatcatgtatccaagggaaaatgagggattaccagctggctggactaaactggctcatacgattgtatgagaacggaataaatggaattctggctggtgaaatggggcttggtaaaacattgcaaactatatccttattaggttatttgcacgagttccgaggaatcaaaggtcctcatatggtggttgctccaaaatctactcttggaaattggatgaatgagattcggcgcttttgtcctgttcttcgtgcaatcaagtttcttggcaaccccgatgaaaggagacatatcagagatgaattgttggttgccgggaagtttgatgtttgtgtcacaagttttgaaatggcaatcaaggagaagtctgctttgcgtcgatttagttggcgctacataattattgatgaagctcatcgaatcaagaatgagaattccttgctgtccaaaacaatgaggctctacagtacaaactatcgtctccttattactggcacaccacttcagaataatcttcatgaactctggtctcttctcaactttcttctgcccgaaatttttagttctgctgaaacttttgatgaatggtttcaaatctctggtgaaaatgaccaacaggaggttgttcaacaattacacaaggtcctccgcccatttctccttcgaaggttgaagtcagatgttgagaaagggttgccaccgaaaaaggaaactattcttaaagtaggcatgtcccaaatgcagaaacagtattatagagcactacttcagaaggatcttgaggttgtaaatgctggtggagaacggaagcgtctcctgaacatagctatgcaactacgcaaatgttgtaatcatccatatcttttccaaggtgctgaacctggtcctcccttcactacaggagatcatcttattgaaaatgctggtaaaatggttcttttggataagttacttcctaaattgaaagagcgcgattctagggtccttatattttcacagatgactaggctgctagacatactcgaagattatttaatgtttcgtggatatcaatattgtcgcattgatggaaatactggtggggatgatcgagatgcttccattgatgctttcaacaaaccaggaagtgagaaatttgtcttcttgttatcaactcgtgctggaggtcttggtattaatcttgctactgctgatgttgtcattctgtacgatagtgactggaacccacaagttgacttgcaggctcaggatcgtgctcataggattggtcaaaagaaagaagttcaagttttccgtttttgtactgagtatacaatagaagagaaagtcattgaaagggcctacaaaaagcttgcacttgatgctctggtgattcagcaagggcgattggctgagcagaagacggtaaataaagatgaattgcttcaaatggttagatttggggctgaaatggttttcagttccaaggatagtacaattacagatgaagatattgatagaattattgctaaaggagaggaggcaactgctgagctagatgccaagatgaagaaatttactgaagatgccatcaaatttaagatggatgacactgccgaattatatgattttgatgatgagaaggatgaaaacagatttgatataaaaaaaattgtgagcgagaactggattgaaccaccaaaaagggagcggaaacgcaattactcggagtctgaatacttcaagcaaacaatgcgccaggtgtctacaaac

SEQ ID NO: 29022 - DNA, 765 bp, Glycine max
  unsure (1)..(765): unsure at all n locations
  Clone ID: TF_LIB4280-053-Q1-K1-G10
ccacgcgtccggtataaggctcgtgaggctgctatggcagttcaaggaaagatggtagattctcagcgtaagaagagcaaagcaagtttgcggaagcttgaggaacaacctgaatggttgaagggtggaaagctccgtgattatcaacttgagggtctgaattttcttgttaacagctggagaaatgatacaaatgtcattttagccgatgaaatgggccttgggaaaactgttcagtcagtatcaatgcttggttttctgcagaatgcccagcaaatccatggtccttttcttgtagttgttccattgtccactttatcaaattgggccaaagaattcaggaagtggcttcctgatatgaantattatcatatatgttggtacctcgtgcaangtcgagaaggaatttagcaccaatgaaccaagttgcttatcacncggtacttcctctacagnnaacagtgtggaagaacctatggnngctttgcttcanntttccttgatccagnacaangttcaggaaagcaaggatgaaanntttgttcaaaactattaaaaatcntgagctcttttttaatgagnnaatgagcttgcaaatctgcatttatggaattgagacctcacatacttcggaagagttatcannnagatgtggagaaatcattaccccccaaaattgagcgtatcctttagggttngaaatgtcgcctcttcagaaacagtatttataagtgggatttgggaacggtaattttcacaatttga

SEQ ID NO: 29023 - DNA, 1348 bp, Glycine max
  Clone ID: TF_GmC6683_1
gaacaatcagaatctgaacgggacttttatgaagccctgtttgagagatctaaagttcaatttgatcagtatgtcgcacaaggaaaggttcttcaccattatgcaaatatccttgacctactaatgcagttgaggcggtgttgtaaccatccatttttagttatgtgcggaagcgatacccagaaacgtgcagatttaagcagactcgcaagaaaattctttcagactaatactgaattccccgatgaaagcaatcaaaatgatccacggcagcaagcagagttgaacaaacttgcaagtagattacttctaaaatctgcttcttctttgcactcggttcaacctcatgcatacattgccgaggttttggagaatattcaaaagggtgacatcatagaatgctctatatgtatggaatctccagaagatcctgtgtttacaccatgtgcgcataagttttgtagagaatgtctatttagttgctggggcacctcagtgggtggcaaatgtccaatctgtcgtcaattgctccagaaagacgatctgattacttattcatctgaaagcccattcaaggtcgatattaagaacaatgtgacagagtcttcaaaggtttcgaagctatttgaattcctgcaacgtattctgaacacatcaagtgaaaagagtatcgtcttcagtcagtggacatcattttttgatctgttggagaatccattgaggaggagaggaattggtttttttgagatatgatgggaagttgactcagaagcagagggagaaagttctggatgaattcaatgagacaagagagaaaagggttttgttaatgtcactaaaagctggtggtgtgggtttgaacttaactgcagcctcaaatgttttcattatggatccatggtggaaccctgcagttgaggagcaagcaataatgagaattcatcgcataggacaaaaccgaagagttgtagtgagaagattcatcgttaaggacacagtggaagatcgattgcaacaagttcaagctaggaaacaaaggatgatatctggtaccctcaccgacgatgaggttcggactgctaggattcaagacctcaaaatgcttttcacatgagatatgagataatttatttatttagaagctgatttatttctctagattcttagacctgggaagccaattttgtataggttgtcggatcctttctacaagctaaaggcttccttttcttttgtgtacatacatgaaatgatgatatgatcattctgaactctaaaaggaagcccactgttttgtaaatcatgaggctttagtggttatggtaaaagggttaatttcattttggtc

SEQ ID NO: 29024 - DNA, 1190 bp, Glycine max
  Clone ID: TF_GmC972_1
gttgaaacccaagcacaaggcgcaggtgattcttttctgaatacctatatagcagtgtataattgtttctgacattagttcatatattattcggaatataagacttcggtatgttgccggcaaagacgagaaggaggcagcgttgaatctttgctaaatacctgtgtgtcaaagttcaaattattgcgagttttggatttaaggaattcgacatgcaagactttgccacgttccattgatagttgaagttgtttgctgcaggttgactccactacagtcaaacctatataaacattttatacaatccaaaaatgttaagcgggcaattactgaagaactgaagcaatcaaagattttggcctacgtaacagctctcaaaaagttgtgcaatcatccaaaggttcctataaatgctgctggtttgatcagatataactggtgccaccccttttttggtaaaattatcatccatctcatgaatatgataatatatagctcactgctgcagctgtgaaagattggaggttcctatatcaatatccttttgggttgagtaggttcctataaattctactggtttgatcagatataggtggtgccaccccttttttggtaaaattatcgtccatgtcatgaatatgataatatacagctcattgctgcagatgtgaaagattggagatactggaaggacttcttgaactactacagaataaagaatgtgctcactggaaagctaagtatgtatctggctggatctaaatgatccaactatgcctttgaatgtcagaaactgcatgcagttagcttgatactccctagaaataccggtattttatgactgatattgctcatacttaaacaatgatccttagctttgacctaatatatagcctacttaataactcaaatttttcataatagttaaatgaaaaccgcagacagtttcatgcatgatgtatcatttacaataaagcattctttatgcttatgcacccttttttattttgttgagtacttcctgacgaggttagcattaatatttgtaaaaggccggtcaattatgtaggatttgtattacgaaaattctgaacaattgatttttgttctaacagttattagtttcagactcttatacatattcaaaatggtattggtagaagaaagtttaaccaaccttcttttttatt

SEQ ID NO: 29025 - DNA, 1536 bp, Glycine max
  Clone ID: TF_GmC27_2
aattcggctcgagatcagcagaagtccatcaaaaggatacagaaagctacaagctgtcttaaaaacaataatgttacgtcggacaaaaggctcacttcttgatggggagcctatcatttccttgccacctaaatctgtagagttgaaaaaagtggaattttcacaggaggaacgagatttttattccaaactagaggctgattcccgagcacagtttcaggaatatgctgatgctggaactgtgaagcaaaactatgttaacattttgttgatgcttttgcgccttagacaagcatgcgatcatcctctccttgtcaaacgttacaattctaactctctctggaaatcctcagttgagatggcaaagaagcttcctcaggaaaaacgattatgtcttttaaaatgtttagaggcatcattggccctctgtggtatctgtaatgaccctcctgaagatgctgttgtttcagtttgtggtcatgttttttgtaaccagtgcatttgtgaatatcttactggtgatgacaatcagtgccctgctccaaactgcaaaactcgactaagcacgccctcagtgttttccaaagtcacactgaatagttctttttctgatcagccttgtgataatttgcctgattactctggttgtgaagtggaggaatctgagttttgttctcaggctcagccatatgattcttcaaaaattaaggctgcacttgaggtgttgcagtcgttgtctaaaccacaatgctttgcttcccaaaacaattctgtgcagagcacttctggggaaagtaccgatggccttggtagctcctctagtgctgacagaatgaaatccttgaatgaaattcctgagagtcaaaatgtgcttgaggagagaagctctaataattcagttggtgtaggggagaaagctatagtgttttctcagtggacaaggatgctagatatacttgaagcatgtcttaagaattcgtcgatccagtatagaagactggatggaacaatgtcagtcactgcaagagataaagctgttaaagattttaacactctccctgaggtttcagttatgattatgtctttaaaggctgctagtcttggtctgaatatggttgctgcctgccatgttcttatgctagatctatggtggaatcctacaactgaagatcaggcaatagaccgagcacatcgaattggacaaactcgtcctgtcacagttttacggttaactgttagagatacagttgaagaccgtattttagctctgcaggtgtcagtgggttgttctttttggtggaagcagaagaaacagggtgctgaaaattttgtagcatggcctctgttgacactcgacatgaagattatatgaattgtcttttatagagagatgattcaattgtttaccttgaaattttggtttagttgttaacatttgtataggttgtagagagtagtagcatagacagaaacatagaaattgtgctcattgtaaatattatagatagataatatctcttttccttttccaatctt

SEQ ID NO: 29026 - DNA, 4275 bp, Glycine max
  Clone ID: TF_GmC157_1
ggctcgagccgcaacttctcaaattcatgactttgtcttgttcctagccaaagaagcaatgacagctcatgatatatcttctgatggagatggaataagccaaaagatgaaggagttctctgttacttttaataaagttacatgcaatgaagcaagtttgctgcagttcgttcttgacctgtctaatgttctagccaaagcaagtgaatttagatttaatatccttggttataagggtagagaagctgaaactaatagtcctgattgcatagataagattgctctgccagaaaataagttagttcaagacaattcacccacggggccgtttcaaaatggtcgttcacatattcttaatccctgttctgatcctgagattcctgatgatggaaatttggccccaggctatgaatcaaatgccacgtcacagaagttctcaatggaggactttgaagaattgaaattagagaaagagaaggcagttgttgatctgtcaaagtgtgttgaaaatcttgaaatgacaaagtctcgattactagagacagagcaacatctagctgaagttaaatcacaattggcttctgctcaaagatcaaacagcctggctgagacgcaactaaaatgtatgacagaatcatacaggtcaattgaagcacgcacaaaggagtttgaaactgagcttaatcatctgcgaatgaagacagaaactctggagaatgaacttgaagatgaaaagagggctcatgaagaagctttggctaagtacaaggagctagaagaacaactacaaaggaatgagagctcagctgctgataatgacattaagactaagcaggagagagacttggaagctgctgctgaaaagttagctgagtgtcaggaaaccatatttcttcttggcaagcagttaaaatcgatgcatcctcaaacagagccaacggggcctccttattcaaaggctgaaggcttcgcagagcgtgaacctaatagcccaaattttcaggatcaagcagagatggacagtgctagttctgcatttgtgcaaagactgggtggagagtcccccttacatttttctaacagtttatacagtccatcagataatgagtcaaactttccagccatatcttctgtacagaatccaaaccacaggcctacaaagtcaacctcttcgtcagcttcttccactcctacaccggagaaacacaaccgaggtttcagtagattcttttcatcaaaaggaaaaaacggtcattgagcatgcatgaccgatgggaattcttgacttaagggaccacacagcaatggcatttggaaagcatcaaggttcaatccgcttcatgatttaacagaattgagtttttaggaggtttgtgtagttaaaggacaggatgccatgaatatcgggtgattcttgtatctaatggttgtacatggtaaacatgtcttttcttcttttcctttccattgttttgttctctgttctgtaatttaattagcaaacattgacatagcctctgaactattacaggatatgttgaatattgttgtatttcacaaatttatgcagcataccttgattctttaccaaagacaacttaaaataaaaaaaaaaaaaaagggcggcgctcgcgaactagacccacgcgtacgacggcgagaagacgacagaaggggacaaaaccgaacccaggcacaaaatccatttcactcttcataaatagagaaagagaaagaaaggggaaaacactgttttcactgaccaattatcttcgtctctctctcgattcttccaaacggtgcttcgatcggaaaccctaactttcacttacgtccgtcaatggagcttcgttctcgtcgacgcctctccaatccttcagtttccgggaaggagcaaccacctggggatgatgctgttggggaagatgaaactactactggcaagggcagtaacaataaagataaaggtgttgctgttatatcatcaaattcagatatagtttctggtcctgattcagattctgattacgaagatgaagaatttggtgttggctccttacctgacttgaatcaagatccttcaagcattagtttttctagtggagaagattatgcttccgattcatctgatggtggcaagtctttgtacaaaaggggaaaggcgctgctgtccagagggaaaagaaaaagtttcaacactgaatatggggaaccgagtgacgtggttagagtagcggagtacaaagatgatgatgctcaatttgcaatctttcaggaactatcagttccgtctgtttctaagggtactaagaggaggaaatattcaagaaaaggaagaaaaggagattcaaagtctgtgttgttgtggaatgcgtgggaagaggagcaagagaaatggattgataggcatatgttagaagatgttgacttggataatcatagtgaggtaatgaatgaaactgctgacataccctctgatctgacaatgcctttacttagatatcaaaaggaatggttagcctgggctttgaaacaggaaagttctgcaagtaaaggtggaatacttgcagatgaaatgggaatggggaagactgttcaagcaattgctcttgtcctcgccaaacgtgaatttgaactaggttgtgaaccagatcaatccataccatgttcatccagcctgaagcctgcgatcaaaggaacgcttgtcatatgtcctgtggttgctgtcactcagtgggttagtgaggttgatcgctttactttaaaaggaagcaccaaggtgctgatttatcatggggcaaatagagggaggagtgggaatcggtttgcagattatgattttgtgataactacgtactctgttgttgagagtgagtacaggaagcatatgttgcctccaaaagagagatgcccatattgtggaaaattatttttgccgaataagttgatgtatcatcagatttatttttgtggtcctgatgctgttagaacagaaaaacaatcaaagcaagctaagaaaaagaaaagagaagttaccaaggggaagaccaagagaagttaccaaggggaagaccaagaaatctgacagtaagatatcaaagagttctaacacgaaaaaggaagaggaaatgtggatggatgaagaagatttagatgcacctgtgcgtagcgataggtcaattcttcatgctgtgaaatgagcggaatattggacgacagaaaggggaagcgcagttcgttccacgttgttgttcgctctgtgtctctcactctctctatatttgcatcattcatcggaaatggctctcgaggttgctgttaaggctgctgttggggctccaaatgttctcggagattgtccattttcccaaagggtcctcttaactttggaggagaagaaaatcccttacaaactccacctcatcgatctcagtaacaaacccgaatggtttttgggtgtgaatcctgaagggaaggtgccagtggttctttttgatggcaaatgggtggctgattctgatgtaattgtggggatactagaggaaaagtacccagaaccctctctaatcactcctcctgaatttgcctccgtgggatcaaagatatttgggtcttttgtgagttttctgaagagcaaggatacaaacgatggaactgagcaagcattggttgctgaattgagtgccttggatgaacatctcaagacccatggtccatacattgctggggagaaagtcactgctgttgatctgagtttggcaccaaaactgtaccatcttgtggtagcactgggccacttcaagaattggaatattccagaaagtttggtacatgtgcacaattacactaagctgctgttctcccgagagtcatttgagaaaacaaagcctccaaaggaggaatatgttattgctggatgggcgcctaaggtgaatgcttgaagtaattctaaattatgaggcatctgaacatcagatatgtgatgtactgtgactgaacctggttaagaataggatggcgaactcatgatgtttaagagtattgttacccttttaataatgaataaacatgtagtttgttggtgtttttattggtgatgtgacaacagttgtcactagtagtacatagtgttttagattttaatgtcggaaaaagatcctctcaaattaagaaaaaaactggatgaaatgtcaagcttacttttaatgttagataaatttaatttataaaggatacaaaaatgtattaacggtgaggaaaaaaaaaaaaaaaaaa

SEQ ID NO: 29027 - DNA, 601 bp, Glycine max
  Clone ID: TF_GmC400016_1
ggctcgaggacgaatgcattcgtcaaagtttagctctactgactcatgtgaccttctcatatgtgatgaggctcacagactgaaaaatgatcagacgataacaaaccgggcgtttgcaggggagagctgccaatgcccggtttgttatcgtctgcaaacgtagaattttgttgtcaggaactcccttgcaaaatgacttagaagaattctttgcaatggttaactttactaatcctggaatattgggtgatattgcacattttcgacgttactatgaggcaccaattatttgtggaagagaacctgctgccactgcggaagagaagaagctaggtgctgaacagtctgctgaattaagtgtcaatgttaaccggttcatattaagaaggactaatgcattgttatcaaatcacttaccacctaagatagttgaagttgtttgctgcaagttgactccactgcagtcagaactatataaacattttatacaatccaaaaatgttaagcgggcaattactgtagaactgaagcaatcaaagattttggtctacataacagctctcaaaagttgtgcaatcattccaagcttattctttgatac

SEQ ID NO: 29028 - DNA, 688 bp, Glycine max
  unsure (1)..(688): unsure at all n locations
  Clone ID: TF_LIB4281-011-R1-K1-C10
cccgcgtccgccaaaggctgttctaccaaattgggtcaatgaattcacaacatgggctcctagcatcacagctattctttatgatggacggctggatgagaggaaagcaatgaaggaagagttgtcaggggaggggaaatttaatgttctattaacgcactatgatcttataatgagagataaagcatttctcaagaaaattcaatggaaatacttgattgtggatgaagggcatcggttgaaaaatcacgagtctgctctggcaagaaccttggacaatggatatcgcatccaacgaagacttctgttgactggtaccccaattcagaacagtttgcaggagttgtggtctttgcttaattttctccttccaaacatttttaactcagttcaaaattttgaggactggtttaacgccccctttgcagaccgagttgatgtctctctcacagatgaggaacaactattgatcatccggcgtctgcatcaagtaataaggcccttcatattaagaaggaaaaaagatgaggtggaaaaattccttcctgggaaatctcaggtcatactcaaatgtgatatgtcagcctggcaganagtatattatcaacaagtaactgatgtaggcagagttggcttggacaatggttctggaaaatcaaaaagtctgcaaaacttaacaatgcaactc

SEQ ID NO: 29029 - DNA, 613 bp, Glycine max
  Clone ID: TF_GmC23376_1
atggaggaagaggaagatgaagtgggttggtgttcttctgattcgggcgacggcgacggcgacgacgatatcgaagaacggaaatctcagaatgtggatgccttgctcaggggcaacctcgtggtgaagagacaatcgttgctaccgcgacttctatcagtatcgcaaggagcggctgtttgtagaaagcccttcaaacctccatgctctaaatctcatgcttccgcttccgcttacaatcaagaccttactcgtaagctttccgctcgcaaaaggtttgttccctggggttcttcctctcctattcctattcctattcctagatctgccttagacgactccaaattcaatgttgctgttgctgttgctgatgttgccgaggagctcaagccctctttgcctcccgggattgatcctctcgtattgtggcaccctcaagactccgaggatgctaatgctaattttaccaccataacagttgatcccgtgcttgttcgttaccttcgtccacatcagagagaaggggttcagttcatgtttgattgtgtctcaggcctgtctaccacaccaaatatacacggatgcattttggcagatgatatgggtttgggga

SEQ ID NO: 29030 - DNA, 522 bp, Glycine max
  Clone ID: TF_13791645
gctgcccgaaaaagtgaattggaaactctggatgtggatgatgacatgcttcctcagaatggtatagtaaaggaagaatctaatatgtgtgaggataagccaagtggatatccaatgaatttgttgaagcaagcaaagggaaggccatctgctgggacccttattgtttgcccgactagtgtcctgcgtcaatgggctgaggagttgcgtagcaaggtaaatggtcaggcaactctctctgtgctagtataccatggaagcaatcgaacaaaagatccttatgaggtggccaagcatgatgttgtcctaacaacttattccattgtcagcatggaggtccctaagcagcctccagctgacaaagatgacgaggaaaaggaaatttttgaagatcatgctacaccaagtaggaaaagaaaaagcccttctaattctagtaaaagtggcaagaagaaattggatggcacaaatcttgaaactgttgctcggccacttgcaaaggtgtcatgggttagggttgtc

SEQ ID NO: 29031 - DNA, 1167 bp, Glycine max
  Clone ID: TF_GmC1383_1
ttgcttatcactggcactcctctcagaaagtgtggaagaactatgggctttgcttcatttccttgatccggacaagttcaggagcaaggatgaatttgttcagaactataagaatctgagttcttttaatgagaatgagcttgcaaatctgcatatggaattgagacctcacatacttcgaagagttatcaaagatgtggagaaatcattaccccccaaaattgaacgtatccttagggttgaaatgtctcctcttcagaaacagtattataagtggattttggaacgtaattttcacaatttgaacaaaggagttcgtgggaatcaggtttctcttttaaatattgtggtggaattaaagaagtgctgcaaccatcccttcttgtttgaaagtgctgaccatggctatggtggggactcagaagtagtgacaacagtaaactagagagaattgtttttagcagtggcaagcttgtcatacttgataagctgcttgttaaattgcatgaaaccaagcatcgtgttctgattttctctcagatggttaggatgttagatatactgggagagtatatgtcacttcgagggtttcaatttcagaggcttgatggcagtacaaaagctgagcttcgacaacaagcaatggatcatttcaatgcacctggtagtgatgatttttgcttccttctttcaacacgggcaggaggtctgggtatcaatcttgctacagcagacactgttataatatttgattctgattggaatcctcaaaatgacctgcaggcaatgagtagagctcatagaattggacaacaagaagttgttaacatttatagatttgtgacaagcaaaagtgttgaggaagatattttggaacgtgctaagaagaaaatggttctggaccacttggtgattcaaaagctaaatgcagagggtaggctggagaagaaagaagccaaaaaaggaggaagttattttgacaaaaatgagctgtctgcaatcttacgattcggagcagaggagctctttaaggaagaaagaaatgatgaagaacaagaaacaactcttaagtatgaatatagatgagattcttggcccacccggaacgggcggctcctgcactgtgtgaaaaatgccaacagcagagttggacggaagccttccaag

SEQ ID NO: 29032 - DNA, 1497 bp, Glycine max
  Clone ID: TF_GmC47363_3
cgcgtccggcttgttggtttgcaatggatgctttccttgtataacaacaaattaaatggaattttggcagatgagatgggtcttggcaaaactgtacaggttatggcattaattgcatacttgatggagtttaaaggaaactatggcccacatcttataatagtcccaaatgctgttatggttaactggaagagtgagttgcatacttggttaccatctgtgtcatgcattttttatgctggagggaaggattaccggtcaaaattatattcacaagagattatggctatgaaatttaatgtcctggtgactacttatgagttcatcatgtatgaccgggcaaggctttcaaaaattgattggaagtatatcataattgatgaagcacagagaatgaaggatagagattcagttctagctcgtgatcttgatagatatcgttgtcaaagacgcctgcttctgacaggaacgcctttgcagaatgatttgaaggaactgtggtcgcttttaaatttacttcttccagaggtttttgacaataagaaagcctttaacgattggttctcaaagccatttcaaaaggaaggtcccactcaaaatacagaggatgattggcttgagactgagaaaaaagttatcattatccaccgtcttcatcagattcttgagcctttcatgctcaggcgtcgtgttgaagatgttgagggttcactaccaccaaaggtctctatagttttacgatgtaagatgtcagctgtccagagtgccatttatgactgggtcaaatcaactggtacccttcgtcttgatcctgagggtgagaacagtaagattcaaaagaatcctcattaccaggcaaaagagtacaagactttaaataacagatgtatggagctacgtaaaacttgcaatcatccatctctgaattacccattacttggtgaattatctacaaattcaattgtaaaatcttgtgggaaattgtggatcctggataggatccttataaagcttcaaagaactggtcatcgggttttgctgtttagtaccatgacaaaacttctagacctcttggaagactacctgagacttcgccaaaatgtaaactaattaatggatgcaatgcctaatttggatgacaatgcacaccaataataaaaaataatagccctgtaccttcaaggagcatcgccttgccatccaaactacatggatctccaaagtcaagccgtctgaattgcatttctgtgccttcacaagatgctggtgaccactccaaagaaagcagggaaggaaaacctatcaatccaagtggatcttcatcacatggtactaagatgactgaaattatccagagaaggtgcaaaaatgttttttgcaagctccaaaagagaattgacaaggaaggccatgaaattgtgcctttgttaatggaattgcggaagaggattgaaaaatctggatctggaaacatctctgtagatctcgcaaagattg

SEQ ID NO: 29033 - DNA, 468 bp, Glycine max
  Clone ID: TF_uC-gmflminsoy047c04b1
gggggccgggccccagaatcccggtctaccctcacgcccccattgttatatacacctgagcgcgagaaagagaaggggaggaatttgagagagctctggggctgttaacactggcgcccaagagaattggcaacaagatcaaccggaatgcgatcctttgtacacgcaggagcaggctattgaagaaagcttatgagctttccgttctctgtgactgccgagcttgctcccatcatctctctccaatcacaggaaagcagctacgactttcgcagtggttcaagcatgctcaacacgcgggagaggtgccagaaatgcacctatggaccgcctgaggacaatcgtggcaacaaaggcagccttgttattggagtcaagcactcaacaagaatacttggggctgcaagcactttaccgaactctactactggcttacaggcaccttatgggagaagaccttggtcccct

SEQ ID NO: 29034 - DNA, 313 bp, Glycine max
  unsure (1)..(313): unsure at all n locations
  Clone ID: TF_700984421H1
ctcttgtntttcacaaatctcggntcagtagagtactgacccagncanagaagattcaacaggtacctaagagaaggnaagagnggggatngaaagnnagacaaagagatagaaactgcacgtanaanagnnnnnnnnnnnnnnnnnnnnnnataggangaantcngcaaatattttgtttggataagatataaggcaatagtantattagtattgttganaataattaggtagaaganatattatggggaggggaagagtggaactgaaaggntagagaaccaagataaacaggcaggtaacgtttgcaaag

SEQ ID NO: 29035 - DNA, 378 bp, Glycine max
  Clone ID: TF_jC-gmXLIB3563P040ca04a1
ctcccgtcgggggggtcagagaccactgaccccgcaacaaagatgctgaacacaagtccccttctggcgagctggtaaccactctcactttgatctagaaagccaccctattataacatcgccattgcacccggaagaccatgcgagatcaatttttctagaaaagagagatggagaactggggagcggtaagattgctatccacacgatagagaactcaaccaacaggcgagatacttactcaatgcgaacgaatgtgatcctagagaacgcctagggagtaactgttctatgtgacgctcaccttcacgcttatcatcgtttgccgtctctggaaagaggcaggactacatgatccgttctaccaagttgatctga

SEQ ID NO: 29036 - DNA, 811 bp, Glycine max
  Clone ID: TF_GmC73666_1
cccacgcgtccgcggacgcgtgggttcagaaaacgtgccaaacttgagcgacgtcactaagaagaccaaaggtcggcaaaagatagagatgaagacgatagccaacaagtgtagccttcaagtgacattttcaaagcatcgaactggagttttcaagaaagcgagtgagcttgccaccctttgtggtgtggaccttgctgtgattatgttctctcccaataaccatgtttactccttcggtagccctaatgtggattctgtaatccaacgttatacgacagagggcccacctcccctcttcacccaagacctcaatgaggccccttgcaccatggatgagggtgagctccaagcacacctcaactgtttgtccaaccaaattgacgcggagaagcaacgtgtagaggatctaaaccatttgttgatggctgcgaaggatcacatctggtgggatgtgccaattgaaagcatgagcaatgcccaactcgagaagtaccataagatgttgaaggagataaagttgaaacacatgagacatacacatggagaatgatctatttttgggttcttttgatttcttcatatgagatctatcattgttgatgtcctacttaaatttttagtttgtgtttttcaattctggtttagaataagcactagcttaatcggtttcatgtgtgggacatggttaggactgattatctagggtttaggttttgttatcttaaatataatcttcatcatgttgttggtgaaccgtgttttctttatgttgtttctttgatttttaattggggattgtagttgttcc

SEQ ID NO: 29037 - DNA, 1279 bp, Glycine max
  unsure (1)..(1279): unsure at all n locations
  Clone ID: TF_GmC1806_1
cctgccggtacgcggcccggaatgtcattgctcggtcgacccacgcttttttcccacgcgtccgtacggctgcgagaagacgacagaaggggacacacaacaaagttctcattttttctcattcctttccgaccatggcatcaccggcatccaacccccaaagcgccgagactaagaaaagccgtggccgccaaagggttgacattaagaaaatgagcaacgaggccaacctccaagtcacgttctctaagcgccgcagcgggcttttcaagaaagccagtgagctttgcactctctgcggcgctgaagtggctctggtggtgttctcgccggggcagaaggtgttctccttcggccaccccagcgtggatggcgtgattgagcgctatctcactggggtcgcaccgccggaggcggacaacatgaattacatcgatgtgcaccgcatggccaaagtggttgaccttaacgcccagctgactcatatcaaagatcagctcgaggcggagaggaagcgcgccaaggagctgggcggcattcagaaggaggccgaaacccatctgtggtgggcccggcccgtggccgacattaccgatattaacaacctgctgaagctgaaaaaagctttccagcagctgaaacaagatgtgtccggtcttgctggtatggctttgttccagtctgttgcaaatggaaacccggggcatcagttttttgctggggcttcttcctcagccgttcccaatgttgtgcttcagtcacaaccactgccagtggcccaggtgttccctcctgctgttccacagatgatgtttccaccacccatatttgagaactacatggtgaaccccaatgggtttgatgacatgggaatgggaggaggaggatttggaggagcaggaccttctagtgctggtggtggtggtggtggtttcttttgatcctgccagctggattttgatgcccttttgtttttaattaagagttcatgttgttttaatttctgtactgttccgggttagctagtttcatatgtacgtgacaacatgcttaattagcactgattagctagggttcggaattcggatatccttgtcttgaaccatcatcagcattgtcatgtaatgctagcagctggaatgttttccctttcgtatcgtttctctgttatgttgctcggactggagtgatgtactttcatttgagttgtttaaattgaataaagggcatcttttttatttgtttctcccaaaaaaaaaaaaaaaaaaaaaaccccnna

SEQ ID NO: 29038 - DNA, 807 bp, Glycine max
  unsure (1)..(807): unsure at all n locations
  Clone ID: TF_LIB5118-045-A1-PF1-B9
atagtaccagtggtgtgtcttctgtgctttgctttcttttctctcttagctaaaacagataggtcatatctcaattatgtaacattagcatacccttttttctttctttctttcttcaatttctctgcagtgtgcagtgtgtgtatgctctttctcttttgaggttcttcttgctttctttggattcttggttcttattttttctgtttccttttcttttataggctcgagcctttattattcctagctcccttccttggctctaaagataaattttcccttgattttgccaatttggtggatatctgcttcgttttgtcaactaaacttttttcccttgcttactgagagaacactgcttgtaattgaagttgcttttctggctgctttctgtgtcttcaagtcttacttggaagactcagatttgctgcaaatctctcaatttcctcatcatcacaaggtttaatttcttggttttgctctatagctacttgcagaaagaactcaaagaagagatcatcatggtgaggggaaagactcagataaagcgtatagagaacgccacaagcaggcaagtaactttctcaaagcggcgaaatgggttgctgaagaaggcctttgagctatcagttctgtgtgatgctgaggttgctcttatcatcttctcttcaagtgggaagctctatgaatttgctagctccagcatacagtgttcaattgaacgataccgcaggcataccaagcatgataatccaactacattcagatcagttgaacaanatatgcagcatttgaagcaagaggcag

SEQ ID NO: 29039 - DNA, 1021 bp, Glycine max
  Clone ID: TF_GmC1804_1
ggtgaccaagccagcatttccaatcaagtaatcgagatagtgctccaactagctaatagagtgaaatatatcaacaaattaaaatcgaaccccaccaatccaaagctatcatacccttgcatgttcacgagcttccttttgattggtttgtgcagctgctaattattaaaatgacgagaacgaggataaagataaagaaaatcgacaacataacggcgaggcaggtaacattttctaagaggaggcgagggctattcaagaaagctgaagagctttctgtgctatgcgatgctgaggttggtctcattgttttctcatctaccgggaagctctttgattatagcagctccaggtacgtgtacggacgacgactggtatattataacacaccactcttgagtttttgacttttctctcagtattttgtatacacatactagtagacgtatacattgttgggaaacctaggggataaaaactggggtataaacatgtgtaaagcacgttcttaattccgttgctttcaattaatattaatatgtctgtatggttctttctatcctaattcctagccagtagtgccagtggtttatgtacggagtgagtatctggaagtctgttagagagagagagagagagagtgtgtgtgaaaactgagaggagaaggacggggattagatgtaatctcatgatgggtttggagcagaaacctcgtttcactcgcttatggttctaattttatggaaatttaatagtaggctattgaagtttccatgaaaggttgtgttgggagagaaaaaagaaaatgaagcattagttaaatagtaattcctaagcgatcgttttaactattttttttgtaaatattcgtggtgaaagagtcttgccccgttttgagcgttattaagattttttttcttaaaactgtaccaatattttttttaattaagaaaaaaactgcaccactatatatatgtttttgttggatttgtttataagtgagaagtgtataaaaagtaaa

SEQ ID NO: 29040 - DNA, 1186 bp, Glycine max
  Clone ID: TF_GmC1920_1
tttttgttaataagcatatctaagtataacattctctgaatacatgcaagatagaatcctctaccatgatataaaagtatcaccaactctctcaaatactgtcaaaacaaccaccaaaatcctgaaggtgggtgtgttgcggtggagaaagagaaatgcgaatccgaaaggagaatttaacatataagagtatgaggacctaatatcaatttacaatacacttatacacatattatgttcagaattcataagtcacaaacaaaatggaggtttcatgctttcatctactgaccattccaagtaaaaacatcataaccaaagctgccactatggataatcccgctcctgataaccacgccaaagtcaaatctctcgggatctactagataaaagtaataacaaaaaactcaaatactatctaatcaataaccaaattcctgaaggtgggtgtgttgcggtggagaaagagaaatgcgaatccgaaaggagaatttaacatataagagtatgaggaccattccaagtaaaaacatcataaccaaagctgccactatggataatcccgctcctgataaccacgcctcagtcaaatatctacaaaagatgaaccacttcccaaagtgcatcctttttttaaggaacccaaagaaatcaaacatacaatagcaaagtggaatcttgaagtatcagagttctgggtataaggtttctaagcctattctatacatgccttgaaatgccatgtaagcctctcatttgtaacatataagaggcagccaaaaccatgtgggacctgcgggtgcagatgaaaatccaaaatggggcaaaaaggaaatagtctctaaatgcaccaagaacgcggagccatgcaaagttgctgtttccagccaacctctctggtcatttgaggtaaaacgctttccattctcgcaaccttacttagtgtggtgccttccttcgcatcttcaaccgtcgaattgctactcctcccaaaacaccagctctaatttctcgttcagttgggcatgtttgtgctctgagagagcgagaaattaagccaatgggtcgagggaagatcgagatcaaaagaatcaacaatgccaacagcagacaagtcatgttctcgaaggggaggaccgggttgttcaagaaggctcaggaactttccatagactccatgggagga

SEQ ID NO: 29041 - DNA, 469 bp, Glycine max
  Clone ID: TF_LIB3108-017-Q1-K1-D12
tctcatgctcccggtcgacatggccgctggatttcgagcggccgcccgtgcaggtgctccccttcccccacatacactggctcttgggggtttatgttctcttttccccctctaattttggtaaaaatctcactagctttttgcaaagattgttccccaacataatctccaaaatagaaagccttgcgcaccactcaacagaaattaggtcaaccccattttcttacacatccatctctttatattttggcttattctgtgaagtgggtaattcttgaaaatattgatgagtatatatattcaaaatggttaaagagaaaattcacatcaagaaaattgataatgcttcagcaaggcacgtcactttattatagagaagaagagggcttttcaagatatctgaagaaccttcatttctatgtgatgctgatgatgctctcaacattttctttactactggaaaactctt

SEQ ID NO: 29042 - DNA, 491 bp, Glycine max
  Clone ID: TF_GmC134_4
cataattattattcacaccttttgttttgttttctttccctttctcttgagtttatttggtttgatgatttgcttttttttttttgataaaaaaattattgaataatagcactaactaattatttggtataaatattacttatagcttccaaccatggaggatccaaatcaagctccacaagcgtcttctcagaagaaaatgggaagagggaagattgaaatcaaacggatcgagaacaccaccaataggcaagtcaccttctgcaagcgccgcaacggtttgctgaaaaaagcttatgaattatcagttctgtgtgatgctgaagtcgcccttgttgtcttctcaacccgggccgtttgtatgagtatgccaacaacagtgttagggccactattgagaggtacaagaaggcaaatgctgctgcttcaaacgcagaatccgtatctgaagctaacacacagttttaccagcaagagtcatccaaattgag

SEQ ID NO: 29043 - DNA, 2602 bp, Glycine max
  Clone ID: TF_GmC7683_1
ttcgttctttgacgtccgggaacattcatctaagtcttgtcctccctccttcttcttctctcccctgcttctctttctccttccaaatcactcctataattttcaattcaaaggtggtatttgtgaaggaaccctaaaatataattttttgaccaaagatggggagaggtaagattgcgattcgaaggatcgacaactccactagccggcaagtgactttctcaaagagaagaaatggattgctgaagaaagctagagaattatcaattctttgtgatgctgaagttggattgatggtgttctccagcactgggaagctttatgactatgcaagcacaaggtaattaattaattaagatcaatttatttttagacaaatttattagtcctttcgctttaaatgatggaaatcgatctaaaattttgggtgcaatattattgtctcagcttttctttgctaatataaaatctgtactatataaagtgaataaaataattacatagatagtactaaaatacaagatgattgtgattctcgtatacttcgtggttggtgtcatgccgtgctgtacgaaacattttatatatgtccacttgcattaggaatatatctgtgactgtgacttcaatttctttaatggttgccaagctataattaaccctctcccccatttgatattgcctaggttgagtgtatataataagaaatgtgcatgcgcgtttgcatggtacggtgttaatcttcatgacactttagcatttctgatagcagaataactctgagaaatggttttctcttctgcctcctcaatcttcccaatctttcttggtcttttcctttttgtctccagctagcgcctccagttttgtgttattaattggctccaagttacaacacagtatgatactcctagctaattaattaataaagttatgatgaaaaggacacaaacgtaaccttccactttcactctattaatctaagaactcatattagttttgattgtaggactatttttatgtaggtattttaaactggtaaaacctcatactataagatagaatattacagattaaggcatattgtggtataatatttgggtaatctataacttacctacttgatcgagcatggatacgggaatgcatataacttatattctcgaagcagtaattgagtttattattttttcttttacatcgagtttattatgaattagtactaatctataaaatactctcgtaaaattacttttaacataaattactgaaagaattgttcttctggataagtgagctgccttatattacaatatgattcacgcatgcatgcgacgatgattgtttcacacatgcgatgtacaaagtgaagacacacaacaaaaggaaacaatagatttagctacaatatatatatatatatatatatatatattggaatatgttaaagctatgatgcaaacctaaagttatcaaattaattaacaatcctagttgtttcaaatgtatcggaaatgtctcaaatttcaaaatgtgttggaaatgtctcacaattcactttggatactctgtgtacaatctttagcaataaagtgataacatttgtttcccatactcccattattactattgaattgtgcacctctcattgtattaaaaaactcattttgaaatacaaataggcatattcctaaatgcaatgagagatgtagaatttaaataagagagtgctggattcaaatgcctaaagtgatttaatccaacaccttggatgaatcatgatgagagcttaaatttaagaataggttaacccaatccaactttcagttcagatttaaatactgtctaaatcggttttatctataaggttggtaagttaaatgatttgggtcattaaagtccagaactacaaaaaaaattacattcaaaaaataccaaaaaattaagtgatttagatttttgacaatgtatatcagaaaatgacaaggatgaagctcgtgggtagagttttcaaaatggatcaacctggccaggtcacaggttattagtgaattaaacagattggtccatttagactaaaaaaattagaaatgcattacagaattgtattttaaaaagtcttgcttcaactaggtgcaattgatgttaactagcacgctagccctattgaaatggtatctcgttagacatggtgtgacaatgctgcctgagcaccaagtcaaagaagaaaacattttgtagtggagagaattccccttcaatgttgctggtaaaccttaaatgctcaatccttgaaggtcccgcgctctctctttttggaaagaaggttggagaagattaattaaaagaagaggttaaacccaattcctaagtttaacttgtgagttaagtgagctataggttaatctaacttgaggtgaggattgtttggattaatgaggattttggggccggcatctgtgggagttttctgtcaatttttttttttgggttgatttagatgtatatatgactctacgtaccatgctattctgggtacttattgtgctcaaagcttagctcttttattcttcaataaatacatttttgcttataaaaaaat

SEQ ID NO: 29044 - DNA, 725 bp, Glycine max
  Clone ID: TF_GmC138_3
gactgcggtttttggctcgaggaagaagaaagatccgtaaattaacattctctccctcccttcgctataatagcaagcttttcaagcatatttctggggtttggtcccttttccttgtttggggttttcttgggaaaaaagaagtaattaggtataataatagtataactaaagcaaaaaaaaagacagtaatatgggaaggggtagggttcagctgaagaggatagagaacaagatcaatcggcaggtaactttctccaaaaggagagctgggttactcaagaaagcacacgagatctctgtgctctgtgacgctgaggtcgctttgattgtcttctcccacaaaggaaagctctttgaatatgccaccgattcttgcatggagaagatactggaacgctatgaaaggtatgcctatgcagagagacaacttgttgcaaatgattccgagtcacaggtttgttatttgttccacaatattttagccgaaagacatttacacaaatacaggcatgaaaatgtttaggaaattaaagcttatactttaggataataataataaataaaaaaagcttatactttaggcaatagttgtgttttaatttctttttcattaagttcttaaagtgtttttttccctaaaaatagtacccatgcacttttgtcatatttttctcttatgattattaaatttatacaatcaaaagaagtgtgtgcattctttc

SEQ ID NO: 29045 - DNA, 163 bp, Glycine max
  Clone ID: TF_19052527
ggctccaggaaagatgcatatcctcatgatagagaactccacctaccgccaagtcacttattctatactaccgaatggccttttcaataacgccaacgagctcaccgatctatgcgacgccaacggtgctatgatcatgctctccagaactgggaaactccag

SEQ ID NO: 29046 - DNA, 932 bp, Glycine max
  Clone ID: TF_GmC182_3
aaagaactccaaccctaagctgcactccatttttttctggtggagatggaaaatcctgaggataaaaaggaaacttagaaaagagagtacatatacaatacaagacaacttcacacacacaacactttcctctctctctctctctctctctagggttccgagtttgaagttgaaagtgttgaactatctctagctagcttttcacaaatttggttgcacttgcaactgaggcaggaaagaggggcacgagaggaggaagaggaaagagaagaaaaaccaagaaaagtggagaaagggataggtgttgtacagaaatagaaattaaaattgagtgaaaattaaagagaagaaggagtgatagggagatatgggtaggggaagagtggagttgaagaggatagagaacaagataaacaggcaagttacgtttgcaaagaggagaaatgggcttctcaagaaagcctatgagctatctgttctctgtgatgctgaggttgccctcatcatcttctccaaccgtggcaagctttatgagttctgtagcagctctaggtatgcagtgtgtgttgatccttttttttctgtttcttctctttgtgagatactgaaaatcactttttctttgttgacctatgagatctacttgctccattattttatattttatttttttggtgcctttctttggatttgtttaatttgttagcttcaacaattaaggacaaaattatttagtgactcctcattttttatatttattattatgtgaacttgtggctttttgtaagaagccctatatgtgcttcattgctccattagaatagtaagagttcatttctaatttgatcttttttgtaagggatggtagatttatcagatctagtaatatggcacatgatctggtggatatctaatatttaaaaaaaagggcg

SEQ ID NO: 29047 - DNA, 237 bp, Glycine max
  Clone ID: TF_LIB3242-424-P2-J1-C3
gattttatacattcttaattgtgtgagtgtggacatactctgagcgtgagaaagataatgggaagaaagagagagagtgatgggaaggcgaagagtggagtttaagagatttggcaacatgatctactggcgagtgatcttcgcataacgaaagatcgggcttttgaagaaagcttatgagctgtgcgacctttgagatgccgaggatgctctcatgatcttctacaatagaggaaa

SEQ ID NO: 29048 - DNA, 525 bp, Glycine max
  Clone ID: TF_uC-gmrominsoy040a11b1
tttggttcttatttttctctgtttccttttccttttctaggctcaagccttcctagctcccttccttggctcaaaagattttcccttgattttgccaatttggtgcatatctgcttcggtttgctttctgtgtcttcaagtcttacttggaagggtcagatttgctgcaaatctctccatttccccatcatcagaaggtttaatttcttggtttactctatagctacttgcagaaagaagtcaaacaagagataatggtgaggggaaagactcagatgaagcgtatagagaatgccacaagcaggcaagtaactttctcaaagcggcgaaatgggttgctgaagaaggcctttgagctatcagttctgtgtgatgctgaggctgctctaatcatcttctctccaagagggaagctctatgaatttgctagctccagcatgcaggagtcaattgaacgacaccgcatgcataccaagcatgttaatccaactacattcagatcagttgaacaaaatatgcagcatc

SEQ ID NO: 29049 - DNA, 438 bp, Glycine max
  Clone ID: TF_uC-gmroLIB3258052e05a1
gaagaaactagcaaacttgaggatgcaaatattacattccaaatgatatttttcagtcaattctttttccacattcaggcatttctaatggtctatgcaaattatatatctcctaagtaattcatgtgaagattgtaaactcccatgcatatattggcgcaagatatctataataactaccttaatttctgaagctgaactcccaagttgacaaggttcttcttttgatttgttgtatcggtcaattactgatttcatgccggagctggcaaaatcgtagagttttccggtgctggagaagatcataactccgacttcagcatcgcacaagatcgcaagctccttcgccttcttcagcaaaccgctcctccgcttcgagaacgtcacttgcctgctcgtggaattgtcgatcctccttatcacgatcttacctctccc

SEQ ID NO: 29050 - DNA, 1119 bp, Glycine max
  Clone ID: TF_GmC1919_1
actggaaatatggggagagtgaagcttccgatcaaaaagattgagaacacaaccaataggcaagtcactttctccaagaggaggaatggactcatcaagaaagcttacgaactttctgttctttgtgatgttgatgtggctctcatcatgttttccccatcaggaagagccactttcttctctggcaacaaaagcattgaagaaattctagaacgatatgttaatctttcggagggtgaacacggaaggatgcataataaagagcacattcaaaagttgcttagtaagttgaaagatgaagctggtcaaatatgtcaagcccctagctcaatgacttcagattcccaaattgaggatcttcgaagagaaattttcacttgcaagtctcaattggaagagatggagaagcgactaaggatatttgaaggtgatccttcagagatcacaacgctcagcgaggctgaatatcgtgaatatgtccttcgggatactctaaaacaagtgcaactgcgaaagtgtgttttggaggagtacaattctcatgccactcattctccacaggtacatgctgcaaaaactgtagatgtaaatggatttatttccagagcctcaaagaacccagtagattggtttccacagggagatccactacatgtccagactctgaactttgcgaatgtttatgacactgctcttgtcagagatcaacaatcacatcattgcacggttgttgatatgttaacaccaacttcgacccttctgcattccgcaaacatggatctgaatggccaaatgaatccgaggagtagtttagacgctggcattagtaatacattacatccccagtttggacaagctattcacaccaattcgtcctcttggcagcatcttaatcctttaggtacttactggagttagataatgtggcttgattttgttatttattttcatttaaggatactttagacggctactctttacattcttgtaatttaagttgacttatgcaatacaaaccctagtggtcattgatctcatttctctcttctattctggttgggtatatgtattttgatgatcagatcatgaaattaatatagtcgtcgagattataggttt

SEQ ID NO: 29051 - DNA, 842 bp, Glycine max
  unsure (1)..(842): unsure at all n locations
  Clone ID: TF_GmC742252_1
atannngtgaaacaaagaaataaacatgcgactcctagaccatgaatgaatccatggtcacttattttcgtgccatgatagctaaacatcaaaccaagcacgtgacatttctcaatggaaaaaaggattaggccaaaagccattttgttgattaacatctccgacaataggcatagcctcattcccaccaccaccaccattattcatcaaattcatgaaccaattctgcttctgcatgagatccatgttgatatcaaacccctgatggccatgctgactcccttgtcccttgtcttcaaccttggcagcaacatcagtcaccgctggtgctgcaatctgcggttgactttgagcattcttagtcaacacctcaatccttctgttgatgtccttcaagttctggtcaatcaaccatgccaaatcattcaaatcaaccatgcttatattgtgcataatcttacctgcactaaggtactgaaacatgagctgagtcatctccttttccctattatccttcctttgtttcttcaactggtctttggccttcatgattctctgcctcagaaaactctcttggttcaccatcttcttgctttgctccaattcaggcattctcctgaacttagcaagcaccctttgaacccccatcggggatggccaaacctcgggttgaggatcatagggactgtaaacaattgcacatgcatcaatcccacaaagggtgctaagttcactaaccttcttcattagacccttcttcctcttcttgaatgttgccttcctagctgagtcgttggctatgaatgccaactttaccttctttctagtcatggtgctgatga

SEQ ID NO: 29052 - DNA, 514 bp, Glycine max
  Clone ID: TF_GmC734_2
gttttccaaaaggagaactgggctgcgcaagaaagccaacgaaatctctgtgctctgtgatgctcaagtagcactgattgtgttcaatgctaaagggaagctttttgagtattcttctgaatccagcttgcttcaaagtcaaactgaaatagtactcgggaaggtttttaaattgtgcggccgtgattacaatttcgttgcaatctttggtattgtggaaaattaagaaaaatgcagctgatgttgtaacaattgcgattatgacgcggttgtgatgagttgaaaaacttgatgctgccactcatggtcacagacggtgtttccaaaccttggtgcagtaaaaagaaatgaaatagtagtaatatacatttccatacaatttcctagctaatttgttattgtgttttcattacctttttttatttattttttcctattttgggtttaatgcattctaccctctggtgacacatatccgagttataattctatggaataagtttacattatattc

SEQ ID NO: 29053 - DNA, 327 bp, Glycine max
  Clone ID: TF_GM459L07.C16.o13.fg
atggggaagaagaaggtggagataaagcgaatcgagaacaaaagcactcggcagataacattctccaagaggcgcaatggattgatgaagaaagctcgcgagctatccattctctgcgatgcgaaggtggcgctgctcatcttctccagcaccggaaagctctacgagctctgcaacggtgacagactcaaaaatagcgttcatcctgacagtgtgggtgtttggacaagtatcaaaaaccttcatatcaactgcatggtcagggtacaggtgccaccatttcataccttgtaccatatccaggggagtggcagaagggttaattga

SEQ ID NO: 29054 - DNA, 290 bp, Glycine max
  unsure (1)..(290): unsure at all n locations
  Clone ID: TF_LIB3242-252-Q1-J1-E2
cataattattattcacacctttagtttagatttctttccctttctcttgagtttatttggttagatgatttgcgagggtttttttgataaaaaaagtatcgaataatancactaactaattattcggaataaatatcacttatagcttccaaccatggaggatccaaataaagctccagaagcgtcttttcagaataaaatgggatgagggaagatagaattcaaacggatcgagaacaccaccaataggcaagtcaccttttgcaagcgccgaaacgttttgctaaaaa

SEQ ID NO: 29055 - DNA, 266 bp, Glycine max
  Clone ID: TF_700786334H1
ttggcagcgcagtgacggtctcgatgttgtccgcaatgaggtccctggactggaggctttagcacatgacacgagaccgtcatggcagcgcagccctgccacgtactatcattggcatgagccatgggtactgctgatggcgagggagaaggttcagattaagacgattgacaacgccactgcgaggcaggtcacattctccaagcgtcggagagggctcttctagacagctgaggagctttcggttctaagtgatgctaatgctg

SEQ ID NO: 29056 - DNA, 855 bp, Glycine max
  Clone ID: TF_GmC401_1
gttttcttgcttattcttcttttctcctttctgatcactaccatggctagaaagaagctgaatcttacatacataaccaatgacccgaagaggaagacaacattgaagaaaagaaagaatggtttgatgaagaagatgaatgaaattagcactctttgtgggattgaatcatgtgctataatatatagtccaaatgatcctcagccagaggtttggccatctgactcaggagtccaaagggtgctttccaggttcatggaaatgtcagaagtgaaacaaagcagaaagatgttgaatcaggagaacttgttgaggcaaatgatcaacaaaggccaacagcagttgacaagacaaaggaatcaaaacaggaagaaagaaatgaccaatcttatgtttcaatacctgactgctgggaagatttttggcaaccctagcttggtggatttgaatgatctctcatggttgattgatcagaacctcaatgaaatagaaaagaagatcaccatgctccaaatccaagaagtgactccagtgatagaaaatggagaacaggaacacatgcatcatgttcaagggctagagagcaacatggacaccaagcaaaagaaacattgatccatggaatttatcaatggtggtattggggatgggatgctcccattggagatgttaaatgtccaaaatagtccttggcctaaagcatctctcctttaaaaaagtatgttcttttaagtgtttcagttgtctttcccatttaaatcagtgatgcttaattttattgtctttctttgaaagtgtctgtgaatacaatagccgtatgtcatagtttggaaaatagtcaaatcttcttgtttt

SEQ ID NO: 29057 - DNA, 373 bp, Glycine max
  Clone ID: TF_LIB3242-181-Q1-J1-H8
tccggctgcaagaagccgccaaaagggcacacacaaaatctgccatacacaaaagactttatgatgtttgagtgtgtcttactatggccgctgcagtgctcatacaccttgtcacggatggagaagatcataagggccacctcagcatcacagaagccagagagttcgtaaccctttttgagcgaaccattcctcctgtatgcaaatgtcactagacggatgatgttgtactcaatcctattcaggtccagctttaacatacccacgttgatattaatggcttgctttatatctgtttgcgtacataaatcaaactagtctttttagaattccagatcgaaaagacataattgcgtatacagtagaatagatt

SEQ ID NO: 29058 - DNA, 1543 bp, Glycine max
  Clone ID: TF_GmC1003_1
ccgagaagacgacagaaggggagaactgataatgttataaagaaacaataattatgtatcaacaagaattacccattaaaacaaagaaaagaaaatttacttggttgagttggtctcaatgattatattagcattgaaatttcgcagcgaccaaatctgttatgaaccaattatatctctaaaagatttgattttttttggagaatcgattgtcttgggtgttatatatactccaacggtagcattaagaaacaaccacagcttctttcctcgatcactttctttcatgcttcttaggctttgatcgatctcctttttaccttctcatcttctctctttctccttccttctgccagttcgtcttgggacagggatttgactacaggataaaatgggtcgtgcaagaatcagcttgaaacatatctcaaatgagagatctcgcaagaaaactttcatggagagaaggaaagtacttataaaaaaaatctctgaattttccaccttgtgtggagttgaagcatgcttgattgtgtatgatgatgggaatggtgacattgaaccagtgacttgtcccaaagaccctgtattggcacactccatacttcaaaactatgagtttcaaaagaatcagagacctcccaagaagtttggtattcaggactttgttgaggataggaagaacatcattgaagctgagatttccaaagtgcataaagagatcaccaacatcaagtatccaacttcggatccaagtttcataaacatggaagaggatcaattgagggccttcattgctctggtggatgctaagattaggacctgtgatcattctttgaaaaacatgcatcaaagtgaagccaacttcatgcaaaacatggcttggggaagtgcttcctcctcccatcctactcctatggagccacttaataataatgggagggtggatgttacaaactcaatagatcaggtttatgaagctatgcaactagttgatgctccctttagttacattccagacatggttcagaaaagttttaattgcttgcaaaacatctctcaaagccaacccatacttgatgttgaggatgagatggtaggttttagtaatagagttgatgtgtcactggatacaactaatcaaattgctgacttgttggactggtttgatggacctattattggttggtctgatcttgtggattggactagtcaacctgatgaatctcagaatgagcaacaaggtggaggagatttggatggatttcaaacagaatgctataatctgaatttctgaatggctaactatgagttaactttgattttgatgctcttagtatttagtttaatgtgtaacttttagccatttatgtgcttgaaagtgctttcagctggaaatgtaggttttatgttgctagaaagtgtaggtttgggtatcatatatattgtttcagagtattgtctattttgcatataatatttatttcgaattcattgttcaaagtttgaatttacacatatatgataattaatgttttgataaaaa

SEQ ID NO: 29059 - DNA, 633 bp, Glycine max
  Clone ID: TF_LIB4391-011-R1-K1-G8
gcttcttaggctttgatcgatctcctttttaccttctcatcttctctctttctccttccttctgccaggtaatttacaatttattattattgaattgttgttttttatttagttaaatactatagtccaagttctaagcatgtctaattaaccatctttgtattttttttcctgtattaaccctccagttcgtcttgggacagggatttgactacaggatgtaagtaaagtctgactaaaaattgtttccatcaaggatgaaattcggatattattctaacaatttaatcttaacttcagcatattaagcatattaaccagttgtgtttaatcatctttgtatattatgttcttattttgaagaaaatgggtcgtgcaagaatcagcttgaaacatatctcaaatgagagatctcgcaagaaaactttcatggagagaaggaaagtacttataaaaaaaatctctgaattttccaccttgtgtggagttgaagcatgcttgattgtgtatgatgatgggaatggtgacattgaaccagtgacttgtcccaaagaccctgtattggcacactccatacttcaaaactatgagtttcaaaagaatcagagaccctccaagaaggttgggtattca

SEQ ID NO: 29060 - DNA, 2070 bp, Glycine max
  Clone ID: TF_GmC1805_2
gaaagagagaagtaacatcaaggtgcagagagaggaattgaagcatgggaagagggaaggtggttctggagagaatacagaacaagatcaatcgccaagtaaccttctcaaagcgcagaaatggtttgctcaagaaagctttcgagctatctgttctatgcgatgctgaaatcgctctcgtcatcttctccagccgtggcaagctttttcagtatagtagcactgagtatttttcttcgatctctcatcttttttatcattataatcctaggttttgatttttcaacatatattgctggttggtttgggttgtttttttagtattacacacacacacatatatatatatatatataggcaataaatctctgaaatttgcgtggttccgattgttttcttctattaattgggatgtagctagggttttccaattcttcatccaccccctttcccctctttttgccactttttatttatttatttgtcattaaaacagaaaagataatatcctctcattattcatatacgaacattatgtatcttatatgaattaaatagaggtggccgggggtattgtaatttggtgaagggtaatttttcgtacgtctaaaagaaagcaatactcagtttttctttcttttcttttttccatctcaattttcatgcatgctgttatgccacggtatttgtcatccgatcaattactcttgccatattaagaattaaaaaatagatgctattttcagcagaacaaaagtattatgctaattagtcacttgtagaaaatatcaactttctatgagaccccatgtttaactttcatgaaaagaatgttaattgggagctctagaaatagtattttcctattaaaagaaacattttttttactcatataataacttggtagctgtgcagatctgtttgtcgcttacttcgtttcaattctaaaaaaaaagaacacagtaccgtttccctttttttaagacataatattttactcataaatctaattactagtatacaagctttaccaaaaaaatactatattcaagtgcatgtcactgtccaatatgatttaatttgtttgtttattagaatgaaactatgattacccagcttgttagaattatattatttatttaagaataagtattttcttataaattaaaactaaataactaatattatttgaatagttaacattaaaaaatattctttagagggtggtaattctttgtttgaattaggtgttttgcatgcttttagtaggtttagattgtttcgtttatagagaaaattaacagtaaaatcactatttcagtattatggctaatttttttctcctcaagtcccaaatcactaggataagtataggtcattcatgtaggggtaaaggctcttttgttagggggtagagtagtcactacctgtaggtacaagacacacacagcttccttcttctttttactcttttttaactaagggttattttgtaattaagttttcatattagtattgtcatattctcttctagctcactttcatcctttttttcccttcatatttctatctttattttttatatttatcatatcacataggcggaggaagatagaaaaaaaccaaaatatgatttgttctttctattttcctgcacctatatatacaccaaaaaatgggatgtatatatattggtttttttcttgtatccggcccgttcataatcataatataatgattcaacaatattaattcatgttttgtttcaagatagttaaaacaggataggaaagcaactgaaaaactcttgattgattatttatacatataataattttattattaggtctccctgtaaatctacatataaaactgtacgtaaactgggacagattggttcaaatatttcttttagtcacgcactactaaaatatttcttttcagcattaacagaatcattgagaagtatcgtcaatgctgcttcaacatgtctcagactggcgatgtagctgaacatcaatcggagcgggtttgcactacctttaattaattctccattaatatctattg

SEQ ID NO: 29061 - DNA, 426 bp, Glycine max
  Clone ID: TF_LIB3242-724-P1-K1-D8
ccacgcgtccgtacggctgcgagaagacgacagaaggggagagtgagttgggtaattgttggagggtctatggttcagtccataaatacctgtctgctaggccaacccacttccatattttgcatcctttgtacctgagttcaaggttaacaccaaataacacatatagtgcagattcataagctttcaaccatggaggatccaaatcaagctcaagaagggtcttctcagaagaaaatgggaagagggaagattgaaatcaaacggatcgagaacaccaccaataggcaagtcaccttctgcaagcgccgcaacggtttgctgaagaaagcttatgaattatcagttctgtgtgatgcggaagttgcccttgttgtcttctcaacccgtggccgtttgtatgagtatgccaacaacagtggtagg

SEQ ID NO: 29062 - DNA, 503 bp, Glycine max
  unsure (1)..(503): unsure at all n locations
  Clone ID: TF_jC-gmXLIB3563P038dh09a1
ttaggaagcagggaaagaccgagcagcnanggcacgaggaaagaaccagancaagagganagagaacaccaccaaccgccaggncacnaaaacnaaacgacggaagggccnnnncaagaaggccaacgagcncaccgnncnacgcgangccaaggtttttattannanggnctccagcacngggaaacnccacgagnacaacagccccnccaccncaacaaagcanggcngcgaccagnaccagangacncnaggagncgancncnggaacncncagnacgagaanangcaagagaacnngaagaaacncaaagacgngaanaggaancnncgnaaggagaanaggcagaggaagggagaangncngaacgaacngagcanggaagaacncaagcnccnngaggaagaaanggacaaggccgccaagggngnncgngaacgnaagnnaaaggggaaaacaaancagaangacacccaaaggaaaaagcnnaaaaacgagaaag

SEQ ID NO: 29063 - DNA, 451 bp, Glycine max
  Clone ID: TF_6747007
ctggttgttgtttaaattccatgattacaattattagcttaaaattaaagggtgcattgacaaagactctggggaccttgcaggtctcagaggatcccggaaatctatcattctgggcacacaacacagaagggatgaacatgtgaacaacccatcaaacacgccggctctctgcacaatcggacactagaccctgagggagctcagaggcgggaatgggggccgagccagtcgtgaggctgacctgattgtgactgaggagctggtcatgatcactttcgagacctatgtgtatgagccatgactcaggatagacctctatacgaattggttggagttgtggtgatgtacagcaatgtacatgctgtatgctgcggtgcgtctggtggacgacatgctgaccagcaggccagatatgcagaatttttaccgacccgcctgggaacctgtg

SEQ ID NO: 29064 - DNA, 847 bp, Glycine max
  Clone ID: TF_LIB5118-019-A1-PF1-B1
attccgtgcctacccttcaaatattagtgtctcccctcaccttgaactgcaagatgaaccttaaatcagttgcacttctcgctctccctgtctaagacctccccagagttttgctgctgctattatgaggatcagggaatcagaaactactgcactcatttttgcatctggccttatgatctgctctggagctaagagcgtagccacagtctaaattggcgcttcgggaccatgctagaattagcccaaagcttgcattcccacctagatgtacggagtttacccattcagaatattgttggctcttgtgatgtaaagttccccattctactggaagctcttgcctattcccatgctgctctcttgaggtatgagccggagtcgactccctcagctcacctgatgatgccacacaacttgataactacctctgtaagaatttccttggaggccaaactgaatcaggcccattaggtgatggtatcttgcatgccatttcctttcccctttcccctcgttcattgcctccccccgccttatcccactcccttccctctcatccttcccctttatttatttcccccccttccccgcctttcttctttttctcccccccttttccatcccccccctcatttagtatccaccttctttctcctccctcccccccctcccccccccccctccctcctccccctacgtcactccttgtcctctctacctcccccccccgccccgctctcccccctcgcctcctccccccttcccctcctccttttccttttattctcttccccccctcccttccttttccactattaccccccatcccctctcttgccccccc

SEQ ID NO: 29065 - DNA, 1697 bp, Glycine max
  Clone ID: TF_GmC1803_2
cccacgcgtccgcttttttccacacacacaacacaaatacctctctttctctctcttcttcgcattcttcggacatacaaaaactcacactctctctctctctcttcaaatcaaaacccctcacaaaattcacaacaacatacacacaaatcccaaatcctgtcttctcatataaaagaacccttctttcgaatccttcccgctctctctctctcttattctttttccctatccgattcaattcgcgcgcagttccaaaccctagtccccctctccgagctctgtgatttttgggttgataaaaaaaattagggtttgatggctgaccaaggattggaagggagccaaccagtggatctacagaagcatccttctgggatcgtctttaccctcccatcaaatcaaaccctttttaaacgctcaaatataaatttctggcaccaaatccttcccactctcctcaattctattcatctcaactcaacaatctctcagatccgtcaaacaaaaaataaaacatagaaaaccctagttctataaatatataaaggaaaaaactttttgctggttttgaggcatagcattaaattggattttgattattcatggctgaacaagcattggaaggtagccaacctgtggatttaacaaagcacccttctgggattgtgcctacccttcaaaatattgtgtcaacggtcaatttggactgtaagttggagcttaaatcaattgcacttcaagctcgaaatgcagaatacaatcccaagcgttttgctgctgttattatgaggatcagggaaccaaaaactactgcactcatttttgcatctggcaagatggtctgcactggagctaagagtgagcaacagtctaaattggcggcaaggaagtatgctagaattatccaaaagcttggtttcccagctaaatttaaggattttaagattcagaacattgttggctcttgtgatgtcaagttccccattcgacttgagggtcttgcctattcccatagtgctttctcaagttatgaaccagagctgtttcccggactaatctatcgcatgaagcaacccaagatagtcttgcttatatttgtctccggaaaaattgttctgacaggagccaaggttagagatgagacttacacagcttttgagaacatatatccagtgcttactgagttcaggaaaaaccaacaatgattactactgtcaagagagcaggagcaagacttgattgaactgtaaatatgaagaccagagatagaaatatctgtaatcaggattgagttttaataagacacctgtgtttgttctgtctttttctctcttttaagaaaagggatcctgctttagtaaagtggaagaaaaaaaaaaccgtgtattgaatttgactgtagaaaaagagatatataagaggcagaatgaaaagaaaaagtggaagcttgtgcaaatcatgaatatctttcactgaagtggaaactatttttggttcatttcaactatgagcaactttgttttttagttaatcaagttctaaagcttaaggatagtgtcttcgtatactgttcaaaacagcaacgacgtgtttaatacactatgttttatgaagctagcaacatctaggtattttaatttcatattggaatttgaagacgttatgataaataaaacactacatttgataactaa

SEQ ID NO: 29066 - DNA, 1561 bp, Glycine max
  Clone ID: TF_GmC1803_9
ccacgcgtccgagcaaccttacaactcttctcaatcccatcaaatcgaaccctttttaaacgctctaatacaaatttctggcaccaaatccttcccactctcctcaattccattcatttcaactcaacaatttctcagatccgtcaaacaaaataaaaaagatcgaaaaccctagttctataaatatataaaggaaaaaagctttttgctggttttgaggcatagcattaaatcggattttgattattcatggctgaacaagcattggaaggtagccaacctgtggatttaacaaagcacccttctgggattgtgcctacccttcaaaatattgtgtcaacggtcaatttggactgtaaattggagcttaaatcaattgcacttcaagctcgaaatgcagaatacaatcccaagcgttttgctgctgttattatgaggatcagggaaccaaaaactactgcactcatttttgcatctggcaagatggtctgcactggagctaagagtgagcaacagtctaaattggcggcaaggaagtatgctagaattatccaaaagcttggtttcccagctaaatttaaggattttaagattcagaacattgttggctcttgtgatgtcaagttccccattcgacttgagggtcttgcctattcccatagtgctttctcaagttatgaaccagagctgtttcccggactaatctatcgcatgaagcaacccaagatagtcttgcttatatttgtctctggaaaaattgttctgacaggagccaaggttagagatgagacttacacagcttttgagaacatatatccagtgcttactgagttcaggaaaaaccaacaatggtatggaagtggctctttttcaattgctataggatatacatgttgtaatccctgggctaggaatataatgaatcaatatcattgtctctattatttttttttctttgttcagctatcagaatataattgtgtcagatgtagggctgaggttttcctaattgaaatgacgaaattctttacgcagtttcttttctgggtcatatatttgtataagttctgaaatctgaataatgtaaaatgcgatttaactacaaaagtaaactgaaactttagtttggaggcactcagtgtgactagtagtgtgtcatgaagtttatcttgttagttctgatgtctttggaatatttgctattaatggcacagattactactgtcaagagagcaggagcaaggcttgattgaactgtaaatatgaagaccagagatagaaatatctgtaatctggattgagttttaataagacacctgtgtttgttctgtctttttctctcttttaagaaaagggatcctgctttagtaaagtggaagaaaaaaaaaaaccgtgtattgaatttgactgtagaaaaagagatttataagaggcagaatgaaaagaaaaagtggaagcctgtgcaaatcatgaataactttcactgaagtggaaactatttgtggttcatttcaactatgagtaactttgttttttggctaatcaaacactacatttgata

SEQ ID NO: 29067 - DNA, 1091 bp, Glycine max
  unsure (1)..(1091): unsure at all n locations
  Clone ID: TF_GmC1803_8
tctctttccacacacacaacacaaatacctctctttctctctcttcttcgcattcttcggacatacaaaaactcacactctctctctctctcttcaaatcaaaacccctcacaaaattcacaacaacatacacacaaatcccaaatcctgtcttctcatataaaagaacccttctttcgaatccttcccgctctctctctctcttattctttttccctatccgattcaattcgcgcgcagttccaaaccctagtccccctctccgagctctgtgatttttgggttgataaaaaaaattagggtttgatggctgaccaaggattggaagggagccaaccagtggatctacagaagcatccttctgggatcgtgcctacccttcaaaatattgtgtccacagtcaatttggactgtaagttggacctcaaaacaattgcacttcaagctcgtaatgcagagtacaatcctaagcgttttgctgctgtcattatgaggataagagatcccaaaacaactgctctaatttttgcttctggcagttgtactggagctaacaacaatctagcagcagtatgcccgtaatccaaagctggcttcagcatgaagcaacccaagatagtcttgcttatatttgtctctggaaaaattgttctgacgggagccaaggttagagatgagacttacacagcctttgagaacatatatccagtgcttactgagttcaggaaaaaccaacaatgattactgtcaagagagcaggagcaaggtttcctggtagagaagattgcggaacaccggcttgaattgattgaactgtaaatatgaagacaagagatatctgtaatctggattgagttttaataagacatccctttttgttcttgtctttttctctctttaaaaaaaaaaggatcctgctttagtaaagtggaaggaaaaaaaactgtgtattgaatttgacactgaaaaaaaaagagatttagaagaggcagaatagaaaagaaaaagtgagaaattctaagcttgtttaggtatggttaactcaagtaagcangatctctcaccattagtgcgatgcaaatcattaatat

SEQ ID NO: 29068 - DNA, 2175 bp, Glycine max
  Clone ID: TF_GmC1803_1
ctatttatatcccacattctcaaccaattaaaacccatcccaatttcctctctcaaaccaatccctcagacccctattttctctctctctttcaaaattccaaaacccatcactaacaacattcttacaaatcccaaatcctatcttatcatataaaagaacccttcttacgaatccttcccgctctatcgaacaatgtctttttttccctatctgatttaattcatgcgaagatccaaaccctaatccactctccgagctcttatatttatttcacacatggttgtttcaaagaataatcaaactgaagaagaaactaaaattgaaattatggagatttttataaataaaatctttttcttctagtattaagccaagccacctctattatgtatcccataatatattcttttgttactttcatatgttaatatatagaactgaatccttcccactactctccaatcctttagtttaaactaaacaatctataagattgcttcaaggcaaaatcaaagaattgaaaacgtagttcattatagatttaaaagaaaaaagctttctgcggtcgttcagacatttcattatattgtgtttacattttttatggcttgtaaggtgttctcagccaatttacatttgaagctcgtaaagcacagtactatcctaagcgttttgctgctgtcattatgtggataagaaatccccaaactaagggacttattttagcttctgttaaaatagtttgaactggagcttacagtgaacaacagtatgctatagctgctatgaagtaagctcgtgcaatcccaaagcttgggctcccagttccaggaactgttaacaatattaaaaacatataaggttcatggatagaattatcgacagacggttggggtgcccctcatattccttaaatattgtgtccacagtcaatttggactgtaagttggacctcaaaacaattgcacttcaagctcgtaatgcagagtacaatcccaagcgttttgctgctgtcattatgaggataagagatcccaaaacaactgcacttatttttgcttctggcaagatggtttgtactggagctaagagtgaacaacagtctaaattggcagcaaggaagtatgctcgtattatccaaaagcttggcttcccagccaaatttaaggatttcaaaattcagaacattgtcggctcttgtgatgtcaagttccccatacggctggagggtcttgcatattcccatggtgctttctcaagttatgaaccagagctgtttccagggctaatctaccgtatgaagcaacctaaaatagttttgcttatatttgtctctggaaaaattgttctaacaggagccaaggtgagagatgagacttacactgcctttgaaaacatatatcccgtgcttactgagttcaggaaaaaccaacaatgattgtaattcaagaaagagcaggagcagtggtttggcagagaagttcgtggaactgtaaatattaagacaaaggatataatctagattgatataaattaaagacagccgtttgtgttgccccttgtctttgtttttttgatttgtcttgatgtagtaaagtggcagacgttgtctattgaattgacatttttgaaaaaaaaaaagagaaaagaggattttgaggtgtcagaaatgaggaaaaaaaaagtggagctaaatggaaaaagtagcacattgagtcctgacagtagcttgaaaatgttttgataacttctactatcaattgaccgtagtgtgatctaactactgagtagcattgaatatcttgatcaacaaatcgaaaatttgagcctgctaaatttgtaatcgttttcagaatttggtttacattgatagatggaactacttatttagtattttggaccttgattttttggttcatgtggaagcttgtgcaaatcatgaaaatcttccactgaagtggaaactatttatggttcatttcaactatgagcaactttgttttttagttaatcaagttctaaagcttaaggatagtgacttcgtatactgttcaaaacagcaacgacgtgtttaatacactatgttttatgaagctagcaacatctaggtattataatttcatattggaatttgaagacgttatgataaataaaacactacatttgataact

SEQ ID NO: 29069 - DNA, 1369 bp, Glycine max
  Clone ID: TF_GmC1803_3
aattcggctcgagctgttctctatatgtctctatttcttttctctctctataaataagcagccttacaactcttcttaatcccatcaaatcgaaccctttttaaacgctcaaatacaaatttctggcaccaaatccttcccactctcctcaattccattcatttcaactcaacaatctctcagatccgtcaaacaaaatataaaagatagaaaaccctagttctgtaaatatataaaggaaaaaagtttgcctcgagctcgagccgaatcggctcgagatcaaaacccatcacaattcacaacaacatacaaatcccaaatcctatcttttctcttctcatataaaagaacccttctttcgaatccttcccgctcttttccctctgatttaattcatgcgcagatccaaaccctaatccatctctccgagctctttgatttttgagttaataaaaaaaaaaaattagggtttgatggctgaccaaggattggaagggagccagccggtggatctacagaagcatccttctgggatcgtgcctacccttcaaaatattgtgtccacagtcaatttggactgtaagttggacctcaaaacaattgcacttcaagctcgtaatgcagagtacaatcccaagcgttttgctgctgtcattatgaggataagagatcccaaaacaactgcacttatttttgcttctggcaagatggtttgtactggagctaagagtgaacaacagtctaaattggcagcaaggaagtatgctcgtattatccaaaagcttggcttcccagccaaatttaaggatttcaaaattcagaacattgtcggctcttgtgatgtcaagttccccatacggctggagggtcttgcatattcccatggtgctttctcaagttatgaaccagagctgtttccagggctaatctaccgtatgaagcaacctaaaatagttttgcttatatttgtctctggaaaaattgttctaacaggagccaaggtgagagatgagacttacactgcctttgaaaacatatatcccgtgcttactgagttcaggaaaaaccaacaatgattgtaattcaagaaagagcaggagcagtggtttggcagagaagttcgtggaactgtaaatattaagacaaaggatataatctagattgatataaattaaagacagccgtttgtgttgccccttgactttgtttttttgatttgtcttgatgtagtaaagtggcagacgttgtctattgaattgacatttttgaaaaaaaaaaaagaggaaagaggattttgaggtgtcagaaatgaggaaaaaaaagtggagctaaatgggaaaagtagcacattgagtcctgacagtagctt

SEQ ID NO: 29070 - DNA, 1171 bp, Glycine max
  Clone ID: TF_GmC1803_6
cacactctctctttctctctcttcaaatcaaaacccatcacaattcacaacaacatacaaatcccaaatcctatcttttctcttctcatataaaagaacccttctttcgaatccttcccgctcttttccctctgatttaattcatgcgcagatccaaaccctaatccatctctccgagggtttgatggctgaccaaggattggaagggagccagccggtggatctacagaagcatccttctgggatcgtgcctacccttcaaaatattgtgtccacagtcaatttggactgtaagttggacctcaaaacaattgcacttcaagctcgtaatgcagagtacaatcccaagcgttttgctgctgtcattatgaggataagagatcccaaaacaactgcacttatttttgcttctggcaagatggtttgtactggagctaagagtgaacaacagtctaaattggcagcaaggaagtatgctcgtattatccaaaagcttggcttcccagccaaatttaaggatttcaaaattcagaacattgtcggctcttgtgatgtcaagttccccatacggctggagggtcttgcatattcccatggtgctttctcaagttatgaaccagagctgtttccagggctaatctaccgtatgaagcaacctaaaatagttttgcttatatttgtctctggaaaaattgttctaacaggagccaaggtgagagatgagacttacactgcctttgaaaacatatatcccgtgcttactgagttcaggaaaaaccaacaatgattgtaattcaagaaagagcaggagcagtggtttggcagagaagttcgtggaactgtaaatattaagacaaaggagataatctaaattgatatataaattaaagacagcctgtgttgccccttgtctttgttttttgatttgtcttgatgtagtaaagtggcagacgttgttctattgaattgacatttttaagaaaaaagaggattctgagtcagaatatgaggaaaaaaaagtttgagagctaaatggaaaagtagcacattgagtctgtccctgacagtagtttgaaactcttttgatagcatctactatcaattgagcgtagtgtgatctgactactgagtatggaatatcttgatcaacaaatcgaaaatttgagctgct

SEQ ID NO: 29071 - DNA, 3177 bp, Glycine max
  Clone ID: TF_GmC1803_5
actcacactctctctctctctcttcaaatcaaaacccctcacaaaattcacaacaacatacacacaaatcccaaatcctgtcttctcatataaaagaacccttctttcgaatccttcccgctctctctctctcttattctttttccctatccgattcaattcgcgcgcagttccaaaccctagtccccctctccgaggtctgatttcacaccccaagccccccaattcttgttttcttaaagaaaatttttaaagaaataagagggtttcgtttcattgggtgaaattcataaagaaaaatgttttttttggggggtttttttgactttcgagatctggggtgtttttttgtttatgttttaaaggttttatctttttgtgttttgagttgagaaaaagagaagcgaagttgatttttttttgttattggtactgattggtgttgaacatggtgggttttttttttcttggtgggcagctctgtgatttttgggttgataaaaaaaattagggtttgatggctgaccaaggattggaagggagccaaccagtggatctacagaagcatccttctgggatcgtgcctacccttcagtgagtatctgatttttgatgaacaaattacactttctcttttgattggcttcaatttcaattgcaagcttcagatggttgaatcttaagttgtggggttaccctttttgataatttgttagtgataagtatccaactaagtcaaccgttatgcttgtagagcctatccacagatcacactattgcaagttctcaattgtgtaggaattttgctcccttaagttttgtgacttttgtctatttggcactttaacagacttgttgagtgctatttttgaatatttatgaatactttacatttcttttatttttttatgtacgctttcaattatcaatcatgactgtgcattacaaatttggaagattttagattgcatccactattttagcgttagtgatcccactgcgtcctgctatgccactataggaatttcctaattgagttttaacttttaagaggtggctgtttatgttgtgatctactctctaccatttgttgtatttgattgataacatttgcttttatttatatttgaatgtataataattttgcttctattcacattggaatgctaaggattttgcttcaattttctctggattatttattaattttgtttttgtttacaatttactctggattatggaaataatttccttcaattttcattagcatacatgataattttttctctatttatgcggagtaatctaataatcaagctgtttgtaccgtcagaaatattgtgtccacagtcaatttggactgtaagttggacctcaaaacaattgcacttcaagctcgtaatgcagagtacaatcctaaggcaagtatcatttgcttgtagtgattttcactgaaatatgctatctgcacatgtttacatgtttctttttctgcttttgcatctgaattacaataaagattaactggtggttgtgcagtcacctatcctgctttctggattgttttctgttcctttctggaccagagaagtgtggttaatccaagactattttatatttatatcccacgtgatatcttctgcttgctattcagaatcattaattagcaaatgtattatacacgccagttctaattggtttgtggtatactgtactgatgtttgtgatgtgtttgtttgcagcgttttgctgctgtcattatgaggataagagatcccaaaacaactgctctaatttttgcttctggcaagatggtatgatcctttgctgcactgctatgtctatcttttagatgatagtagtgcattttgttatttttaatgctgtcctcaaattagttctatgttaatttatggttgtgtggttctcttgttgaattctttttggtattggttatattttaattaactatgtttatcaaaccaatggtcaaactggtgttatttagaaactctgtaaaattcaggcttgcctttgcccttagtatgtctttgaaggtgctagtaatgaggttgcaaacatggttgtcacttgtcagaattccttgaatcaactggttctatatagcatgatgagagaatcattaatttatgtaaaatggaaataaggaagatattctatttctaaatttatttttacagttttatttagcagaaaaccatatattttctcttgttttaataattgtgcacaattcttgcaatttactatacatttcaattcgtgatttagattatagcccttctggtctgtgattcatagtttgccaaccatggttgcaaaaagttgaaatttgtcttttccgctttctgtaatggctcttatttggtacccttcttgtaatggtttctctcgtgaactttaaatttaattttttatgactattgactaggtttgtactggagctaagagtgaacaacaatctaaattggcagcaaggaagtatgcccgtattatccaaaagcttggcttccctgccaaatttaaggatttcaaaattcagaacattgtcggctcttgtgatgtcaagttccccatacggctggagggtcttgcatattcccatggtgctttctcaagttatgaaccagagctgtttccaggactaatctaccgtatgaagcaacctaaaatagtcttgcttatatttgtctctggaaaaattgttctaacaggagccaaggtgagagatgagacttacactgcctttgaaaacatatatcctgtgcttacggagttcaggaaaaaccaacaatgattgctgtttcaagaaagagcaggagcagtggtctggcagagaagttcgtggaactgtaaatattaagacaaaggagataatctaaattgatatataaattaaagacagcctgtgttgccttgtcttaattttttgattggtcatgatgtagtaaagtggcagacattgttctattgaattgacatttttaagaaaaaagaggattctgagtcagaatatgagggaaaagtagcacattgagtctgtccctgacagtagtttgaaactcttttgatagcatctactatcaattgagcgtagtgtgatctgactactgagtattgaatatcttgatcaacaaatcgaaaatttgagctgct

SEQ ID NO: 29072 - DNA, 1471 bp, Glycine max
  Clone ID: TF_GmC1803_4
ctcgagccgaaataagcagccttacaactcttcttaatcccatcaaatcgaaccctttttaaacgctcaaatacaaatttctggcaccaaatccttcccactctcctcaattccattcatttcaactcaacaatctctcagatccgtcaaacaaaatataaaagatagaaaaccctagttctgtaaatatataaaggaaaaaaggtctgatagatacccattgtcaataagatctaattcttcacacacggatttccccacaatttcttaacgattataacctgattgcgggaaaaaaaaattgcccttttgttgatttttttttgtcaaaaacaattttgtgtgtgtataaaaccatccgtgatctgggttcttttaaaaattggttcttttgtgtattttgttacttttgtaaggaaaattgagggttttggtactgatcactgtggaacatggtggttttcgttgatgggcagctttttgctggttttgaggcatagcattaaattggattttgattattcatggctgaacaagcattggaaggtagccaacctgtggatttaacaaagcacccttctgggattgtgcctacccttcaaaatattgtgtcaacggtcaatttggactgtaagttggagcttaaatcaattgcacttcaagctcgaaatgcagaatacaatcccaagcgttttgctgctgttattatgaggatcagggaaccaaaaactactgcactcatttttgcatctggcaagatggtctgtactggagccaagagtgagcaacagtctaaattggcggcaaggaagtatgctagaattattcaaaagcttggtttcccagctaaatttaaggattttaagattcagaacattgttggctcttgtgatgtcaagttccccattcgacttgagggtcttgcctattcccatggtgctttctcaagttatgaaccagagctgtttccaggactaatctatcgcatgaagcaacccaagatagtcttgcttatatttgtctctggaaaaattgttctgacaggagccaaggttagagatgagacttacacagcttttgagaacatatatccagtgcttactgagttcaggaaaaaccaacaatgattactactgtcaagagagcaggagcaaggcttgattgaactgtaaatatgaagaccagagatagaaatatctgtaatctggattgagttttaataagacacctgtgtttgttctgtctttttctctcttttaagaaaagggatcctgctttagtaaagtggaagaaaaaaaaaaaccgtgtattgaatttgactgtagaaaaagagatttataagaggcagaatgaaaagaaaaagtggaagcctgtgcaaatcatgaataactttcactgaagtggaaactatttgtggttcatttcaactatgagtaactttgttttttggctaatcaaacactacatttat

SEQ ID NO: 29073 - DNA, 196 bp, Glycine max
  Clone ID: TF_4292721
agaccttcataccatagtagagtgccgaggttggaggatccgaatgccctgcatttgtgcggtacggatcttccatctgacccgttaacttgatcataaatcctactgttacaccatccagttgcattttctactcgctctaccttccattattgtctccacctgcaccggtactaaccccttcatctctattgct

SEQ ID NO: 29074 - DNA, 1235 bp, Glycine max
  Clone ID: TF_GmC2268_16
gatgcaatagaggggcgtttccacttcttgtttgaggggcgtttccacttcttgttagaggcggcttctttctcgttggatgagctggttgatattttgaacgtgccagtggccttgatgatagccgactcggcgtgctccaagagccaccggatggtcttgccgtcgaacttgtggtcgatctcttgggtcagctggaagatccgggcgacgcaggcgttggtctacggcattggtctctccgaggagagacatggccaagctgcaggtcggcgtctccttggtctggtgcgagggcaaccgttgtgtgacgacggacaactcttctctgccatggtggttcgcaagccgttgggcactggatcgttaacaaaggcaaacttcaattggaaaataacttgggcctcaaagcttgagaagtgttattgcatcgttgttctaccacaaaatgagttggaagtgaaagcagaagacacaacatacactataccatgccttctgctccttccaaactctacgcaggttctctgcattctctcaatcccttattcactatatatgcagggtccgatgttttgggcgatgatgatatcagagcagaaggtggctcatttggcattgaagccgttggggaggaacaatgcaattgatggaacgtgtggagttggaacgaaagaaccccagcttattttcgcttctgcagacagtgagtcttatattgtatacttaggatcacattctcatggcccaaacccttcagcaagtgatcttgagtctgcaacgaattcccattacaaattattaggctcacacttggggaaggagtggaatgcttcggggcctatgcacgtggatttgctagagggtgccttgcaacgccaaacatcagttgaactccaaactaatctctggtctccctggctttccaaggatggaagtcttgtactgagcgtccaaaaccaccttgtgagttcaaattgaatattgaatttcattttcttttacacattggacatttatttctcaagaaaacgagggctctgttatctgttggtagtgtctggtattttacatgtttctttttacttataatttcttgcagcactacctgaaaagtcatggggttatatcccagggctatagctctccctggtattttacatgtttctttttacttataatttcttgttgatgatgggcatacagagtaaatattttatattattatttgatca

SEQ ID NO: 29075 - DNA, 1887 bp, Glycine max
  Clone ID: TF_GmC2268_8
ccacgcgcagcagctaaaccgcgatctctcgaactcttgaggggcgtttccacttcttgtttgaggggcgtttccacttcttgttagaggcggcttctttctcgttggatgagctggttgatattttgaacgtgccagtggccttgatgatagccgactcggcgtgctccaagagccaccggatggtcttgccgtcgaacttgtggtcgatctcttgggtcagctggaagatccgggcgacgcaggcgttggtctacggcattggtctctccgaggagagacatggccaagctgcaggtcggcgtctccttggtctggtgcgagggcaaccgttgtgtgacgacggacaactcttctctgccatggtggttcgcaagccgttgggcactgaattgttaacaaaggcaaacttcaattggaaaataacttgggcctcaaagcttgagaagtgttattgcatcgttgttctaccacaaaatgagttggaagtgaaagcagaagacacaacatacactataccatgccttctgctccttccaaactctacgcaggttctctgcattctctcaatcccttattcactatatatgcagggtccgatgttttgggcgatgatgatatcagagcagaaggtggctcatttggcattgaagccgttggggaggaacaatgcaattgatggaacgtgtggagttggaacgaaagaaccccagcttattttcgcttctgcagacagtgaggaaattgttgatgattaaacttacttttaaattagcaagatatatagcttttcttttctttctgtttggtccctacttaattatgattttaatttatttgggcttagaacaagtttattaattgtttgggcttacaaatgtgcccgttacaaataccaagtgagcaatctatttcccaaaactgtttgagctatatttacaacaataatttgcatcatacatgcgtactcccatgataaggttattactttaatatctgaaaattaaatttattattttctaattatttactttgaagatttagtcatcatgaagagtgattttgaaagtttgtttccctacatgattgattgattgtgttcgatgttgctttcataatgaagtccaattctatcacattgttgacttatcacttcaagaacaagtgaaactatatgcaggtgaaagcatagcttcaagttgacacatcacatagaggaactgaggaacatataatgggtttctctgttttacaccttatttcattgttgcttctttggtattttttgcttgtgccagttatgcttataaatttcagtggttttttaagttttgtcttttctttgttgcagtcttatattgtatacttaggatcacattctcatggcccaaacccttcagcaagtgatcttgagtctgcaacgaattcccattacaaattattaggctcacacttggggaaggagtggaatgcttcggggcctatgcacgtggatttgctagagggtgccttgcaacgccaaacatcagttgaactccaaactaatctctggtctccctggctttccaaggatggaagtcttgtactgagcgtccaaaaccaccttgtgagttcaaattgaatattgaatttcattttcttttacacattggacatttatttctcaagaaaacgagggctctgttatctgttggtagtgtctggtattttacatgtttctttttacttataatttcttgcagcactacctgaaaagtcatggggttatatcccagggctatagctctccctggtattttacatgtttctttttacttataatttcttgttgatgatgggcatacagagtaaatattttatattattatttgatcatcaattatcagt

SEQ ID NO: 29076 - DNA, 770 bp, Glycine max
  Clone ID: TF_GmC18388_2
ggatcttccagctgacccgagagctcggccacaagtccgacggcgagaccgtccggtggctcctggagcacgccccgccggccagtgtcgaggccaccggcaccggtacagttccggccatcgcggtctccgttggcggcacgctcaaaatcccaaccacctcatcgaacgagaaagaagccgtcgccgacgcctcaaacaagaagcggaaacgcccctcaaacagcgagttcgtggacataaacataaacgacagcgtttcgcagtcgtccggtctggccccggttcatgtggcgcatggcctggtcccggtctgggccgtgactaaccccagcatggtggtccccgctaacgccttctggatgacacccaacccccccatgggacccgcaaaccagcagcatcagttatgggccttatctccctccgtcttcaacgtcgcggccaggcccatatcgcctctggtcacaacaaatattccagaagcatggcccattatgacggcgtgcagtaacgactccaactccgccgttagcacgagcacggtgggggctaaggtggcaacggagtccagcatggcacccagtgttagttctagtgggaccaagagtgccaggactcggctattaagggatttttcgctccaaatttacgataagcaagagttgcagttcttgggccgctctgggactcacgcgcagagttagctgctagcaacttttttatttattttatgtccaggtcaataaatgtgaccatgtgcaaataaa

SEQ ID NO: 29077 - DNA, 250 bp, Glycine max
  Clone ID: TF_LIB3093-012-Q1-K1-E3
ttcacgcgtccggcatcctgatcggaaaccgtcttctgcggctactgtcgagcatgcatgaacgacgtctttcagggatgggatggtcagaggaagcggctgtgatatagttcaagttgaaggcggtcacattgtgcgctccacaaggcataaggaccgtcacatcaaagtgtgcactctcaaaggccctattgaccgacgagtgaggttatcggcccacaccgccatccaattttacgacgtccaggac

SEQ ID NO: 29078 - DNA, 1830 bp, Glycine max
  Clone ID: TF_GmC539_1
ggctcgaggagagagagaaccaaaccaaaccaaaccaaaaccatggtgtgaaaaacttgacatggggggcatatagggagtagatggatcccaagggctcaaagcagcagcagccacaggaggtggtaccaaaattcctcagcctcccccaacaccactaccaacaactcaatcaatagaggacccatcatttcctttcccttattataattattattatgaatttttttttctttctttctttgggtgtgctgttgatggatcccaagggctcaaagcagcagccacagcaacacaggaggtggtaccaaacttcctcagcctcccccaacagcaacaagggaataccaacaacaacaacatgggagagaacaaacctgcagaggtgaaggatttccagatagtggtagctgagaacaaggaagagagcaagaaacagcagcaacagttggcaccaaagaggagttccaacaaggacaggcacaccaaggttgaaggcaggggaaggaggataaggatgcctgctctctgcgcagccagaatcttccagttgaccagggaattgggtcacaaatctgatggggaaaccatccagtggctcctccagcaggctgagccatccatcatagctgccactgggactggcacaataccagcatctgctcttgctgctgctggaaactcactctcaccacaagctgcttctctttcatcatccttacaccaacatcaacaaaagattgatgaattgggtgggtcaggggggagtagtagtagggccagctggcaaatggttggggggaatttggggagaccccatttgggtgtgggtgtggccacagcagcaggcctatggccccctcatgtcagtggatttggatttcaaacaccaccaacaacaacaacaccaacaacaacaacatcatcatctggtccatctaatgccaccttagccactgagagctccaattaccttcagaaaattgcattccctggctttgacttgcctacttctgccactaacatgatgggtcacatgagtcctgctaaggatgattctcaaggctcaggaggacagtagtagagttttattatggatttggatgaaaagaaacaggaaagaaagaagcatcattgtgcagatgctggctgaggtttctacaatggcttttgtattgtagtataattgggagactgtgaggaaaagaaaaaggtgatcagcatcatcagcagcaacaacaccatcagcaaactcctgctaaggatgattctcaaggctcaggaggacagtagtagagtgtttaattatggatttggatgaaagaaagaaaaagaaaaagaaagtagcatcattgtctagatgctggctgaggtttctagtttctacaatggcttttgtattgtataattgggagactgtgagggaaaaaaaaaataggtgtctcagagaattcaatagaaagctggatttggtttacccctttggtttaccccccccatattgtttcttctccccagtactcaagtctccatatacaggtggaattgcatggccagatggcttggctgctttggtctggccttaaaaaactattgtttaattcagaggtgtgttgattattttgttcttctctaggtcagggtggagtgctgatcggtttgttttgtgaatttgaagatatagtttcataatcatatttgttaaatttcatattggatatggtatttagtacttttatgtcatctgggaaattttaatctttgtgtggaacagcacttgcgagttacatctgtgaagccttcaactagtactttatcatctgtgattta

SEQ ID NO: 29079 - DNA, 1490 bp, Glycine max
  Clone ID: TF_GmC616_1
gaacctgtctagggtttctgtccattggaaattgcaaaatctgcatatgtaaacatgttcccttccactaattatacctcctcaggctcttaccctcgtttcccttcatcttcttcttccacttcaccctatccttcttttactctccttcatcctgaaaattcttcttccagcaacaacacctttcttcatgatccacttgctcttacctacataccctctcattaccatgctccaatcccagaaacactagccaattgggcagttgcagattgtgcaatactgaatcaggatctaggtggtgccctttatggcatcaccaagaaaccaatgaagaaagcaactaagaaagacaggcacagcaagattcatacttctcagggtttgagggacagaagggttaggctttccattgagatcgcacgcaagttctttgatcttcaagatatgttagggtttgacaaagccagcaacacccttgactggctcttcacaaagtccaagaaggcaattaaggagcttactcgaagcaagcacagtgttgaaagcttcgagttctcctcatcttccgagggtgaagtagtttctactatccagcaacaagacctacaacaacaacatgggataaatttggaaaatgggaagttgaaagaacctgcagcttattgtgttaaagcaaagatgaaggaatcaagggaaaaagcaagggcaagagcaagggaaaagactagtagcaaggtattgtgcaacacaagtggcgaagggaaggtgcaagagttgaagaaaaagtgccctgcaactgaaaaccctcaaatcctgaaccagttaaggtcaacccttcaacctcctcatcctcaaaatgtgggtggagaagtgccaagagatgatgacttcaacgttattgaggaatccattgtcatcagaagaaagttgaaacacactttgatgtcttccaatattcatcatcaaaacgctgtgatccctaaggaagcaagtgtaaacaacagtgactaccactccttccccaatttgtctccaaattgggaagctaataatggtgccaatggacgctccaccttttgtgcaatagccagcatgaatctgtctacagggcttcaaatttttggaaaatcttgggaggagtgcaccaatcctcatccaagctaatatgttagctttcagtattatccgatgattgtctctagtgttttgctaagaaacatcatggtcatggaggcatctttctgtgtttttctacctgtaactttttctgtcctatatttcctttctacaatgtactgattttttgttgttgctctatatcagccaagaagggcatgtgacagttggcaaaaaaggatgcttcgtgtataatttctgaccaatattttaagtgtggctgatattataagggtcaaatatatttatcaggaaccgtcctttcttttgctagctgatttcaatttttatataattagtttttgatcaat

SEQ ID NO: 29080 - DNA, 1482 bp, Glycine max
  Clone ID: TF_GmC12923_1
ttttttttttttaaggcattcaaatctttccctttaaattcttttgtttgaattgttttttatgctgtcatacatagagagaaaaaagaagcaaataaagtaaataaaaataaaaataccaaagccaaatttcctcctatacaaactctctctgtctgctaagtccctttggaccaaaaccaagctgtaaaataaataaacataccaagatctccaaatgaagctaaagaaaaatgcacttcttcgaaagagaagaagtacaaaaaaacagtgactagagcaacatctaattagaaactcaactcaagtactgtgatgagctaactagcatgcatccatagatatttcaaaagcactcactaatcacaaattcattcaactcaacttccaaccaaataaagttcattgggagctattaggatcatcttctccactctcacttggttgagattgatgctgatgttgatgatgatcggaattaacattcaaactagcccttgtgtaagcattaagtgctgccaacatgcccaagttggagtcggacatggcgaggcccagatgctgttgctgcggcattgacatggaccccaactgaagcgaacccgcacgtgcgccttggaattcaagtgcacccggaaccggaaggttgaaccttggcatgaaaccactcacactttgaggaaacggccacatctgagtctccgaggaagcagaagacgaagcccccgcggtaacgggaagcatccaaattgtgctaccagggggcccactggcgggagagggtgccacggcccacatcgctgttgcgggaagcaaattgctgggccgaagaagcccagaaccagcttcggattgctgcttcggtaacttaggcgaagacccatcaccatcaccgctctcgttctgcgattgggtattgttgttgttgatgttatcgtctttgaagagatcttctcggtagcgttttctaaggtagttgtcgccggagtcaccggcgccgctgggaagggattctgggatgtgatcggcggagagaagctgctgcggttgatggtgagggtggaagccaagtaagagcggggtgttgaaaggcttcgtcgtaagggtggtgagcgagtgcgagggcgccatgaaaggtgtgcggggctgatttggagggcggggccgagagcgtggagccgctgctgcgtaaggagacgttgagggaggagaaattggcggggatggttccggttccggtggcggcgatgatggcgggctcggcctgctggaggagccattcgatagtttcgccgtcggacttgtggcccaattctcttgtcaactggaaaaccctagcggcgcaggtggcgggcattcgaattctgcggccgcggccgtcgactttggtgtgcctgtccttggtggatcgcttagggttggcggtggggatggctagggaggatgaagaagcaggactactagctccacctgtcagcttct

SEQ ID NO: 29081 - DNA, 2000 bp, Glycine max
  Clone ID: TF_GmC361_1
aattcgtctctctctctctctctctctctctctccacacagagaacaactcagctgcaatctcccatctgaaaggaattccatgctccacaaaacacacaaacagagaaaagagagacccactagcccactaagcgatacaaattgagggtcacctcatcacctcctagctactacacacaaacacaacaacatacataggaaaaaaaaaatatagaaaaagaaatctagtggcagtactactactacttccactatagctgctagctaccagataggagaaagagaaagagtgagactttttttttttaataccccaccaattcatttatttttcttcttttttttcattaaaaaaaaaaagtgcttatagagaagcttggttatatgagataacaagatcatggaattggaggctgatcatcaaaatgggatccgaagcaggcccaatttccctctgcagctgttagagaaaaaggacgttgatgacgtcaccgaacaaccttgttccaccaccagcgtggtaactactgctgctgctactattacttctggtaacaacgacctccacgtggcggagcagtcgaagaagcctccgccaaagcggagttccacgaaagaccgccacacgaaggtcgatgggcgaggccgccggattcgcatgccagcggcctgcgccgcaagagtgttccaactcacgcgtgagctgggacataagtctgatggtgagaccatcgagtggctcctccagcaggcggagccggcggtcatcgctgccacaggcaccggcaccattcccgccaacttcacctcccttaacatctccctccgcagctccggctccaccatgtcggcgccttctcactacttccgcggaaactacttcaaccctagcacgttctccacctcagccgccgctgcttccgcggcggcggtggcacagctaaggagccgcgcggagtgggaccggaacatgagcatggtgatggaggattctcgtaggagcatgctggagaacacttcttccatctccgcaattttgaatttcaaccctatgggtaacgtcaatgtaattcaacaagcgaaacaagagcttcgagaagaatccgccgccgccggtggcggcggcagtcttgattcggtggcttcggattccgatggaagcttagggagaaagagaaggccagagcaagagctatcacaaatgggaagctacttgatacaatcaagcacagggtcgcttccgtcgagccacgcttccaatacggcggcgttttggatggtggccggtcacggcaaccaagccatgagtggtggtggtggcagcgatggtagcagcgataatcccatttgggcaattccctctgttgggaatagcggtgtgtatagaggagctatgtctgccccaggtggcattcatttcatgaattttgcttctccgatgaaccttatccccggagctcaactaggttccgccatggttgggggcggaagtggtggcggcaacagtggttctcaacttctaagtgaaagtaacttaggcatgcttgcagcccttaatgcctacaggcagattccggctaacggcgtctcggagtctccggccagcgccgggcaacctcacggcggagacgatggacgtgattcctccggtcaacattcctgagggtaaaaataatcacaagtgtatgatctgatgctagcttcttaatttttcttttaattactagtatattattactagtgctactattactactattagttctacaactaattagtggtttctataatatatatatatatatatatatatatatatatatatatatatatatatatatatataaatatattaaatacgtaattatatatgttatgtccatttgcaaaaacatgcaagaagcgcaagtttgattgcttattgagttcagattgtggtgtgatttttttgctgaggatgatcatgttagggttcaatacgtatactttaccaatggt

SEQ ID NO: 29082 - DNA, 1637 bp, Glycine max
  Clone ID: TF_GmC361_2
ggctcgagaaaagtgcttatagagaagcttggttatatgagataacaagatcatggaattggaagctgatcatcaaaatgggattcgaagcagactcaatttccctctgcagctgttagagaaaaaggacattgatgacgtcacggaacaaccttgttccaccaccagcgtggtaactgctactactactgctattactactactactacttcagataacaacgacctccacttggcggagcagtccaagaagcctccgccgaaacggagttccaccaaggaccgccacacgaaggtcgatgggcgaggccgccggatccgcatgccggcggcctgcgctgccagagtgttccagctcacgcgtgagctgggacataagtctgacggcgagaccatcgagtggctcctccagcaggcggagcccgccgtcatcgccgccactgggacaggcaccattcccgccaacttcacctccctcaacatctccctccgcagctctggctccaccatgtcggccccgtcgcactacttccgcggaaactacttcaaccctagcacgttctccacgtccgccgccgcggcggcggcggctcagctgagaagccgcgcagagtgggaccggagcatgagcatggtgatggaggattctcgaaggagcatgctggagaacacttcttcaatctccgcaattttgaatttcaaccctatgggtaacgttaatgtaattcaacaagcgaaacaagagcttcgggaagaatccggcgggggcggcggtcttgaatcggtggcttctgattccgatggaagcttagggagaaagagaaggccagagcaagaactatcacaaatgggaagctatttgatacaatcaagcacagggtcgcttccggcgagccacgcttccaatacggcggcgttttggatggtggcgggtcacggcaaccaagccatgagtggtggtggcagcggcggcggtggcaacaatggtagcagcgataataatcccatttgggcaattccctctgttgggaatagtggtgtgtatagaggagctatgtctgctccaggtggcattcatttcatgaatttcgcttctccgatgaaccttatgcccggaggtcaactaggttccggtatcgttggtggcggtggcggcggtggtggcaacggcggtgctcaacttctaagtgaaagtaacttaggcatgcttgcagcccttaatgcctacaggcagattccggcgaacggcgtctcggagcctccgggcagtgccgggcaacatcacggcggagacgatggacgtgattccaccagtcaacattcctgagggtcaaaataatcacaagtgtatgatctgatgctagcttcttaatttttcttttaattactatattattcctagtgctattattactactattagctctactactaattagtgatttgcataatatatattaaatacgtaattatatatgttatgtccatttgcaaaaatatgcaagaagcgcaagtttgattgctttggtatattgagttcagtttgcggttttggttggacctttggtgtgattttgctgaggttgatcatgttagggtttaattcgagaagaaattaatacacgtatattttaacc

SEQ ID NO: 29083 - DNA, 2373 bp, Glycine max
  unsure (1)..(2373): unsure at all n locations
  Clone ID: TF_GmC430_1
cttttattctccgtctctctactctcttattctcaacgtcaaacccaaaaccccttcttcttcttcttcttctctcgcgccgcaataataatactaaaacatgtccaactctgatggagccactaacgccgtccctcccaacgacgccaacaacaacacaatcgttgagtaccagcagcgaaccaccaccaccaccaccgccgccgccgccttttgtttggagaaccctatcgcacagacaccgccattgacgggaaatgttcacatcagatcgttcctgaaaaggtcaagaaaggattagggggaaaaaggtgaacgccgaaatggaggcagtgcaggccatacgctcaagttctctgagtaaggttctccaacagacgcccccctaccacgcacctgcacacccaccgaaaaccccgtaagacagggtcgtccagcaccccccggctccttacgctccattgctttcacttccttcacatgtcgaactccgacgccaccagcacggaccgctatcggcgcaatctcagagacgcagagacagcacaggcaatagggggggaaggccttcgccgtctaagaaaccgccttcaaaggatccgccacagcaaggtcgacggccgcgggcgccgcattagcatgccaatcatctgcgccgcacgtgtgttccagctcacgcgcgagcttggccacaagtccgacgggcaaaccatcgagtggctcctccgtcaggcggagccctccgtcatcgcctcccccgccagcttttactctgtttcccttggctgcaacaaaagatgttctgccctgttctcatgctccgcccccaggccccagcaactcgctcccactcccttcatcctcggcaagcgcatacgcaccgacgaagactcttcaaaagacgaagatggttcagtgggcccctctctcgtggggccgtatgcccctcccggaccaggggtcgtcccggcctggcccgatttcggacaaatttggagttttgtcgccgccgctgctgctcccgaaatggtgtcggtgccgcagcagcagcagcagcaggcttcgttgttcgctcatcaccaccgtcagcagcagcagctggccatcggagaagctttggcggcgagggtgggaaattaccttccgggacatctgaatttgctcgcttcattgtcaagtggacctgggaattctggtcggagagacgatgagccgtcgttgattgtgacatctcttcaacggtggcggtgaggatggttgtggactgtggtggggtggtgactatgcaaagaatgtgtttttttttcttcttctcgtgttgtggacttgctttagttgtgtgtcagccaagcaagagattcttaaggatatgttttgatcaacctttgatttatcttacattgaaattagggttttttgttttacttctgctggtttggaaaacttaactaggtttttagatgttggagttttcaccttggttcccgtgattttttttgattctggtgctgtattggaagagaggagtatgaaaaagggagaatgtaatgaacggatgatttaatttgtgaaattgtgatggagagagagagttgggagcttccggttggtggaagagtgggagtggttcttcgatgggtctggagaggatgagcgtggagcagctgaaggcggtgaaagagcaagccgatctggaagttaatcttctccaagacagcctctccaacattcgcaccgtcaccacccgcctcgagatcgcctcctccgccctcaacgatctctccctccgcccccagggcaaccacatcctcgtccccctcaccgcctccctctacgtccccgccaccctccacgatttccaacatgtcctcgtggacgccggcaccgctacttcatcgagaaaaccatgcccgaaggaaaagtgttgtgggcacgttttatgagattgcggttcttgtaaggtggtcatgttgtgaatttggtgcacctgcgggggacttatgctctctgaccctatctcctccactttcacactccttgatggtctttgttgttttcagaaatgactggtgagtgaaagatgaaaaaaagaagaagaaagctctggttgtactccgtatgacttctgttttgagatttttatcttcaattcttagccatttattagattgatcagcgtgagaataatgttttcttgtatgtaagtggattgttttgggtgccagtgatttgaataaaaaactcatcttttcttcaaaatacattatctcttattcgagaagactgttgctgttcccgtaagaagaatcaattatttcagtgtgctttctgttcttaaaaaaaaaaaaaanagannnnngaggggtaagggga

SEQ ID NO: 29084 - DNA, 2079 bp, Glycine max
  unsure (1)..(2079): unsure at all n locations
  Clone ID: TF_GmC909_1
cccacgcgtccgtccacgcgttctgctgttgactccacttattcaccaatttaggctatatgcaatcaaatttgcaaaacacaagtttgaaaccttgataaatattgttgttccattggcatcaaaagtaaggtgcacaattcgtccttcaccataatttgcatgaaatcaaacagtgataccagcaaatagtgacaagcagaaaattcatactgaaactaggaggttcattgtagaaggtggaagaagagaagttttccacgaagaaaaaccaacaacaacaatgaaagaaattatacaatgatcaacagcacaaaagaagctgattttccactaaaacaagaaggtctttcatcaggtgatcatgaaaaggctaaggctccatcgacctcatcatcatcatcacaatggctaaaactgaaggatccaaggattgttcgtgtgtctcgagccttcggaggaaaagacaggcacagcaaggtgtgcacaataagagggctaagagatagaagagtgaggctttcagtccctacagcaattcacctctatgatctccaagataggcttggactcaaccaaccaagcaaggttgttgattggttgctcaatgcagcaaaacatgaaattgatgaacttcctccactttctattcgtccggctaacttcaccccttggtaatccctctgttgattgttgtcttgaagttagcacctctcgtgaaggttcaggccagaacactttattgtggaaaccaaaatcaggagaaatggttagtgatgataaagcaaattggatgaatagaagtgaaggagatgatgacaacgcgcacgaccatactatcggtaaacaaggaagcaataataatatttgtcatggtggtacacttgttttgccaaataatctcttgccaagaccaaaccatccttcttttttgagcttgatgaacattatgccatcacttggttaccaatgggaggctaattattcagctcatgatgttaatattggtcaatggcaaaaccatggatttcttaaccaaacagatgtacacagcatcaatgtggttccatttccatcaacattggctctatcaactgggaatgatactactactacttctcagattttggtgtgtcctcctcatggagcaacaacacagccatattttccttcttcacatcatgttgcagcaatggagatgaatgcaagacaaatcaaccactatcagatgctgagttcaagttctcatcaaaatctcttggcaaattctctcaatccatcatcacagcaactcatgagccaatcagagaaattgccattcagcttgggaattaggcctaaacttttccattctcctaacagaagtgaaagccattcccaaaaagaccaggatttgccttccaagtgatgcacaaatagtgcaaaataaagttgtcaaaatttcttctcctcacaagttatggattgatatcatgagggcagtgtgagaagttcattattatagttgcaagacatctttttattcaacgttttgcggtttgaacaaacatttcgttttagtcaaagttatgtttggttaattttctgattttccattcagtttgatctatatggataccaagcaaaggtctacaaaagaatggctttttttcaagggtaagagcttatcctgaagtgatagtgtgattgctacgctaaagggaacgcatgctcagataagttctctctctctctctctctctctcttctacattgagaaaggttggaaggttgaataataatgttatcattttgatagtgcgttttggatttggttaaacatgtttttcgtttgaatcagacaggatttctcagtgtcctatgttatatattatgtctaattttgttaattatagtacgtttttattaaggaaatcatgttttattctttacatcttatgtgtttttccatgagatgagactgagaaaaataatttctccttcatgagttcatgtacactcacccggcacatgaaaaatgatgcatagacacttgtttgcttgtgtttgtatatattccatgcatgagannnaacatgc

SEQ ID NO: 29085 - DNA, 757 bp, Glycine max
  unsure (1)..(757): unsure at all n locations
  Clone ID: TF_GmC355_2
ccacgcgtccgggaagtgggaaaattgaatggcaggaacttttggaagaggcagaagcaagtttcagagtggtggcagttgcacaagcaacaagaagtgcaaagctgggagtgcaaggaatcaacaacccattaggaataagtgcaaagcttcattaaaagctggaagaggaaaatcacaacaggggtctgactctggatcctaacaggaattatcatcatcatcatcttctgcatcaacaacctcatcatcaaaatctgattctaaattcaagaaggcatgtaacaaaccaagaagaccaagaatctcatcctcaccaattccatatccaattccaacaacaaagggaacaacaatcctacacagctttagacacggaactcttaaacccactccaaccaccaaagaaacggtcttgccgcccgcctcttccgccgccaccaccttcctcgcttactttatccgaacatgcaagaaaaatgggagaaccacaacaccctcaccagcaccatcaacaagcagcagcaacaccgtcgagagcggcgatgagaggcggcggcggcggcgagattgtggaggtgcaaggcggccacattgtccgctccaccggacggaaggaccgccacagcaaggtctgcactgccaaaggcccccgagaccgccgcgtgcgcctggcggcgcacaccgccatccagttctacgacgtccaggaccgnctttggctacgaccgtcccagcaagggcggtcgactggctc

SEQ ID NO: 29086 - DNA, 1818 bp, Glycine max
  Clone ID: TF_GmC430_2
ctccgggggggtgactctcttattctcaacgtcaaagccaaaacccctccttcttcttcttcttctctcgcgccgcaataataatactaaaacatgtccaactctgatggagccattaacgccgtccctcccaacgacgccaacaacaacacaatcgttgagtaccagcagcgaaccaccaccaccaccaccgccgccgccgccgccctcgccgtcaagaaaccgccttccaaggaccgccacagcaaggtcgacggccgcgggcgccgcattcgcatgccgatcatctgcgccgcccgcgtcttccagctcacgcgcgagctcggccacaagtccgacggccagaccatcgagtggctcctccgccaggcggaaccctccatcatcgccgctaccggctccggcaccactccggcgagcttctccactgtctccgaccacaagcccctcctccctccccctacccccttcatcctcggcaaacgcattcgccctgacgacgactccgccgccaaagacgacgccgtctcgctcgtcgccccccccacgccgcccgccctctgggccctacctccccgccccgacttcggccaggtctggagcttcgccgccgcgcccgaactcgtgtcggtgtcgccgcagaattcaatgtttcaccatcaccatcaacaccaccagcagcaacagcaacaggccgccatgggagaggcctctgccgcaaggctcgggaattacctccccggccacctcaatttgctcgcctcgttgtccggcggccacgggaattccggccggcgggacgacgagcctcgctgaatgaatcaatttctgaaattatgatggatttgattgtgatcttcttcgtatataaatatatgtattattgtgtgtgggtgggtgagtttgtattttgtctctgtgactttgttgttgtgtgtggactactgtggacaaggagaaggattgaagattcttagtgaaatttttagggttagttttttttttatttttaatttttggtagtatttcgagtggacaagtccatgaattaaggaattcaattggattattagggttttccttgtttggaaaactgattaggttacttgttaggagatgatgatgaatttgtttagaacattgctggaggagagacaacagagagtatgatgatgagatgaataaccagggattgaggcttggaagtgggtttcaggacctcgatccattgatcggtatgcagatgcagatgcaaatgcaaatgcagacgcagatgcaagtgtaatgaaatgaaaaattaatttaatgatgttattgtggaaaatatcacaccagagtccaaggcgaatgaattcaaggttaagcttcttcttgtttcttctgtctcgctttcactgtgggttttgatcaacttgacttactttctttcactttcctaatttgctcattaaaagtgattagtgttcatagtcttagtttgagtgattgtgtgtttgacaatcaagcgtcactcccattttcttggagtaaacttctttccaatgtttattgagaattcatgttattgcgcatcattgaaggattgtggtccttctaattatgcattctaccttgcttagttgctctctccttcactttcggggatgcctaacagcctgcttctgcaatgtaagacctctgtttctagatttttatctgaaattctcagccatttcttagattcgtcagcgtgacaataatgtcttttctagtatgtaactggatttccgtggggtgttagtgaagtgaataaagacccatctgctcatttctctctaa

SEQ ID NO: 29087 - DNA, 2221 bp, Glycine max
  Clone ID: TF_GmC430_5
cttttacgttttcttaacatttttcgggaatgcgagctgaaatgtcaatcatcatgacatgagattggtcctctctatattgatcgcacaatgtatcacaggaaatataggaagagacgtagtggggtccagcacccatgtgccctcctcctgtctccaccagctgctgccgctcaatgattagagccctgttccccttcaagttcaagttcaattcccacaccaaggaaactctctcatctctcaaacccaacaaaaaaaaaccattactttacttcactttacatgtcgaactccgacgccaccactaacggcgtcagtaacggcgccatcattgatgcgcagagacagcaggccttagccgttaagaagccgccgtctaaggaccgtcacagcaaggtggacggccgagggcgccgcataaggatgccaatcatatgcgccgcacgtgtgttccagctcacgcgcgagcttggccacaagtccgacggtcaaaccatcgagtggctcctccgccaggccgagccctccatcatcgccgccaccggctccggaaccacccccgccagcttctcctccgtctccctctccgtccgcgccgccgccaactccctctcctccccttcctccacctccgaccacaagccccagttactctctcccactcccttcatcctcggcaagcgcatacgcaccgacgaagactcttccaaagacgaagctgtctccgtggggccctctcttgtgggcccttctactcctcccggactgtgggccctcccggcccggcccgatttcggacaaatttggagcttcgccgccgccgctgctcccgaaatggtgtcggtgtcgcagcagcagcaggcttcattgttcgctcatcaccaccgtcagcagcagcagcaagccatcggagaagcttcggcggcgagggtgggaaattaccttcctggacatctgaatttgctcgcctcattgtctggtggacctgggaattctggtcggagagacgatgagcctcgttgattgtcacatcttcaacggtggtggtgatggtggtggtcggtggtgttggtgtttttttccgtatatatgcatattctcgtgttgtggttgctgtttttgttgtgtgtggcaagcaggagattcttagggttaggttttttcttagatttgagtggagaagtccatcgattaagaaattattcaattagggtttttgttttacttcctgctggtttggagaacttaactaggtttttagatgttggttaattgctttagattccggggctttgttggaggagaggaggggaaaaaaaaggggagaatgtaatgaactgatgatttaatttgtgaaattgtcatggtgagaaatttgtaccgattgaggctggaattgggtttcagaagcttggtccgtgtgcgagtgcagttgaatttgtaatgtaatgttgttgtactcaaagagagttcttctaagttgaagagcatggattggattgcattgttgcttctgtttcactttcatagtgggttattttgggctttgacttactgggtctacaagtatggtgtggttgaagtggttgcagttgaggtaattagtgcttgcaagcttgtttctgaagccagtgaattgtgtttccaaagttcaattgtcagtcccagaatgttggagtaccctactttccaacatgggttgagaattcatgtctcttggatgttgttggggcatgttttgagggattgaggttcatgtaaggtggttatgttgtgaatttggtgcagctctctgactctctcctccactttcacgctccttgatggtgttttattcgttttcagaggtgactggtgtgtgaaagatgaaaaaaaaaaagaagaaagctctggttgtactctgtatgacttctgctttgagatttttatcttcaattcttagccatttcttagattgatcagcgtgagaataatgttttcttgtatgtaagtggattgtttcgggtgccagaataaaaacccgtctgtttctttctttacctcttttcttcacttgtcactttctttgtttctatgtacacgggaacttgttttgctgcttgatgacgattcaattatttcagtgtgctttctgttcttaaattattgtagccaaattgacccttttcttttctgaatgtgttgtggcctagcaatataatattataggagtaaattc

SEQ ID NO: 29088 - DNA, 1594 bp, Glycine max
  Clone ID: TF_GmC18388_1
acccggcacaccgaaaaaaaaattctttccgggctccttccttgaatttcactgaagccataaaaccaaactcattcactagactttttatagacacaaatcagaaaaaagcagttccaattccctcttggtgcttcgtgctccatctcttccaattgatggatcaagacgacgacgaagcaggaacaacgaacctcagcaccagcgacgccgacgtggcagagaaagaaaccacaaacaacctcaatggagtccccaaacagaacaacgcgtttgaagaaacaacaggttttcaagtcttgccgctgaaaaaggaggagccaacatattcggaccctgacacggagattgttccggtcaaactgccaaagcgctcctccacgaaggaccgccacaccaaagtggaagggcgcggccgcaggatccgaatacccgccacctgcgccgcgcggatcttccagctcacccgagagctcggccacaagtccgacggcgagaccgtccggtggctcctggagcacgccgagccggccatcatcgaggccaccggcaccggcacagttccggccatcgcggtctccgtcggcggcgcgctcaaaatcccaaccacctcatccaactctaacgaggaagccgccgccgccgccgcctcctccaacaagaagcggaaacgcccctctaacagcgagttcgtggacataaacataaacataaacgacgccgtttcgcagtcgtccggtctggccccggttcatgtggcgcatggcctggtcccggtctgggccgtaagtaacccccagcatggtggtccccgctaacgccttctggatgacacccaacccccccatgggacccgcaaaccagcagcatcagttatgggccttatctccctccgtcttcaacgtcgcggccaggcccatatcgcctctggtcacaacaaatattccagaagcatggcccattatgacggcgtgcagtaacgactccaactccgccgttagcacgagcacggtgggggctaaggtggcaacggagtccagcatggcacccagtgttagttctagtgggaccaagagtgccaggactcggctattaagggatttttcgctccaaatttacgataagcaagagttgcagttcttgggccgctctgggactcacgcgcagagttagctgctagcaacttttttatttattttatgtccagttcaataaatgtgaccatgtgcaaataaacgagaaatgtctgtgctgtttttgcgacttgtggaagatatgaaagatgtcatgtgtgataatatcatttggaaatgggaaatgaaatagtatcagtccggaactgctctggctgaatatttgcagatttattcatctttcgaccaccacgtgtggtgaggggggactgagggagtggggagtggggcccacctacaaatggagatgggtctccccaaaaaaaaccacttcatattttcactctagctactaagaatagaaataattcatttttttgaatttctgaaggctctgtaatagtagcgggtgggtggcctaaaattcaaagccggcagctgctcttgcagtttgcgcacac

SEQ ID NO: 29089 - DNA, 453 bp, Glycine max
  Clone ID: TF_GmC897_2
gccaaaaaccacacaaagcacaatagaggaggaacaacaatcacaaagggcatgaggaccaatgtaggagatattgttcaagtagaaggagggcacattgttaggtccacaggtagaaaagatcgccacagcaaggtgtacacatcgaaagggccacgcgatcgtcgcgttagactctcggcacacacagccattgagttctatgatgttcaagacaggcttggctatgacaggccaagcaaggctgtggactggctcatcaaaaaggcaaagacttccattgacaagcttgctgagcttcctccttggcatccacctactaatcatgaggaagaagagcagaatgatgctgcaggatcaagtggagtcatagccattgaacaacaacaacagcaacagcagcagcagcagcaacaacaacaacaacaacaacaacaacaacaacatcaacag

SEQ ID NO: 29090 - DNA, 1532 bp, Glycine max
  Clone ID: TF_GmC7250_7
ctgccattcagttctatgaccttcaagatcgcttgggttatgaccaacctagtaaagctgtggaatggcttatcaaatctgcttctgattccatttctgaacttccttctttgaacaatttccctgacacccccaaaagtgatgatcatgagaagagagcaaacactgatgttgctgctggggcagtagatggtgagaattatgaaaatgagaatggcaataacaataaccagagtcagaacatgtctttgtctaaatctggttgtagtagcacttctgagacaagcaaaggttctggcttgtccctctcaaggtctgatattcgtgtgaaggctagagagagggcaagggagagaacaacaaaggaaaaggagaaagagaaaaatgagtctcatcatcatcacagcaatgttgttgttcctcatcatcgtcatcatcatcatcataaccccgtttcacaaacagcttctttcactgagcttctcactggtgggattcccaaagggtgtgatgatgaggagcctaataacatgatgatgttcaacaaagaagctgcagcagcatcatctggtagacagcaatggtgttcatcatcatcagcagcagcagcagcacctatggactactttctggggccttcctcttctagaacaacaacaacaccaccacacaatcaccatcaccatcatcatcaatattcttcttctggtgggttctcattggcacaaatccaactaggacattctcttcctgaggcaatgaatcacaatgtttcagcattcaacaataatgtgagtggtgagaaccaaaaccactcatcatcagatcctcatctgcaacagcagcaacacttctcattcataccggatcatcttatgtcagctgtggttacttcttcttctcatcatcaacctagcgggagcgactacaatctgaacttcaccatgtcttcgggcctcgctggttacaatagggggacccttcagtccaattctccgtctcttttgcctcacttgcagaggttttcgcctctagacggatccactgtacctttcttcattggagctgctccttctgctgcagttgctgctcctgccatggagaacaacaccaccaccaccaacaaccatcaccaccatcagttctcatctggtttcgatggcagccgcttgcaactctactatgggcattctgaccagaaggggaaagccaaaaactgatgtttggattgctacatttcctcctggacttgaaaattaaagtactagcagcaagttgtgtcctaaagcttgcttttgccaaaagggatgagccggcgttgtcaagtgttggtatttcttgttggatcatttgaagtcattcaattacatttagtatttgaatatatatatatatattgatctatgcgtgtgaaatcattgtgtttttggataaatgtaaaagctacttgattcaagatattcttttactttctgcaattattttgatattgttgtctatactataaatggagaaaagagttgttcatcagc

SEQ ID NO: 29091 - DNA, 1813 bp, Glycine max
  unsure (1)..(1813): unsure at all n locations
  Clone ID: TF_GmC553_1
ttggtcgaggcccccggtttaatcagagcgtccgcaagcatcaagtctaataagcttccgttcgtgcgtggattgaacaacatcaagtggtcgagtctggatcctcaacggaaacgggcttttgcggctacggtggagcatgcaggaacgacgtcgtccagccaggggatggtgagaggaagcggaggggagatagttcaagttgaaggcggtcacattgtgcgctccacagggcggaaggaccgtcacagcaaagtgtgcaccgccaaaggctctcgtgaccgacgggtgaggttatcggcccacaccgccatccaattctacgacgtccaggaccgcttgggctacgaccgccccagcaaggccgtcgactggctcatcaacaaggccaagtcctccatcgaccaactcgcccacctccctccctggaaacccactctcccctcacccgcaccacctcatctaaacgacgaccattcagacaaacctaaccctaaccccaaccccaaccccaaccccaaccccaaccccaaccatagccctgatgcccaaattctcaaccagttcgaccacgacgatggagctggagctggttccagttatcttcctatggataacgacgcgataaggtcgttcttccccacgacgacttcctcgttggttcaattccagagctacccaccggatttgctctccagaaccagtagccaggacctgcgtctctcgcttcagtccttgcaagaccctattttacttcaccacaaccacaacaacaacgagcacgtgcttttcgctggaaccgcctttgataacatggtagcgtggaataataatagtaataataatcataataataataatcataataataataataataataataataatactgcttctaatgatacttgtggtggtggtggtggtggtggaggaggaggaggagggtttgtgtttaacgctccttcgactttgccggggccggcgacggtggcgtcgccgacggtggtgtttggtcatggttatggtcaaggccagtatttttctcagacggctcgagcggctcgaggtaacagcccttccgttcgtgcgtggattgacgcgccatcgttcgtcgctgctgccgccgatcatcggcatcatcactatctgtctcccgcggcagcggcagcggcgttggtgtatcagtctgctccttccacggcggcatttacggcggcgcccggtggcttctcgggattccgcgtgccggcacgaattcagggtgaggaggagcacgacggcggcatgtccgataagccgtcctctgcttcctccgattctcgccgttgaaccgtcgagatcgtcagccgatttctgtctccttggaatcaattgggtatgtgtgtgatctgttttttgcagggatggaggagacgaagttggacttggaatggttcggttcggttcagtggactattatgcttgtggaatgaagaaaatctggggttgaatatccaggtttttgaattctccagtctgttatgttaatttattttatgtttttcatgtttcattagggagactttcaagtttgagtactgttgtgttggattgtctgtttgatgatgtttgttacaatttgtactagtggatgtatttgtacttgggtatctagtttcttagttttggtttgaagacatgcacgtagatactactatatcacttattattcacggcctagttggtcgatttatctttgtatttccaaaaaaaaaaaaaaaaagggggnccnnnnnnannnnnnnnnnnnnnnccgggnnnaannnnnnnc

SEQ ID NO: 29092 - DNA, 866 bp, Glycine max
  Clone ID: TF_GmC63399_1
acgagcacaaaccacttccaccaaagtagttggcactactcttctagaatcataagggtgtctcgagcatctggtggcaaagacaggcacagcaaagtgatgacctaaaagggttaagagacagaagggttaggctctctgtgaccacagctattcagttctatgaccttcaagatcgcttgggttacgaccaacctagcaaagctgttgagtggctaatcaaagctgcttcagaagctatctctgagctgccttctctcaacaaccctttccctgatacccctaagcagcctagtgatgagaaaaggcctaccagtggtggtggtcaacaacaacaacaacaaggctttgatgatgcagatggagacacaaattaccaacaaaaccaaagccagaatctttctctctccaagtctgcttgtagcagcacttccgagacaagcaagggctcaggcttgtccctctcaaggtctgagatccgtgtgaaccgtgtgaaggcaagggagagggcaagggagagagcagcaaaagagaaggagaaggagaaagagaaagagagtgattttaacattgcacaccaccatcaccaccacaatgtgaacaacatgtctcacactgcttccttcactgagcttctcactggtgggattgggagcacggtaacagttaaccccaacacaacaacaacaacaacaacaacagcaacaagtcctaatggatcatcggttcatcagatccatgagggtcatgatcatgaggctaatctattcaacaagggaagtcaacaacagcaacagcaacaacatcaccattggtctcaaacagtgacacctatggactacttcagcgcaggccttttggtagga

SEQ ID NO: 29093 - DNA, 2077 bp, Glycine max
  Clone ID: TF_GmC122255_1
gaagtttggagtgagggttatctatttagtgaggagaaagtgaggggtggtaactcaagagaaagtgggttggaccagccttattgtatttatatatttgagttttgtggggctaaaaaacggaccaaaagatctttaatctcttctccgagcacactctgcctctctttgcagaagcatcaacaagctctcataggccacaggttttggttttttgggatcagcagcagtgacagaagcagaaccctcagtagctggcagatgaagcctcaacaagtaaccacagttaatagtgtcaggaactaagcaaaatcaaagagtactatactaccatactaccataccaaaataccaacctcaacaagacctacaagaaaccctttagacaagtaaaagaaaaaagggaatctgaatctcaccctatagacacaagaatcaaaaaaggaagaacaatttatgagcatataaagtgaggagggtgtcaattgtcatcactcatcaacaagttgtgcaaactgcaaaggggagcaaacttaaactatgcagaaagcacaatagaagaagctgaggaatgggcatgaagagcactgggggagcgatttttcaagtccaaggagggcacattgttcggtccacaggtagaaaagataggcacagcaaggtttacactgcaaagggtcctccgtgatcgaagggttaggctctcagcacacactgctattgagttctatgatgctcgagaacgttcacgccctgatagaccaagcaaagccgtggactggctcatcaagaaggccaagaatgctattgacaagcttgctgagcttcctccatggcaccctaatcctaacactactgctgcagatgccgagaacaacaacaacaacaatgcagggtcaagtgacatggccattgcagaacaatcagagtcttctggttacaattttcagctgcaaaggcaattaggtgaggaccatgataaccaccaccattcagctttcattccttcacctattgacactgatgcaatagccttctttcccacaaccactgcaacctcctccatcaatttccaaacctaccctcctgacataatctcaagaaccaacaactccactgaggatcttggcctttcccttcactccttccaagaccctggtttgattcatcatggccagtcccaagcaggtgcaaatcaaacaccttccaatgaccaaaccctcttctctggctcaactcaagtggggtttgaagccaattaccccaggattgtgacttggaacagtgatgcaagcatagatatgaacagaaccgggttcatggttaattcaccatcagcacttctaggccaaggtggttctgctgcgtattcccaaagggggacccttcagtccagtttctcaccatcacttcgtccttggagtgacattccaatggcttcatcagaacatcatcacaagtcacaacaagcttccatctttggcagcaggtttttgtctgatgcattgccagggttctgcattcctgctagaatccaaggagaggatgagggccatggagttggtaacgacaggccatcatctgcttctcctaattctcatcactgaccacaaacttgaactgcacaatactgcactgttccttatctatcaggacaggagcattgcctaccagactttaaaacgtgggaagattaagatggacacattttgatgatctacacaattttatctggttggattcagcttttatatggctttctttcccccctacttattgcagccatttacattggggctttatatattttttaaggaaaagagatatttatgtattatgcattatatttacctgatactttgctcattttatatatggctttaagctggattccaaaaaaaaaaaaaaaaaaaaaaaaaaaaggactataaattgtaaatgtagtcatgtagttgcaaaaagtccaaaaaccttgatgttaatgttatagccacaattataaatgcgggtacaattgctagtacaatacattgcaattgtgggctatttttcctaaccttggtaatatggcaagtta

SEQ ID NO: 29094 - DNA, 563 bp, Glycine max
  Clone ID: TF_jC-gmfl02220071b11a1
ggctcgagctcctccccacaccctcctccgaaccttcccccaaaaaaccaccccccaaaagaacctccaccaaagaccggcacacgaaggtcgacggtcgcggtcgtcgaattcgaatgccggctctctgcgccgctagggtgttccagctcacgcgtgagctgggacacaagtctgacggcgagaccatcgagtggctcctccaacaggcggagccatccgtcattgctgccaccggcaccggcactatccccgctaacttcacctccctcaacatctccctccgcagctccggctcatccatgtccgttccctcccaactacgatccagctacttccacaactcaaacttctccctccaacctagaagaagcctattcctagaaaacaccaacactccttccacaacaacaacactccttcatttccaatccaacaacaacaacgccatcttccaacccaagcacgaattgcgcgaatcttcatcactagacttgtcctcagagaacaacaacgaagagggttattttggaagaataagaagacccttggagcaagaccta

SEQ ID NO: 29095 - DNA, 1113 bp, Glycine max
  unsure (1)..(1113): unsure at all n locations
  Clone ID: TF_GmC125579_1
ttttttccttctttaacatggaaattcgcaaattgtcatcaattaggcacaaaactggaacaggaacagtgaattcacagtagaacctagactccctacgtggcacaatcccagtggcccagttaacgcgaggagtgtatccagccattgattcaatttcactgtgaaaaataaatacagaactctgagcgtgagggtccctctcttccatacggataagtggggctctcaccattgttagggtttgtttctctctgcgttctttgctgtcccaattatttatttattttttcacattcacaatttttttaattacgaaaacccctattccattctgaattggggctctcaccattgttaggcgccagaaagcttcaaaccacagtcaacgtttcaaaactccgcttcgctgttcttctctacccctgcaaaacccactgaatggaagcgaatcccacccacgacggggatgacacctcggagacgccaccgccgcccatggtggacccgtccccatctccgccgcctcaaatgaaagaagaggtgatggacgcggagcaaggcggtgacacatctcttccgatgaccgttgttccggcgcatttgccggtgtcgaaggcggcggcgaagaggccgtcgaaggatcggcacacgaaggtggagggtcgtggccggagaatcaggatgccggcgacatgcgcggcgaggatcttccagctgacgcgggaactgggacacaagtccgacggggaaacaatccggtggttgctggagcacgctgagccggcaatcatcgaggccaccggcaccggcaccatcccggcgatcgcggtctcggtcggcggcaccctcaagattccgacatcctcggcagcaagacccgagggagaagttgacactccgaaaaagcgaaggaggagagcatcaaacagcgaattcatcgacgtgaacgaaaaccaggtttctgtctcttcagggctggcaccaatcgcgcaaagcgcgtatggaagtggtgttggtggtggacttgttcctctgtggcatggtaacgctgctgcttcggggcctttcttcatgtttccgaacgcttcaaacccgnctcagtattgggcc

SEQ ID NO: 29096 - DNA, 2754 bp, Glycine max
  Clone ID: TF_GmC355_1
ctcgagccgaatcggctcgaggtgttggttgtattgtgtataatgttgtgtgtagtgtagtgtagtgtggtagaagaacagcagcagaagaggggcagtgatgcactcacagatatttaacacctccattccgaccaaacactgtcaccctttaccactgccatcatcaagccctctcccatagggccagaatgaattcctcttccctataacggttatctagtgtctgcctattgtgttgatgggagatatgaaagaattgttagtttttttgcaaaaagacaggagttagcgaaaacagggagaggattgagtaacgcacccgtattgcgtagcttcagctgggtctggccattgatttaaagaataaagggaactcccctactataaacgcacaaaagttttgttgtggagagagaaatagagagagaggggaaacagatgggttaggctgaaaagtgagttggtataacattgttggtttggtttagtttactttcctcggtggagagggctcttttttttattttggtagtgatggaagtgggaaaattgaatggcacggaactttttcaagaggctgaagcaagtttcagagtggtggcagttgcacaagcaacaagaagagaagaagagtggaaagaaacaaagctgggagtgcaaggaatcaacaacccattaggaataagtgcaaagcttcattaatagctggaagaggaaaatcacaacaggggtctgactctggatcctcacaggaatcatcatcatcatcatcatcttctgcagcaacaacaacaaccacctcatcatcctcatcctcaaaatctgattctaaattcaataagacatgtaacagaccaagaaggagaaaaccaagaagaccaagaatctcattctcatcctcaccaattccatatccaattccaacctcttcatcatcaacaagaacaacaacaacaacaatcttacacaggtttagacacggagatcttaaacccactccaaccaccgaagaaacggtcttgcctaccgcctcttccgccgccaccaccgccgccttcgtcgcttgcttcatccgaacatgcaagaaaaatgggagagctacaacaccatcaacaacaggcagcagcagcagcagcaccgtcgagagcggcgatgagaggcgtcggcggcggcgagattgtggaggtgcaaggcggccacattgtccgctccaccggacggaaggaccgccacagcaaagtctgcaccgccaaaggccccagagaccgccgcgtgcggctggcggcgcacaccgccatccaattctacgacgtccaggaccgcctgggctacgaccgccccagcaaggcggtcgactggctcatcaagaaagccaaggcggccatcgaccagctcgcggagctcccgccatggaaccccactgccacctcaatgcaaccacgacagctgccacaagaaatcgtccactgcgagaacaaatctctcgcgatggacgattcaatgaccgctgccttcagtagccgcggcgaaagcaacgctttcgcctcccaccaacaagtggaggataatgaaaatgctaacaacattagcagcagcagcggcaacaaatacaataccggttctgggtttctgcccgcgtctttggacactgacaacattgcggagacaatcaagactttctttcctgtggaagcgacctcgacgtcgtttcagagttacccgccggcgccaccggatttagggcaccaagatctgcggctctcgttgcagtcctttcaggaccctattatgcttcaccaccagcctcatagccaccaccaaccggttctctttgccggaaccgccgccgcggcgctcgacttcgacggcggttccggctggtcagagcacctgcaccagcaccagcaacagaaccaccactcggaggaacagcgattgctctatgctggtggtaacagtggccacggcggtgggtttgtgttcaacacgccggcgccggtgcaggtgccggcgtttggccagtttttttctcagaggggaccccttcagtccagtaacaccccttcgattcgtgcttggatagacccttcggtcgatcaccaccaccaccaccatcactacctatcacagttgatccaccaaggatccgtcgccggtggcggcggattctccggcttccgcattcctgcacgaattcagggtgaagaggaacacgacggcgtgtccgacaagccgtcctctgcttcctctgattctcgccattgatttgaaaaacacacatcaaaaaccccaactttgttctccctcagggtttgtggggttgcattgaagatggttcaattgatggagagaacatgattttggaagatcatgatgaatggattttcaagctacaacgggaattcaagaaaatctgaggtggatattcaggttttccaatccctcggtttgttatgctttttatgttcaacttatgtttttcatgcttaatttaactaggactaggagtattgtgtttcttttgtttcttctgtattggagtgctatgtttcttttgtttcttctgtattggagtgctatgtttccctttgttaagtgattgtgtcttctttgtacttcttcagtttcgagtttcttgtagtgatctgaaaaacatgcaaattcaataaaagagctagtttgctctagttattgtatatttccaagttagtgcaaaaaaaaaaaaaaaaaaaaaaaaaaaaaaaaagaaag

SEQ ID NO: 29097 - DNA, 1703 bp, Glycine max
  Clone ID: TF_GmC4156_1
ggctggagcttctacactaagtttattaggtgcaatcagagccaagtcaagctctttaaattttgttctatcttggtatgcaaaagcacagtgcaaacttcctccttctaccttggggtgtttagtatccaaagtgattcttaggatcgagagacaaccagtaaatccaaacaatgaacttaaaatttagcagtttccttgttgatggtaccgtggaacagaattttgacaatcacaaagtggaaggacaaaactcagcacctagcaaccaacaatgagagacataagatcatgattaagagccccaaagaagcagattttccattaaaacaggagggtcattctcaatcaattactgatcctgaaaaggcaaaggcttcagcgagctcagtagcacaatggccaagattgaaagatccaaggattgtgcgagtatctagagcctttggaggaaaagacaggcacagcaaggttttcacaataagagggttaagagacagacgggtgaggctatcagtaccaactgccatccaactctatgatcttcaagataggctagggctcagtcaacctagcaaggttgttgattggttgctcgatgcagctaagcatgaaattgatgaacttccaccacttcctgttgttccttcagtgaataacttcacccttggtcatccatctgctgttacctctaatgaagctaccacctcaaattctcagcctaatgagcaacttcttaatatcaacagaagcattcagtgggaaggttcaaaccagaattctacatggaaattaaagcctaaagaagtttcacgagaaatgattagcactgataaaccaaattggataagtagaagtgaagaggataagcaaggaagcaataatgaaggtcctagcacacgtgttataccaaatattaatctcttaccaagagcaaatcttaatcatccttcattcttgggcttgctgaatactatgccacatggttaccaatgggaaccttctgctggtgatgtttctcatcagttgggaaacaatggatttgcaaaccaaacagatatgcacagcattaacgttgtacctttcccaacatcaacattgtcattatcaactgggaattctcaaattctgctatgtcctccaggaacagcacaaccatatttcccttcacatgttacaatggacatggatccgagacaaatcaaccactatcagatgttgagttcaggttctcaaaatccattggcgaattatctcaatcattctttcagcttggctatgatgactcataaacctcttcattcacccaacagcagcaaaagcccctcccacaaagaccaagatttcccttccaactgatacacaaaatacaaagtatgtctcaattctcctctcgcaatttgcatggatcatgaagactgtgagaaagattcttcagttacaagatattccacggttaccacgggtttgaataatcattttgtttgtgaatgcatgtttggatttccttttatttttttgaattatataggtaagccttaaattttcccttcagttttttgagtttatatatgtattccctgaatcgatctaacatgaatagctttctaagggtataatgtaagagctctcctttaagtgacaatgaatagcttaagaactataagggaatgtaaaaaaaaaaaaaaactgagactagttcc

SEQ ID NO: 29098 - DNA, 1314 bp, Glycine max
  Clone ID: TF_GmC909_2
cctctatgatctccaagataggcttggactcaaccaaccaagcaaggttgttgattggttgctcaatgcagcaaaacatgaaattgatgaattgccaccacttccaattcctccaggtaacttcacccttggttatccctctcttgtttcttgtaatgaagttagcacctctcgtgaaggttcaggccaaaacactttattatggaaaccaaagccaggagaaataatggttagtgatcatgataaggcaaattggatgaatagaagagaaggagatgatgatgatgataataatcataataatagtaatggtgataaacaaggaagcaataataattgtcatggtggtgcacttgttttgccaaataatctcttgccaacaagaccaaaccatccttcttttttgggtttgatgaacactatgccatcacttggttaccaatgggaacctaattcttcagctgctgatgttaatgttcaatggcaaaaccatggattttttaaccaaacagatgtacacagcatcgatgtggttccatttccgtcaacactggctctatcaactgggaatagtactagtactactactacttctcagattttggtgtgtcctcctcctccgggagcaacaacacagccatattttccttcttcacattttgcaacaatggagatgaatgcaaggcaaatcaaccactatcagatgctgagttcaagttctcatcaaaatctcttggcaaattctctcaatcatccatcatcacagcaactcatgagccaatccgggaaagcaccattcagcttgcgaattaggcctaaacttttccattctcctaatagcagtgaaagccattcccaaaaagatcaggatttcccttccaagtgatgcacaaatagagcaaaataaagttgtcaaaattcttcttctcctcacaaattatgcatggattgatatcttgagggctgtgtgggaattagttgcaagacatattattcaacgttttggggtttgaataaacattccgtttttgtcaaagttatgtttggttttatgattttccattcagtttgatctatatggatatgccatgcaaaggtctacaaaagaatggttttcttttcaagggtaagagctttttcctgaagtgatgatgtgattgctacactaaagagaacgcatgctcagataagttcacactctcttctatgcattgagaaaggttggaaggtggaataataatattatcattttgatagtgcgttttggatttgtttttgttttggttaagtaaacatcttatgtgtttgaatgag

SEQ ID NO: 29099 - DNA, 1847 bp, Glycine max
  Clone ID: TF_GmC956_1
tccggctccagcttttatcttttacatccttaaacacttggtgcttctttggtttaccgaagatcctaacgacccatgaatcaaaaatttcaaatttttatttttcaaaaaaacgtgcatgtaaatgtgtgtttattcaatttaacgtcgaaactgtgagtttgtttcatacgttgttgttggttgtgtttttctttttttacgttgttgttgagttatggctgatgaagcttctggagatgttgatctaaggttgggagagcccaaggggcctaaagaggagcccgagacggaggaggggtccgccatacgtgtgatgccggtggcggtgcacgtgccggcggggatgtctatgtccatgtccaaggctctggcccaggcccaagcccaggcccaaccacaaaagcgggcctccaccaaagaccgccacaccaaagtagaggggcgaggcagaaggatccgaatgcccgccacgtgtgcggcgaggatcttccagctgacccgagagctcggtcataaatccgacggcgaaaccatccggtggctcctcgagcacgccgagcccgccatcatcgccgccaccggcaccggcacagtccccgccatcgcgatgtccgtcaatggaacgttaaagattccgaccacctcaccttccgatcaagaacccggagagccgcccgagaggaagaagcgcaaacgacccgcgaatagcgcctacgtggacataaacggcgccgccgtttcggtctcggccgggctcgcaagctctattattaataataataaccaaaacgcagcaacgacgatgacgacaacgatggcaattccgcaacatacagcaattccgttgccgcaaggaatggttcccgtgtgggccatcccttcaaacgccgtcgttccggctgcaggagctttttttgtggttcctcaaacggcgtcgtttcagcatcaacctcagtttttcaccatagcgagacctatctccgagtttgtctcttccatggtcacacccgtcgttcagcttcaaccaacctcgataaactcttccaccaacactaactctaacgcttcctccactgcgccgtcgtcgaagtccccggcgagagccaccgtcatggctccgacaaccaccaccaccaccacgaggcagatgctgagagatttctcgttggagatttacgacaagcaggagctgcagttcatgtcgcgcgcgtcttccaagcattgagagaattagaagaacgttgaatctggtttgtatcttcgtttccgccatgaacgacgacgacgacgacgtcgttgctgcgggagagagaggaagagcacgtgcgcacgtgcggcgggattaaaaaatggtggggaccacgtgtgtgtgtgtgtgggtgtgggtcaacacgaaaaaagtggagggcatggtggggacccagtgcggggtactacataaccagcaccagaagatcagaactacggagagaagttttttctttagtatttctcagaataataatgtccatgacaattaattagaataaattttagactttaattttcatgtactagtattttttttttttttctaaaaaaaatttgactgtcacaatttaaaactaaggcaactatgaattttagatagaaaaaaaaaaaaaaaaaaaaaaaaaaaaaaaacttcgggggggggcccggtccccatttcgccttatagtgagtcgttttacgcgcgctcactggccgtggttttacaacgtcgtgactggaaaacccttggcgttacccaacttaatcgccttgcagcacatccccttttcgcagttgcgtaataacgaagaggcccgacggatcgcccttcc

SEQ ID NO: 29100 - DNA, 428 bp, Glycine max
  Clone ID: TF_22521769
gcacgaggtcacgttctctctaagcctttttctatgtaaagcgaaacaactcaactgccacctccataccaaagcaaaatcgatgctccacaaaacccacagacccacagaattcatggtcacccactacacaaagacaaatctacatatcaacacagtatcactatcttttcataactctgtaacaatttttattattatttgtatatgatactgcttcgtcatggaagaagaatgtgttcatcaacaaaacgtggctggtaataagtccaatttcccgctacagctgctgaagaaaaaggatgagggaccaccaccatcaccaccgccgagcgccgccaaggccaagcgaccaccgacgaaggacagacacaccaaggtggaggggcgggggcggcggatccggatgccggcggcttgcgcggcga

SEQ ID NO: 29101 - DNA, 712 bp, Glycine max
  unsure (1)..(712): unsure at all n locations
  Clone ID: TF_GmC3142_2
nctgcgttactcaaaaaaagcttttaagccaaaaagaggcagtggctaccaagcaacaatcgattggagtgaaagatgagtagcatgaaattttgccgccgctgcaacaacgttctgtaccctacggaggataaggaggagaagctacttctctatgcttgccgcaactgcaatcacgaggagattgccgatagtaacgttgtgtatagaaataagatacatcattctgttcaacggcgcactcgagagctggaaaatgtagctgcagatccaacacttcctcgcaccaagtctgttcgctgctctcaatgcaatcatggagaagctgtctttttcaaggcaccagtaaaaggggaagaaggcatggccctcatttttgtttgctgcaacccaacttgtggctaccgttggagagactaggactcttaatagtcaaggttcaacattggggagttgagcatatcaaattcttcactcttggatggatgagaaactttatttgtatatataaaacttggctagtgtgaggacgttcataattaagtagttgtgatcactgtttaatctccctaaacaattatgttgacgcagttaatggtccaatcctttagtttatgggttatgaaagaaattcgcatttcttatttgagctcccagacatttatgaaagggcaatccttagcatttaaaaaaaaaaaaaaaaggcccccta

SEQ ID NO: 29102 - DNA, 556 bp, Glycine max
  unsure (1)..(556): unsure at all n locations
  Clone ID: TF_jC-gmst02400020f11a1
ggctcgagctgagcccgtctcaccctctcacgcagcatttccctgcttaaaccctccagcagcctgcaaacaaaaaccctaattcactaaccccatttcaaatcccaatcacgtttccgatcaatcatcaccttctccataatctctccgttcgcgtcgcaaatcgagcgagatagtgtcgagtcgaaccaacgatcgagaagatatagaagatggagttttgccccagttgtggtaacatgctacagtatgaattgccttatatgggtcgcccttcaagatttttttgttctgcttgcccatatgtttgccacattgagaatagggttgagatcaaaagaaagcaaaggttggtgagaaaagagatagagcctatattctccgaggatgacatgacaaatgcaccatcaactgaagcgacgtgcccattttgcggtcatggtaaagctgctttcaaagaatttcagactcgatcggctgatgagccagcaactctattntataagtgctggaacaatgactgtaaaaaacaatggcgtgaaggtgacttcaacat

SEQ ID NO: 29103 - DNA, 1723 bp, Glycine max
  Clone ID: TF_GmC38330_1
cttcccggtcctcacccacgcgtccgacttgccacaccaccgccgccgcaggagacaacaacaacaacaacacgttccattctcgaggagagagtggttgggttcgatggagaaggagttggtggaattgtacgaagcggcgaagaaggcggcggatgctgccatctccggcgacggcaaacatgaggaaagccgatgcatcgatgcgctcgagcagctcaagaagtttcccgttaattacaagattctcgtcaacacccaggtgggtaaacatcttaaagttttgacaaagcacccgaggctgaaaattaaggcctttgctattgacctaattgagatatggaaaggcataattatcaaggaaacaagcaaaaataaaaatgggggctctgatagtaaggttgagtcggctaatggggagaaatctaaagctgggaaaatgcaaaagagtccttcggtaaaggttgaaaaaggtgaaactgttaaggttgagaaaattgataggaatggtacaacaaagtcaagctcagaaaatatgaaaaaggtacaaaacgatgtcaagaatgagaaaactgatcgttctgcaagtgtcaaggtggaaaagatagccaaggaggaaaagccagtttctggagcaaagaaaatgtcatccagttctgccgctcccccaaaactaaaaactatgattaaatctaatgatgcaacacgagacaaaataagggaaattctccacgaggctttatccaaggttactggagaagctgatgaagatcttgtagatgtagtcaataattctgatcctatccgtgttgctgtgacagtggagtctgtattatttgaaaaatggggcccttctaatggggcacaaaaggtcaagtataggtccttaatgtttaaccttaaggattcaaacaaccctgatttccggagaaaagttctgcttggtgttattgagccagagcaactgatcaacatgagcacagcagaaatggctagtgagcaaaggaagcaggaatatcagaaaatcacagagaaagctttgtttgaatgtgagcgtggaggtccgccaaaagctacaaccgatcaatttaagtgtggccgatgtggtcaaagaaagaccacctattaccaaatgcagactcgcagtgctgatgaacctatgacaacctatgtcacttgtgttgtctgcaataaccgttggaagttctgttagtgcagttgtgattagtgagtctcactagagctgttgtcttctgttactgatttagggtatgaaggtgcgagtatcatggttccgaattgcaatcgtgccagaattttccatcagactgtttagatgtagaaatttttaggcagaaaaattgtactttttattctttcagttttaactcaagttttcgcattattgtagtttgctgtaactttacaagtgattgcaccaatgtttttctcaggttctactcatcagtaactaagtacttaacctaatggcatccaacctatacgattagttaacagaatggtcagttagagctaggttttattcataaacactaagtgcattgtacttaattttctttgtaagcttgcagcacactttacaatgtagtctcttcgtttcattttaattttgaaaacagcttagctttagttgcaatgcgttgcttgtaagctgcgaaccctttcaatgcatctgtagttcagtgaagaactcttacctttt

SEQ ID NO: 29104 - DNA, 850 bp, Glycine max
  Clone ID: TF_GmC158666_1
tttatttcacttgctcaaaacgtctgagcccgtctcaccctctcacgcagcatttccctgcttaaaccctccagcagcctccaaacaaaaaccctaattcactaaccccatttcaaatcccaatcacgtttccgatcaatcatcaccttctccataatctctccgttcgcgtcgcaaatcgagcgagatagtgtcgagtcgaaccaacgatcgagaaggtaaaagcgttccaaaaataccatcgaggataacgatatagaagatggagttttgccccagttgtggtaacatgctacagtatgaattgccttatatgggtcgcccttcaagatttttttgttctgcttgcccatatgtttgccacattgagaatagggttgagatcaaaagaaagcaaaggttggtgagaaaagagatagagcctatattctccgaggatgacatgacaaatgcaccatcaactgaagcgacgtgcccattttgcggtcatggtaaagctgctttcaaagaatttcagactcgatcggctgatgagccagcaactctattttataagtgcttgaacaatgactgtaaaaaacaatggcgtgaaggttgacttcaaacatggccttatatttcttcattttgctgaggatagaaaagcttttgttgtaattgggccaatatgacagctaagagtgtttggatagtttttacattttcgctgacaataatctaagtgatacattttttttttctttctttattactatcgaagtttgttttagggattagaaaattgagatggtaagcattcctcgtgtttcatacgaaaaaaaaaaaaaaaaaaaaaaaacaaaagttaata

SEQ ID NO: 29105 - DNA, 539 bp, Glycine max
  Clone ID: TF_GmC7695_2
ccacgcgtccgggaaaacaggagcacccaaaaggagcgaagaaggaacatcgagtagcttcgctactcccttctcatcgttgccaagatgagtgccatgaaattttgccgtgaatgcaataacattttgtaccctaaggaagacagagaacagaaggttcttctcttcgcttgccgcaactgcgaccatcaggaggttgctgataacttctgtgtgtataggaatgagatacagcaccctgtaggagagcgcactcaggtgttgcaggatgtagctgcagatccaacgcttcctcgaaccaagtctgttcgctgcactcaatgcaatcatggtgaagctgtctttttccaggcaactgctagaggggaagaaggaatgacactttttttcgtttgctgcaacccaaactgtggacaccgatggagagactgaagtttgtgcttcctcggatcaagattcaatgttggggagatctaacatattttatttgtatttggcttagcttattttgagaagttaatcttttttttttcttgtcc

SEQ ID NO: 29106 - DNA, 231 bp, Glycine max
  Clone ID: TF_GM310N10.C12.o20.fg
atggtagttacacaggtacagcttgaccgtgccaaggatatcagaagagagcttgaaatggaaataattgaggaacatacggtgatggaatattctaaggtcagcaagaaatgtgaaaaatgtggccatggggaagctacctattatactagacagatgagatcaacagacaaaggacaaactactttctacgcatgtaccggctgtggtcatccgtctcaggagaattag

SEQ ID NO: 29107 - DNA, 961 bp, Glycine max
  Clone ID: TF_GmC7695_1
cccacgcgtccgtacggctgcgagaagacgacaggaacgggacacaaaaggagcatcgagtaggtttcctactcccttctcatcgttggcaagatgagtgccatgaaattttgccgtgaatgcaataacattctgtaccctaaggaagacagagaccagaaagttcttctcttcgcttgccgcaactgcgaccatcaggaggttgctgataacttctgtgtgtataggaatgagatacatcactctgttggagagcgcactcaggtgttgcaggatgtcgctgcagatccaacgcttcctcgaaccaagtctgttcgctgcagtcaatgcaatcatggtgaagctgtctttttccaggcaactgccagaggggaagaaggaatgacactttttttcgtttgctgcaacccaaactgtggacacagatggagagactgaaatttgtgcttcctcagatcaaaggttcaatattggggagatctaactatttgtggttatctgaaaaaacttggctgatgcggggacagtaatactgaagtatttgtgttacctgtttaactgcagttcctgatcaaataattaatacagttaatggacaaactgttgtttgccaatgctgataaattctgaggatgggcataaatttcatggtttgttaaaaggaaaaaggatgagtgacactgcttttatggatgggcctaactttcttggtggggagttaggaatcaaaatgacttttttttttgttatatgctatattatttgatgaaaaattcttattaaaagttcatttggactctctttgatttttccccaaagcgatgacaccgattaacatataaatataggtcatccatctgcccctaaaaggggttggacgttcccaggaaaatataaatatgataatgtaaaaatgttatggttttgtatggatttgaaggcaactattataatagtaacc

SEQ ID NO: 29108 - DNA, 276 bp, Glycine max
  Clone ID: TF_GmC869826_1
tacaacgaggtcatgttcaacagattttttcgcaattcgagtggcagcgacttggacggggtaaggcaggctgagattgccacagaaacgggacatgaaatcggcactggttatgtggtccaagttggtctccatggtcttctggatgagcttgaaacagcgtccaatttccttcttcgacacttttgacaccgcacaaacttccttgaacgttctgggaaccccctcttgacgacatgcgatgtaaaggcaagcggccgcctgtgcctcgttgta

SEQ ID NO: 29109 - DNA, 674 bp, Glycine max
  Clone ID: TF_GmC615_4
tttacggctgcgagaagacgacagaagggggctgcggtagttggctctctctctttctctcataaaaacactccgagtacaaagaccctctctcctctcctctttgcattcgagtgaaagaagcgaagaaaaagaaacatgtcagacgcgttctgcagcgactgcaagaggcagacggaggtggtgttcgaccactccgccggcgacacggtgtgctcggagtgcggcctcgtccccgaatcccactccatcgacgagacctccgagtggcgcaccttcgccaacgagtccggcgacaacgaccccaaccgtgtcggtgggccctccaatcccctcctcaccgacggaggcctctcgaccgtcatcgccaagcccaacggcggcggcggtggcgagttcctctcctcctccctcggccgctggcagaaccgcggctccaaccccgatcgcgccctcatccaagccttcaagaccatcgccaccatgtccgataggttgggactagttgcgaccatcaaggatcgggcaaatgagatatataagagggttgaagatcaaaagtctagtagaggaagaaatcaagatgctttattggctgcttgtctctacatcgcttgccgacaagaagacaaacctcgtactgtaaaggaaatttgctctgttgccaatggggc

SEQ ID NO: 29110 - DNA, 1874 bp, Glycine max
  Clone ID: TF_GmC1028_1
tcccacgcgtccgtacggctgcgagaagacgacagaagggggatagagaaatagagataagtacggtgcgaaaagagtgaggcggagaaaaatgaagtgcccgtactgttcggcggcgcaggggcgttgcgccaccacgagcagcgggcgttcgatcacggaatgcacgtcttgcgggcgcgtggtggaagagcgacagtcgcatccccaccacgtgttccacgtgcgcgcccaggacaaccctctgtgtctggtcacatcggatctcgctctccccgcgctcaatcaaaacaacgaggaggaggaccctttcgagcccacgggcttcatcaccgccttctccacctgggccctcgagcccagcccactctacctccagtcatccctctccttctctggctacctcgccgagctcgaacgcactctggaatcatcatcatcatcctcttcctccagttcttcttcttcgttgtcgtcgacggtggtggttgataatttgagggcgtacatgcagattatcgatgtggcgtcaattctagggttggactgcgatatctccgaccacgcttttcagttattcagggattgttgctccgctacgtgtttgagaaaccgcagtgtggagtcgcttgctactgcagctcttgttcaggccattagagaggctcaagagcccagaacccttcaggaaatttcaattgcagccaatgtgccgcaaaaggaaattgggaaatacatcaagatactgggagaggctttgcagctaagtcaacctattaacagcaattccatctcagttcatatgccaagattttgcacgcttcttcagctcaataaatctgctcaggaactggctactcacataggagaggttgtgatcaacaaatgcttctgcacccgcaggaatccgattagcatctcagctgctgctatatatttggcttgccaacttgaagacaaacgcaaaacccaggcagaaatttgtaaggtaactggtcttactgaggtcactctccgtaaagtgtacaaggaactattggagaattgggatgatttacttccctctaattacaccccagctgttcctccagagagggcatttcccacaacggtaattgcttctggtcgttcttcaacggctaaggttgatgctgtagaggttatttcttctttggacccagaaaagttgccagatattaaacatagcaaacctaatgagggcccgggcatggttcatcatcccagagggaaggatgaggctgttggtggttatcatgcaagccattccacactgaatcaacagtcaactttttggcaatcccagcttcccagtgggacacacaatcatcagaatgttttgcaaggaatggatattgatgtatcgcagcgaaaccaccaacagccagaacacatggcagaggatacaacaaatggtgctgccaatggtagttctctaaaatcaaaccaactttgtagtcctcctgcttctagtgcaagttctgttatgaggcagttttcagctcccccttcatctgggccttcaaatgttcgataagtacagtcacctaagataatgccaggttatccggatcactgaagaacaatgaaatctaaatggttggggaaattccggttccttgtgccaacacctaacctagcacggataaaattacttcgcctcttttaagtatactattgtattgtatatatatgcatgcattatgtcacatttgatttgttttttatgtgtgaactttggtgtggacgtgtggttattgctagaaccggaatctctcatcgacgctagaaaaagactgataatttgtggtggttttactaatttcaggtacttaattacaaaaaattacatgtct

SEQ ID NO: 29111 - DNA, 2401 bp, Glycine max
  unsure (1)..(2401): unsure at all n locations
  Clone ID: TF_GmC1205_1
aattcggctcgagaccttctcgatcgtgtcgagcttttcatcccctctgtccctctttctttagtcctttctcacctcttttgttgcctttctttcacgttttttcgtttcgctcgcgttgaaatcgcagagaccaccggcacgccaccgtgaaccaccgccgccgcctccgtcagtcactgtgccaaaaatgttgccggcgagcgactagatgatggtttcttatgttgtggaagctgtgggagggtgttggaagattacttttttgctgaggagccttcatttgttaagaatgcggcagggcagagtaaattatcaggcaattatgtaagaacagttcaaagtgagtactctgaatcacgtcaaaggactttagatagagcttatgatgaaattaaatatttaagttttggccttggagttaatgatgaacatatggctgaacaagctttgaccttttataaaatagcgcttgagcgaaatttcacccgtggacgtaaatcagaacaagtacatgctgcttgtctctacattgcattccggcacaacaataaaccataccttcttattgatttttcaaattatttaaggacagatgtttatgtgctaggagcagttttcttgcagctttgtcaagtgttaaggcttggagagcacccaattgttcaaaagcctgttgatcctagtctttttattcatagatataccaagaatttgttaaagcgagggagtaaggctgtctctgatactgcactggccattgttgcaagcatgaaacgtgactggatgcagacagggaggaaacctagcggattatgcggtgcagcattatacatatctgctcttgctcatggtattaagtgctctaagccggatattcttaaaattgtccatgtatgtgaagcaacattgaccaaacgattggtagaatttgaggataccgagtcttctagcttgacagttgaggagttgaatacaatggcaaaagagcatgaaaaaaattcaatgataatgccaggaggtggattaaaaggttgtatttcaaaagacctactgtgtgagcacaaggaggatagtggggtgacccattttgcacttggattatgtgaagcttgctataaggattttgataagctctctggtggacttggtggtggtttggatcctcctgcattccagcgtgctgagagggaaagatttaaaaaaacacttcctgaggagagtgtcgatgaagcatgtgctttggcgaatgcatcaaatgatcagtttaagagccacaaagaagatttgcatgcctatgtgccagaaagggctaatgttgagcatgaggccactaaagatggtaaatatgatgattctcatagagaagatgaatcagaaactttatctgatattgatgatgaagaagttgatttgtacattcatgatgaggaggggaagcatatcaagaagttactatgggaaacagcgaatcgggagtatcttgaggagcaggcagccaaggaagcagctgcagcagctaataagaaagcttttgaggcaaattttgaaaactgttcggaggatttactagcagcaagagagcttgctgcatcttctgctgaagccgtggcaaaatccagaaaggaaatgagacagaaacgagcctatgaggcaaaaaatacaaggccagctcaatctgctgcagaggcctttggccaaatgtctaataaaaaaaggaatttgcagggtctcaaatctaaagtcaattttgaactcctgaatgaattgtttgatgaaatggaaaataccgatgatctcaagaaaccgaagaaagtacggtttgatctgcccctagataatgatgacaatataccgtccaaggttgaggacaaaaatgaagatgagatgggattagcggatgaattcgatgatgaaggtgatatgggggagatgtatcaaaatactgaaaatatggctgataaatatttccctgaggatggtgatttcggctatgatgactatgatgattattactaaaatgttgctagatgatgtttctgattttttttagcaattcatactcaacatggctggcagcgtggaaccgaagattgtcagagacccagaaatctttggaagctaagttgcaatctgataagctagtatcactacacgagcttttttaatgattccacatgctttaaagaaagcttgggaattattgtaccggaaaatttttaggtaggtattaccagcatcactctgcttaacacaaaatagggggttagattatgtgtttcattttaaattatacttatctctaaacatttttttaaatatgacaatcaggaagttgattatttatgcttagtttgtgtagaaattctcgcttnnnnnnnnnnnnnnnnnnnnnnnnnnn

SEQ ID NO: 29112 - DNA, 1443 bp, Glycine max
  unsure (1)..(1443): unsure at all n locations
  Clone ID: TF_GmC615_1
atttagaacatcaaaaggctccggttgtcgccacccgagatgctggctctctctctttccacgcttccgattaacacactacgcgtgcaaagaacctctgctctcctcttgcttttgatagagaagaaagaagcgagaagatgtcagacgcgttctgcagcgactgcaagaggcagacggaggtggtgtttgaccactctgccggcgacacggtgtgctcggagtgcggcctcgtactggagtcccactctatcgacgagacctctgagtggcgtaccttcgccaacgagtccggtgacaacgatcccaatcgtgtcggcgggccctccaaccccctcctcaccgacggcggcctctccaccgtcatcgccaagcccaacggcggcggaggtggcggcgagttcctctcctcctccctcggtcgctggcagaaccgcggctccaaccctgatcgcgccctcatcatcgccttcaagaccatcgccaccatgtccgacaggttgggactcgttgcgaccatcaaggatcgggcaaatgagatatataagagggttgaagatcaaaagtctagtagaggaagaaatcaagatgctttattggctgcttgtctctacatcgcttgccgacaagaagacaaacctcgtactgtaaaggaaatttgctctgttgccaatggggccacaaagaaggaaattggccgagctaaagaatacatagtaaaacaactgggtttggagaacggtaatgctgtggagatgggtacaatacatgcaggggacttcatgaggcgattctgttctaatctttgtatgaataatcaagctgttaaagctgctcaggaagctgtgcataaatcagaagaatttgatataaggaggagtcccatttcaattgctgcagcagttatatacatcataactcagctttctgatgataagaaacctctcaaagatatatcacttgccacaggcgttgcagaaggaacgattaggaactcctacaaggatctttatccccatgtttccaaaataataccaaattggtatgctaaggaggaggatttaaagaatctttgcagcccttgaattgtagagcaaaatattaccatccacatttaaatagttacaagttataatgtcattagagcattgtgtttctaatgtaactgaactgcttattacaaagtgccttttttttagttgtcattcattgccgtcaatcgcaccattttttaaactctcctaatttgattactcgttgggagcaaggcaacaacatacaaagtatgaatttctcgtttctggtaaaacgttagagttattttttaaaaaaaaaaannnnnnnnnnnnnnnnnnnnnnnnnnnnnnnnnnnnnnnnnnnnnnnnnnnnnnnnnnnnnnnnnnnnnnnnnnnnnnnnnnnnnnnnnnnnnnnnnnnnnnnnnn

SEQ ID NO: 29113 - DNA, 557 bp, Glycine max
  Clone ID: TF_LIB3242-570-P1-K1-C9
ttttatcaaaaggattatattagagtatttaccattgtcatgctacaaataaccgtcaacctatatgacccagcaatttcaacgcaagaacaaaatgaacttactatcataaaggttgagctaattttatatatatcagcggtgcctctcccctagaattctcaaattgagagggttaaccaaaatgaatgtgcagttaactaactaactacaaggaaaatgccaaacagaagaaaataactaataaaagaggcattttcattttgaattagaagtataaaacagttcagtacatccagaacagaacgttttccaatggtatctaagttgttaaatgtggtcactattgtttttcttttaagggctggataggttcttcaaatcctcttcctttgcataccagcttggtattatttttgaaacatggggataaagatccttgtacgagttcctaatggttccttctgcaactcctgtggcaactgatatatctttgggaggttttttatcatcagaaagctgagttatgatgtatataactgctgcaacaattgata

SEQ ID NO: 29114 - DNA, 142 bp, Glycine max
  Clone ID: TF_11689812
ggctgcttgtctctacatcgattgccgacgggacaacgaacctcgtactgtaaatgaaatctgctctgttgccaatggagcctcacaaaaggaaattggccgagctcaagaatacatagtaacacaactggattgggagaac

SEQ ID NO: 29115 - DNA, 710 bp, Glycine max
  unsure (1)..(710): unsure at all n locations
  Clone ID: TF_GmC615_2
aatggggccacaaagaaggaaattggccgagcaaaagaatacatagtanaacanctgggtttggagaatggtaatgctgtggagatgggtacaatacatgcaggggactttatgaggcgattctgttctaatctttgtatgaataatcaagctgttaaagctgctcaggaagctgtgcagaaatcagaagaatttgatataaggaggagtcccatatcaattgctgcagcagttatatacatcataactcagctttctgatgataagaagcctctcaaagatatatcacttgccacaggcgttgcagaaggaacaattaggaactcctacaaggatctttatcctcatgtttccaaaataataccaaattggtatgctaaggaggaggatttaaagaacctttgcagcccttgaattgtagagcagaatattaccatccatattaacaatttacaagttataatgtcattagagcattctgtttcagatgtaactgaactggttattacaaatcaaagtgccgtttttattcattgccgtcgatcgcaccattttttaaaccctcctaatttgagtactcgttgggagcaagcaacatacaatgtatgaatttcttgattatggtaaaacatcagagttattttttgctgtcaaaaaaaaaaaaaaaaaaaaaaaaagcgaccgcccgctctaaaggatgctagcgtacg

SEQ ID NO: 29116 - DNA, 997 bp, Glycine max
  Clone ID: TF_GmC299358_1
ataggccaagtgatcataggagggtgagaaaaagctggagaacaaaagtggaggagatagtggattcccacatgaggaagatcatacagactcaagatgcttggatggagagaatgttgagtgttgttgagcaaagagagcaagagatggcatctagggaggaagaaaggaagagaaaagagtcaatgtggtttgaccaacaggtgcatgaactgtgggccaaagagaaagcatgggttgaggcaagagatgctgcattgatagaggttgtgaggaaacacattgggatagggataggacttgaagcattgccattggtcgaagaagaatcaccgaataagaataagagccagggaagtattgatgccaatgagtttccctctgagggtgttgatcctggtagaagtagtagtagtaggtggacagaaatggagatttcaaatttgatgcagctaaggactagttttgagcaaagattcagagaaaataataatgggtacatggagaatggggtttgggatgaaatagcagcaaaaatggcttgtttggggtttgataggagtgcaagtgagtgcaagcaaatatgggaagagatcagcatctctctcagaaggacagtggatgagtgtgatgatggtgcaaaagaaggccttggtatttgggacttaagctgacggatgatgatctttgacacattcttgttctaaccgaaggcatcgatcagagagattaagtatatatgacactttgcttttgatgagttctgagcgtggaaggaaacttgtgggagaaacaagctagggcttgagagggttattaactaggatgtaacaagtttggatcattagcgaatcacaaggtattctaggccacgtgtttaactatatatttaattaatataacgtatgaggactcattcttgagtgtaagcattgactttgttgtttattattaattttatccatgcatgcatcagatgctagagtcatcagttatt

SEQ ID NO: 29117 - DNA, 1346 bp, Glycine max
  Clone ID: TF_GmC134585_1
cctccccccgctccctcctccactcatctctgtctctctcgaaacggcgtaacggaacgactccagtgccgtggctcatgtctggtcacggagaaacggcgtaacggaaggagtcacgtgacgtggatggctttagagcaggagtgggtcagaataggaacacaaacggcgtggatggtggagacgagggagggaaagcgccgagactgcctcggtggacaagacaagaaattctggttctgatacagggaaagagagacgccgagaacaagttcaggagggggcgcaccgcgggtttggcatttgggtcgggtcaggtcgagccgaaatgggcatcggtatcttcctactgcagaaagcatggagtgaacagaggtccggttcagtgccggaaaaggtggagtaatttggccggagactacaagaagatcaaggaatgggagtctcagataagggatgagacggagtcgttttgggtcatgagaaacgatttaaggagagagaggaaattggccggatttttcgataaggaggtctatgatattcttgattcactcccaacgaccttggctctttctctttcctcatcgcctccaccaaccacaaccataacaacaacaacagtccctgacgaccctcctcacctctatgatagtaatcggagcgcgcccggtgacggtgaggatggcttgctctcagattttgaacaagatgaagagaagaacccgccctccaacaaggacattcctgctcccattcctatctcagagaagcaatatctccgtcgttgccaagctgaagatgtgactaacgagaaacagtctacttcaaatccagaaatgggttctacttctcaaggagagaggaaaaggaagcggttagcaactgacggagaggaggaaactttgcaatatcaattaattgatgtcttggaaagaaatggcaagatgctaagtgctcaacttgaagcgcaaaatataaatttccagttggatcgtgagcagcgtaaagaccatgcaagtaatttggttgctgtgcttgataagcttgcggatgctctagggagaatcgctgataaattatagtgcaagagcaatcagactacagtgtacataacagttgaagtcctgtagataatagtggtttctgttatttatctcagcaggtctcctagaaaatgactgccacacttgttccccgtttgtttttctttctggatatgccatatttttgtggtttattactgccattttaggattatatacacacatttggattactgctctttctctcttactgttatattaatattcacgaggtcattcgaatcaaaaactgggaagtaa

SEQ ID NO: 29118 - DNA, 988 bp, Glycine max
  Clone ID: TF_GmC134585_2
ctcacgcgtccgcccacaaagccaaagccctctctctctctctctctctctctctgtctcctccatttctgtgcctcttctctgtcgttacgaccctctctcctaaacggcgtaacggaaggagtcacgtgacgtgccgaagaaaaaggaaaaggttgatggctttagagcaggagggtcagaataggaacacaaacggcgtagtggatgctggagatgagggagggaaagcgccgagactgcctcggtggacaagacaagaaattctggttctgatacagggaaagagagacgctgagaacaagttcaggaggggccgaaccgcgggtctgccattcgggtcgggtcaggtggagccgaaatgggcatcggtatcttcctactgcagaaagcatggagtgaacagaggtccggttcagtgccggaaaaggtggagcaatttggccggagactacaagaagatcaaggaatgggagtctcagatacgggaggagacggagtcgttttgggtcatgaggaacgatttaagaagagagaggaaattgcccggatttttcgataaggaggtatatgatattcttgattcaccagcggccttggctctcgctctttcatcctcatctcctcctcctccaaccacaaccaaaacaataacactccctgctgaggagcctctgcctcacctctatgatagtaatcggagcgcgcccggtgacggtgaggatggcttgttctcagattttgaacaagatgaagtcgctgccagttcgaagaagaacaaggacattcctgctcccattcctatctcagagaagctataccaaccactcctccgtcgatgccaagctgaagatgtgactaacgagaaacagtccacttcaaatccagaaatgggttctacttctcaaggagagaggaaaaggaagcggttagcaactgacggagaggaggaaactttgcaatatcaattaattgatgtcttggaaag

SEQ ID NO: 29119 - DNA, 468 bp, Glycine max
  Clone ID: TF_GmC61615_1
tgtacactttcttttcctttttctctctcactactgtctttggggtgaagatatgggtgacccttatgggctaccggaggatctccggcggcttataccagccagaagtacccatttgaacccttcaaacacacacctacttgagccactttgtcttcaccatggtctcagtagtgctgtttcttctgctactactccacacactagttttgaccccaacatggttggggacgttttcttccctcgtggtttcactcaccactttgctcatcatcatgattattcttcttcctctggtgtaaaccctgttgttacttgctactgctgctgctactactactgtctcggatcatgcattctgcagcatggaaagtgcaaagaaagggtggtttgggtttgactccgggaacaacaggtggcctagacaggagaccctttcgcttctagagatcagatctcgtcttgatt

SEQ ID NO: 29120 - DNA, 489 bp, Glycine max
  Clone ID: TF_LIB4391-037-R1-K1-H3
gtcttaatggatgtgtactgcaaatatggtttgttatttacttgtttcctttagcttttgtttatttttctgtttaattacttaaaacaacttttaaaattcatttgtatttgtgtgtttcgtttccttaatcttaaataagattttgagtttggatgtataaatgaaaaaaataattaaaaaaagaaatattacatattaactaagtttttcgatatgatagagattagttattttagtagaattgaaaggagaaatcttaccggccaaccaggcttggtgaagtgggtgataaagaagcactcatggatgaaaaaaaaaaagaaaaaaaaaaattaagaggaaaaccgaagaacaggacaagagactataaggcttcataagtgatacgctccgatatggacctggcgttttgtgatgcaagtgtcaacggttccttgtggcaagacgtattcataaaaatggcagagctggggtatctctgaagct

SEQ ID NO: 29121 - DNA, 2752 bp, Glycine max
  Clone ID: TF_GmC247_2
aattcggctcgagcatggccttcactctcagattgggggtcccctttttctttttctttttcgttttccttttcggtttccgagagattgaaatggtggtggcttagcaattgctttgtatttatgttagtcttaggaatggagtttgtttgaggtgtatttatgctttacatacatacatatagtgtggtggtcagaaaggagggtagaggaagaaggaatattctgtgaggatgacagattttcagccgttacagcagaagcctgagcctgctgatgcccatgccgaagttgagagggagagagttagacagattgttcagggatggatggaaagcggtattagtgatcattcgtctaatgtgagtcagataaacaatagccggagagcagaatggcttggtgttctatttcactttaccatattcttctcaattttcctcaatcgcatgtgtttgatgtcttccggttcacggttccaagatatcagcagtagttggccaccctgggaatatgttgaaatgaaactctcaatactgggtgaccatcgaagagcacaaaagtacaaagaaaaattcgagaaggagcaaaaataccacaaaagaaaataagtgtgctgaattacgaaacacgggggagaaaccatcagaattttttacatatcagcagaatggcttggagaaacagagcgcgagagggtaagaaatatcagggaatgggtgcaaatgattagccagcagagaggttcacgtgggagccggagggatgctcaagtaagtgagggtgcccaagctgatcgagctcgttactgaatatgggaaaatgatgaaagtaaagaagagcatgtttggggggacatgtaaacgtttggtggaatcctgtctgtactttatctccggaggcacctaggtaagcttttatctctggtacttctgggtttcttaaacctccttgctctttcaaataatgcttttctcccacccattcagtcactgcacagatgtagatacgcccgaaatgaaagaacttttgaagatcagatgcaaatgtctatggctgctagtgaattagttcagctatgacaacgacacactgtctgtggttagagggaaggtttaagttcaagattagcatatattgtttgtggttgtgcaggaaccagtccctgacaccacatgtaatagcaaggcaagtgacacaatagaagatgagaaccaagcaaacatgctcctaaatccagtgagtccaaatttgaaacaacagcaccacacatgcctcgacgttcttgtgcggcacatggctgttcgaagacgatgcctccatccggtcatacgtgattgtcatcgtttgcatctgccataaattagccacctgctgttcgtggccgcaaaactccgcctcatcctcaacatgatggggagccaccacactctggaccaaaagaactgatttgcccggaaagaggtgttgaaattaagcatccagagaatgaaccagggggcccattgcgcgaggatataaaaagtgcattgcataatcttgggtccagccggagtgcaaagagatggaaggaaaaatgttaaggaatcaccaggaacttccagaaagttaggaagagaagcaaagaaaggcgtgaagatagcaaggcatgtgccaatttccatctgcttcaatgcctatacgaaggcaagggaaaagttttgaacatgtttggaagatttcagtgtaaaaggtggaacaagacaatatggatggaggggttggtggtggagctggagcaacagtggaggaagcagggtaaaacatcgaagcatgggatggggaaggttcgtagagagggatgtggatgagaaggttatggatacagatgattatgctacagggctatatgcaggagatgatgcagatggtgaaaaattagccagaaaggttgggcctgagattatgaatcagttgactgaaggatttgaggagatgactagtagagttttaccatcgccattagaggacgagtttttggatgcactagacatcaattatgcaattgaatttgagccagaatatttggtggagtttgataatccagacattgatgagaaggaaccaatttcactacgggatgcacttgagaaggcaaaaccattcttgatgtcgtatgaggggattcaaagtcaggaagagtgggaggaaataatggaagagacaatggcgcgtgttccattgttgaaaaagattattgatcactacagtggaccagatagggtaactgcaaagaagcaacaagaagaattagaaagagttgctaaaactcttcctggaagtgtaccatcttcagtgaaacaatttactaatcgtgctgttatttctcttcagagcaacccaggctggggatttgacaagaaatgtcatttcatggataagctggtttgggaagtgtctcagcattacaagtgacctactggcctgcttgcattttatttttattttactttgagttttgatgaaacaaactgctactactcttgtaataatgagttgttgtagcgttattgctagcaattgttacaactctcgtatactttgtaataaatgaattatcattttaattagactttcaaaggtgataaactgtgggatgataattgatgattaggaaattaatggttaaaattttgataatttcataatatgtatgtattttttcagagtgttaattgttttgtgaattaatgattattgttgagtgtaaaaa

SEQ ID NO: 29122 - DNA, 388 bp, Glycine max
  unsure (1)..(388): unsure at all n locations
  Clone ID: TF_jC-gmXLIB3563P080cd01a2
acctttgtgggcaggtgggactacctaattgatagtcctctgctgggggactcagccgtgttgggaacaggaggaggaggctctggtgatgcagtggcagcagcaccccctgctgcctcaggcggagcccatgatggtgttgttgacggcggtgtcggtggcggtggcggatctcatccgggggatgatagagttgacgaatgcgagacgagctttggtgggaacaggtggcctatgcnagatactttggctttgttgctgtgcggccggatatggacgtggcttttttagatgcctgtgttttgggtcccttgtggggagaggtttctaggtcgctggctgagcttggcttccactgatatgccttgcactgccctgagcggtttgc

SEQ ID NO: 29123 - DNA, 670 bp, Glycine max
  Clone ID: TF_GmC1630_1
ggatttttgttttgggtttttgctcgctgatgttttcacaaaatcggtttccactgatttcgcattcttcactcttccatgtctaaaatctccgaaatggacgttgctttcaaagacgcaaacgccaaatcccctctctgggaacaagtctcaagattcaaacttttgcatcaagaagatatagagtttcaaagatttggtatgcgtaacaatgttgatcagctttgtgtttttgagtgtggaatcccaggaagtgcttgatgctgaactctcagcttgagtttcacagttgataaatgtaactgacagttgaatacagtcaggaaaggagatgttcccttgcaacagatctcagcttgtttacttacgaataaaggatggtactgtgcctgtctgatttttttcagaagtacctcctgaagaaacttaatattgccagtggagcagaggtggaaataatgtgtcgaggtcagccagtgctcccatctgtacaactgcataatttagtagatttatgaattaaagtgtagttttttcctttgtttttttaatgcagtttttttcttactttttaatgcaggttttgtctttattttgtggtgttcatgattactttatttgtttcttatggttgattattggctatttaagaaatctagaggttgatacg

SEQ ID NO: 29124 - DNA, 770 bp, Glycine max
  unsure (1)..(770): unsure at all n locations
  Clone ID: TF_LIB4164-058-R1-N1-E11
cttgcatgcctgcataatcatgtttaactctgtcatacaacatgatttgttgcaactatatatggactcgttatattattcccaaaggatttcagctgaatgatttgaatggcatctgggtaatcttattactacggaatctaggagtatgattaaataattattatatatctaattatgtatactagaaaatataaattataataaggtacccccgctccctccctagcctcccaaataattcattaaaataaaaaataaaaatccactgacaacaaatgggtttcacaaactgattggtttggaaattgaaaacgaactcataaatcttcatgcatgatcttgaagaagctagcaaaacaaagtgaaaagaaaaagctgaatagaaaaagatggaggagaagctgaggcacacaaacacaaaaaccagaaaataaacatacatgaatagtgaattatatagttatatgtgtgttgtgtaccttgcaacttcttcccaaagtggacccttaagacttgaatctcgaaacacaacatccatatcggaccttatcttcaagagagccaaagtttcttggcggggccatctgtttccaccgcatgagttgttgatcttattgtcaccttcttcttcttctccaccaccctcttctaattttcctttattattatgattattattctcttcttcaccggaattcgcatccatcataatcacctcgccaccgccatgcgccgccacagcctcaccgnacgacgtttccatcact

SEQ ID NO: 29125 - DNA, 1516 bp, Glycine max
  unsure (1)..(1516): unsure at all n locations
  Clone ID: TF_GmC1402_6
gatccttctgcatcatcacccttcgtataataccgtctctccctttttgcatttttctctccatcattgacttctgccaagtctttcaaaaagctagctgatcgaggaataatatagcatgcacgaggtcttcgtggaagaacataccattgacacttgccacatgccaagcgagttggtgaggtgaatgttacttatgatgttaattacactacgtccatctcactcttaatttcttaatccgagtcctttagtcaattgctttttagccccttttgaaattccaatctcattctaactttgcacaaacaattttcttagcggtggaaaattggaaattttgttagatatatagaaatattggtgaagtagtggactttattaggagttgatggaacccaatgcactaggtggtggaatatttcctaacataagtagtggtttgctaggagtagaaaaccctttacaacaacaaccaaaccttcaaaaccagcaaaaccctcaccctttgcaccatccccaaatggtttcctacgccactaaccatgacactgacacacatcatcaacaacaacctcctcagcaaccaatcaaacatggctacaacttttcagccatcaaatccaacaagtcacaaagcacactcagtgacgaagatgaaccagtgttcacagcagaagacaactgctccggggaccccaagagaaaagtgtcaccgtggcatagaatgaagtggactgacaccatggttaagctcctaataatggcggtccattccactggagacgaggctggttcagaatgcactgatccaaccaagaagaaagcctctgggctgcttcaaaagaaagggaaatggaaatcagtgtcgaagggcatgatggagaagggttactatgtgtctcctcagcaatgtgaagacaagttcaatgacttgaacaagaggtacaagagggtcaacgacattctaggtaagggcacagcatgtcgggtggtggagaaccaaaccttgttggacactatggatctgtcgccaaagatgaaggaagaagttcgaaagctcctcaactcaaagcacttgttcttcagggaaatgtgtgcttaccacaacagttgtggccacaacaacaactgtggcagtacttccaacgtgcaacaatcaaccgaggctcaaccaccacatcaacatcaacagcagcagtgtttgcactcatcagagaacggggtggggagtctgagaatgttgaaagaggatgaggatgaggacgatgattcggaggagttttctgatgaggatgaagaggaatcaggagaaggaggatcaaggggtatggaggaggatgaaaatgatgtgattaggaggagagcaaggaataagggagggtnttggtgtttcatcatcacagatgatgcagcaattgagtggtgaagtgagtggtgtgttgcaagacggagggaagagtgcttgngagaaaaaacagtggatgaagaagaggggtgtgcagttggaggagca

SEQ ID NO: 29126 - DNA, 442 bp, Glycine max
  Clone ID: TF_LIB3242-239-Q1-J1-C9
atcttctaactcgggttcatgtgtttctcatgggagacatttctgttcatcatcaattcatgccattttgttacccaaaatttcaattacgtgcaacttttacattttctcccatctctttttcacttacttcttttttcccactgcttgattaattcacctcatatatgttttttattttatgtttatctcatgctcacaatgctttttatcctttgtcctctagctgaatttgatgagataagataaacccaggagaaaactctcctctctctctctctccttattttttttttcattttttgtcttctccttgtgtatcaggaaaatggcagagcttgggtatcacagaagctccaagaagtgcaaagaaaaattcgagaacgtgtacaagtaccacaagagaaccaaagaaggtcgaagtgggaaacaagatggaaaa

SEQ ID NO: 29127 - DNA, 901 bp, Glycine max
  unsure (1)..(901): unsure at all n locations
  Clone ID: TF_GmC429768_1
atatcatcatcctccttcctcacctcttttttttttttaattttcatttctctccactttcttcttctttgttaaccttctcacatggaaatggaggaccatcatcagtatggcatcgctgatctgaggcagctggtgaacggcccacggcccacccatttccccgccatgcctccgcagcccaaggcggagctgttcccaggcggcggcggcggccacccaaacctgcaggcggcgacacaacaacactacgagatgatgatgtttggtcgtcaagtggcggacataatacctcgttgtcttcacgacttcgcccccactgattccgccaccaacatcgccgttgccactcccaccaccaccactagcgcctctactcctccgcttagttgcttagaggccgagaccgcaggatgcatcggtggagacgcctccactggaagatggcccagacaagagactctcactctccttgagatcagatctcgcctcgactctaaattcaaagaggctaatcaaaaaggccccctatgggttgaagtttctaggtaccatttcaaacactactctcttctgttttcaactttaacatctgaaaattataattatttatttggttggttctttgcttgggattgaagaagtaaaacaattcaatgtttgtgtagctaccttcttgacggtttcctactaagatgactgcacttaattggttttaatttggttactagttgtagtgatgctactttctggaaactccagtaattgctggaagtgactgtactataatacacgggtcgtggtctcgctactcaatttttcgattattgatcgtgtacgtgtacttccaagtgctagctntaagttcatataccaatattagtacgtctctaccactgtc

SEQ ID NO: 29128 - DNA, 1331 bp, Glycine max
  Clone ID: TF_GmC1402_2
ggactgacaccatggtgaggctcttgataatggcggtttattacattggtgatgaggctggctctgaagggactgataagaagaagtcatctggtttgatgcagaagaaagggaagtggaaatcggtttcaagggctatgatggagaaggggttctatgtttctcctcagcagtgtgaggacaagttcaatgacttgaacaagaggtacaagagggtgaatgacattcttggcaaaggaacttcctgcagggttgtggagaatcagagtttgttggattcaatggacttgtctccaaagatgaaagaggaggttaagaagttgctcaattccaagcacttgttcttcagggaaatgtgtgcttaccataacagttgtggacatgggaataacaatgctccacagcaaggagagtctgggggtgaagtgtctcagcctcaggctcaacctcatcatcatcagcagcagcaacaacaaccgcaacaacgatgttttcattcatcagaggttgggaatttggggggctcaggtgttgagggtttgaggatgttgaaagtgggaaatggggaagagggtgatgatgactccgaggatgatgatgactcagaggatgattcggacgaggacgaagatgattcgggagaaggtggttcaaggggtcatgtggggcatggacatgaagatattgaggatgagaatgatggaaggtcaatgagaaagagggcaaggaaagtaggaggggtttctatgtcaccacagttgatgcaacaactgagtgctgaggtgagtggtgtgttccaagatgtaggtaagagtgcttgggacaagaagcaatggatgaggagcaggataatgcagttggaggagcagcaaataagctaccatactcaagcttttgagttggagaaacaaagattaaaatgggcaaggtttagcagcaagaaggagagggaaatggagacagccaaacttgaaaatgaacgcaggaggcttgagaatgagagaatggttttgctcattcgccagaaggaatttgaattgatgagtcttcaacaccaacaacagcagcagcatcaacaacaacattcttccacctagatctaggggagatgatttttctgcggttaattgtattgatagatgaaactaaggtatagaaaagatgtagatcgattaggcctaatagaggaaagtggttgttctctttttggggtacttattataagatggttgttattgaagaaaagaaaaatagtaaatttctgtgtctaccatctagatacccttttgtttatttaaacatgctttggttattactattaattttgtttt

SEQ ID NO: 29129 - DNA, 2302 bp, Glycine max
  Clone ID: TF_GmC1516_1
gttttcctgatattctctccctttttggtggggttcttttcagttttctcagcctttcttcaaactctttctctgcgtgatagatgtgtttctcctgatcttcagctctggattctgggcttggttgcaaaaaggtcattttttattggcttatgagggtgcaggttttcagcagataagtagcttagcttccttgttcataagccttgaaggtttttgatgctgtttttctgcactttttgaacctttttacctttgttttgcatctgggtgttgttttggaactatctcactctgttggcatgtgagttttttttacatgtgtggattttagatattggtctaatggtctctcgatctctctgaaatgatatttggtggagagattcctgttagcttgatggcttttttacttgaagatctaaagtgtaatggatgaggttgaaaaagctgttggatgattgagcattaaatggctttgcatgattttattctgtagataaggttatagtaattgaaaggaacgggagtggaactagctgagcctagaaaatgaaagaatgaagcttgaaaatgatcgtgtttgcgtgaagcaatggaagggaatttgccacagggaggtataattcaaggtgggacttcttttggtggctttgatttgccgggatcaattcgggttcagcatcaagcacaacatccccattccatgcatcaacatcaaactcatccgcgacaagggtcttctgtacattccgccgttcatgatggttttccacttacaatgggaaccatgcagaactgtgaccaaaccatttcattggctgactttagtaaaggagacagaagtaaaaactcggcgagtgaggaagacgagccgagctataccgaggatggtgttgattgtcaccatgaaacaactagagggaagaaaggatcaccttggcagcgtgtgaagtggactgataagatggtaaagcttctgataacagctgtttcttatataggtgaggatgtaactgctgatggtggtagcagcggaagaagaaagtttgcggtcttacagaagaaggctcagtggaaatctgtttccaaggtcatggctgaaaggggttatcatgtttcacctcagcaatgtgaggataaatttaatgaccttaataaaaggtataaaaagcttaatgatatgctagggaggggcacttcttgtcaggttgttgaaaatcctgtgctgttggatgtaatagattttctttctgagaaagaaaaggacgacgttcggaaaatattgagttcaaaacacttgttctatgaagagatgtgttcttatcataatggcaacaggttgcatttaccccatgatcctgcattgcaacgttcactgcagttagctctccgaaatagagatgatcatgatgatgatatgagaaggtcccatcatgatgaagatgatcaagatgtggaaattgatgatcatgatgactttgaagagaattgtgcttctcatggtgatagtagaggaatatatgggccattaggtggatctatgaagaaattgaaacaatgccaaggccaagaagatgctaatacttttggtaactctttaaattgtcaggactacaacaaaagttcatatccccatggacagatgatcccatctgatgtgaatcaaggtttacctgaaggcatgaaagcagcttggttacagaagcaatgggttgaatctcgcacacttcagttagaagaacaaaagctacaaattcaggtcgagatgctggaactagagaaacagagattcaagtggcagaggtttagtaagaaaaaggatcgggagttggagaagctgagtctagaaaatgaaagaatgaagcttgaaaatgaacggatttctttagaactgaagcgaaaggaaatgggcactggctttaaataggtcagcgctcttgcaagctttgtggcaattgcattacatgcatggtgctccatttttcttgtttttgctgtctttggtaagatgtggtttgtttagttgaaactatgggtttttttattggggaactttgcaaatctaactctcactcctgcttgtattgtttaaatttaagagtagtgcataattattaggctctactgaagttttgttgcctatgttcaaagactgggtagctgaaacaccgttaatctttttattttgtaatattaattttctaatattacatattgtctgtcctttcatttttttaaagcctgtatatattgttctggttattttttatttccatctatggttagactattgctgctc

SEQ ID NO: 29130 - DNA, 346 bp, Glycine max
  unsure (1)..(346): unsure at all n locations
  Clone ID: TF_LIB3242-558-P1-J1-A8
ggttcgagcaaaatctctttatgtgatgtttttttttgacagtcatttttttacatgggtggtgtgttttccaaatgggttaccaaatcaaattggttcttcaaaagcaacattttcttcctcccttatttcggttacccactcttggttgggaatgaatgaaggaagctggcagagcttggctacaacagaaatgccaagaaatgcaaagagaagggagagaacgtttacaagttccacaagagaaccaaagaaggacgaagtgggaaatcagtaggcaataacttatcgctnccaagaacaaatacaagcccttgaaaacaaccctgcaattcatgggaagcaa

SEQ ID NO: 29131 - DNA, 451 bp, Glycine max
  Clone ID: TF_GmC5795_2
gggaaattggcttgtgttgtggaattttggtgctgctgctactgctattactactactccttcttcattgagttctttatcttcttctaggtggccaaagacagaagttcatgctttgataagactgaggacaagtcttgaaaccaagtaccaagaaaatggaccaaaggctccattgtgggaggatatatcagcaggaatgctgaggctcgggtacaacaggagtgccaagagatgcaaagagaaatgggagaacatcaacaagtacttcaagaaggtcaaggagagcaacaagcaaaggcgcgaggatagaagacatgtccctattttaatgaacttgaagctttatacaaagaaaagagcaagactcagaacccctttggcgcttcgttccacaacatgaaaccacatgagatgatggagccattgatggtgcaacccgagcagcaat

SEQ ID NO: 29132 - DNA, 2267 bp, Glycine max
  Clone ID: TF_GmC517_1
ggacgcgcgcaacagcgacagcgtctttgtcatcccctcctggccagttgcccgtggccttctggtcatttgctgccggtctcccagattgtgcgtggcacccgccactcccctccgacccttcccatgcacacaaccatcttcggccgaccccctctcctgttccgcctcttcatcgcgcccaggccccctcttccgctccacctgtccctcccgctcctccctcatgcctcctcgtcccctcctcctcctaccctcccccccctcccgccctctacccctgctcctcaccctctcgccccatcacccctatcccatcagcccctgctcccccctcctccttccccccccccccaacaccccctaggcccggttccagtgagaattcgaaagatgatattggggattcaaagagatcaaagacaattaccagatcagctaaccgattcctggaccaacgatgaagtgcttgcacttttcagaatcagatctagcatggaaaattggctcccagagctcacatgggaccatgtctcaaggaggctagcagaggttgggtttaagaagagtgctgagaagtgcaaggagaagtttgaagatgagagtagatatttcgacaacatcaataactacggcaagaacaatttccggttccttattagcgagctggaggagctttgtcaaaactctgatcctggtgctcatgatcataatggggttgtagtgaggagtgaaaagactcaccacctaggaggacacgcattggaagaaaattcgagagacattgaaacaactacagcgaccaaacgatgtgatattggaagtgacacagtggtggagaagtcaaattcaaaggtgcgcaagaggaagaggcgtgataggttcgaaatgttcaagggtttttgcgagagtgttgtcaacaagatgatggctcagcaagaagagactcacaacaagctcctcgaggacatggtgaaaagggaccaagagaagttcgccagagaagaagcttggaagaagcaagagttggataggatgaaaaaggagcttgagattatggcacaagagcaagccattgccggggatagacaagccaccataattgaattcttaaagaaatgtgcaacaacaacaataacttcattatcccctccaagccaaaatgccaagtactacatcacaaatgattcaaatcttccaaattgtgcatcgcattcgcaaaaccctaataatccttccaatgaagacaacaatcttgagccaacaccttcttctaaaatgattcaaaatcatggccaaactacgttgggagcagaaaaccctagcacaagtgacacattattacaagttccttcttcctccaactcttccccaacaacccacaaccctagttcttcactcaatagccacaataacattatcccactagagtcaaattcagtttcgacatacaagcccacctcaacaacccctatggccagcagtgagaattcgaaagatgatatggggagaagatggccaagagatgaagtgttagcactgataaacctaaggtgcacaagtctaagcagcaatgaagagaaagaaggaaacaagggtcctctgtgggagagaatctcgcaagggatgtcagcgctgggatacaagagaagtgcaaagaggtgcaaggagaagtgggagaacataaacaagtacttcagaaaaaccaaggataatgttaataagaaaaggtcccttaactctaggacatgtccttatttccatcaactgagttgcttgtatggtcaaggaaaaatcgtgccgcagtcagaaagggaagggaactactgcttgaatccaaccccgaattccggtcaagtgccaccggatgatgatcatcaagtccaagacgatgagtcttctcaagtggggtctgctggtttggttcagtatgcatgttgatcatgcaggtgagaaagctttgaaattaatacccttctttggattgtgattaattagtttcaaattcattaattttgtccatcttatatggcttaataagttccactattttccgttttcttttgattttggtggtgggaggactttcttatatatagcataaattaataattgaatatgtatattttgattttggtgagcatgcaccgacagcttgaggaattgaattagaacaatgtttcctgttttgtggatgattttataatgccagtgcaatttacatatttaaaaaaaaaaaaaaaaaactcgagactagttctcctcgt

SEQ ID NO: 29133 - DNA, 1335 bp, Glycine max
  Clone ID: TF_GmC36_2
cggcttgagcgaacaacaaaacctcggtcaagcgttgaccaacatcaacctcgtacaaccacaaccacaactacaaccacaaccaccggtacaacaacaagtgacaccacctaatatagtaccagctcctatgcaacaaccactgcctgtgattgttacacagcctgtggtgttgccagtggtatcacaagtgaccaatatggagataatgaaagccgataataataacaacaataacaataataacaactgcgaaaatttcttgccaccgagttcttctcggtggccgaaagtggaggttcaggcattgataaagcttcgaacgagcatggatgagaagtatcaagagaatggaccaaagggtcccctctgggaggagatctcagcctcaatgaagaagctggggtacaaccgaaacgcgaaaaggtgcaaggagaaatgggagaacatcaacaagtacttcaagaaagtgaaggaaagcaacatgcggagaccggaagattccatgacgtgcccttatttccaccagctggacgcgctgtacaggcagaagcacaaagccgaagagagcaccgaggcggagaaggccgagagcggggggggaccaatgatggtgctagccggagcagcaatggccacctcagcagcaggatgatagggacatcacaatggaagacatggagaacgaatatgatgaatatgaggaagagagggaaggagaggaagaagaagaagaggatgaacaggaggaagaaggtggtggtgggaactatgagatagtggcaaacaaaacaagtggcggtggtggtgctgctgcttcagtgggggcttcaacggagtagtgtggggtgggtcaaaaaaagtgcaggggttgtcggaggtggccattgtggtggagaaatttaagaaactgaatattcaagtagggtgaagttacacatggcaatggcatgggtaatggtggtatcgacctgtggtggaaagatgaggtttgctttggttggttggtactttgttgtagcatatagtcagtaagattatatgtttcttttttctgttttataaaaaaagttgtttattttttgggagaataaataaaagtccgatcagagagggaatttaagatagagcccaataaagaagaagaggggccttaattaaggttgtattttttttttttttatcttcatcttgttttttatgttcgttcctggtgctgtaaatgggaggagattaattcgggttttgtccttttcttatctctcagttttgacatcttcttacccttccaatgactgtcattgacttctttttcaattcccacatttttttttt

SEQ ID NO: 29134 - DNA, 2931 bp, Glycine max
  Clone ID: TF_GmC36_1
atcttctaactcgggttcatgtgtttctcatgggagacatttctgttcatcatcaattcatgccattttgttacccaaaatttcaattacgtgcaacttttacattgtctcccatctctttttcacttacttcttttttcccactgcttgattaattcacctcatatatgttttttattttatgtttatctcatgctcacaatgctttttatcctttgtcctctagctgaatttgatgagataagataaacccaggagaaaactctcctctctctctctctccttattttttttttcattttttggctaaaaaatttgaaagaatacacaccctttttgctctcgcgacctttttaatttttctcttggtctcaactgctgtaagtaattgctgcggcgctgtttcggaaaagagagagacccaaaagagactatgctcggggactcagctgtgctgggagcaggaggaggaggaggtggtggccgcggaggaggagtagaaagtggtgcctccgccgatgcagtggcggcgacggtgaccgtgacacatgatgtggcgacgacaaccggaggaggcggtggtggatcaaataattcgggggacgatgagaggggtagaatcgaagaaggtgaacgtagcttcggcggtaaccggtggccacgacaagagactttggccttgttaaggatacgctccgatatggacgtggcgtttcgagatgcaagtgtcaagggtcccttgtgggaagaagtatccaggaagatggcagagcttgggtatcacagaagctccaagaagtgcaaagagaaattcgagaacgtgtacaagtaccacaagagaaccaaagaaggccgaagtgggaaacaagatggcaaaacctatcgtttctttgatcaactacaagcccttgagaaccactctccaacaccccattctcccaacccttcaccaaaacccccacaatcagcaccatcaagagtagtagcatcatcggtgtcactaccaattgcaacaacaacaacagtgtcactaccaattccaacaccaacaacagtgccaatgcagcctatattgtccaacaacgctatactcactagtagtgtccccaatatcactgttccatcaacaacaccactccctataaccattcctcaacccattctcacctccccatcaataaacctcacaatcccttcttaccctccaacaaaccctaccaatttcccaccaccaccaaaccctaccctaccatcctctttccccaccgacaccttctccaattccagctcctcctccacctcctccgaggaaacattggaagggagacgcaagaggaagcgcaagtggaaagatttcttcgagagactaatgaaagaagtgagcgaggggcaagaggagctacaaaagaagttcctggaagccatagagaaacgcgaggacgacagaatagcaagagaagaagcatggagagtacaagagatgaaaagaatcaatagggaaagagaaatcttagcacaagaaagatccatagccgcagccaaagacgcagccgttatgtcattccttcaaaaaatagccgaacaacaaaacctcggtcaagtatcgaccaacatcaacctcgtacaacaaccacaacctcaattacaaccgcagccaccactacaacaacaagtgacacaacctagtattgcagcagcacaacctcccgtacaacagccaccgcccgtggttgttacacagcccgtggtgctgccagtggtgtcacaagtgacgaatatggagatagtgaaagccgatataatagtaacaacaataataacggcgagaatttcttggcaccaagttcttctcggtggccaaaagtggaggttcaggcattgataaagcttcggacgagcatggatgagaagtatcaagagaatggaccaaagggtcctctctgggaggagatctcagcctcaatgaagaagctcgggtacaaccgaaacgcgaaaaggtgcaaagagaaatgggagaacatcaacaagtacttcaagaaagtgaaggaaagcaacaagcggagaccggaagattccaagacgtgcccttatttccaccagctggacgcgctgtacaggcagaagcacaggggcgaagagagccccgcggcggtggaggcgaagccggagagcgcggtggcgccgttgatggtgcagccggagcagcaatggccacctcagcagcagcagcaggatagggacatcacaatggaagacatggagaacgaagatgatgaatatgaagaagagagggaaggagaggaagaattagaggatgatgaagatgaagaggatgaagaaggtggtggtggtggtgggaactatgagatagtggcaaacaaaacaagtggtggtggtggtgcttctgctgcttcagtgggggcttcaacggagtagtagtgtgaagaaaccaggtttagcgtgggggtgggtcagagagagtgcaggggttgtcggaggtggccattgtggtggagaaattaagaatttgaatattcacgtacggtgaagttacacatggcaatggttatggtatcgacctgtggtggaaggaggatgatgaggttcttggttggtactttgttgtagcatatagtcagtaagattatatgtttttttttcttttctgttttataaaaaatttgtttattttttgggagaataaataaagtccgatgagagagggaatttaagatacagaccaataaagaagagagggaccttaattaaggttgtattttttttttttttatcttcatcttatttttttttaatgttcgttcttggtgctgtaaatgggaggagagattaattcgggttttgtccttttcttatctctttaagttttgacatcttgttactcttcaaatgactgacattgacttctctttc

SEQ ID NO: 29135 - DNA, 2619 bp, Glycine max
  Clone ID: TF_GmC247_1
cctttttgttttctttctcaagctgctgtaatattgcttacctagctagctaggtagggacatttctctctctttttatctatctatggagattggagacactaccacagtgatggaaacgtcgtccggtgaggctgtggcggagctacggcggtggtgacgggaggatgttggacgagaattcgggtgactatgagactaattctcattattataatggaaaaatagatgagggtagttgagaaggaaaggggtgcccccccagtgaaacttagtctctttcaatgttttgggcttttttggggggatttattcctgattcctgtttctaatgaaagcttggtcaaaatggcggtggcgaggtgattatgatggatgcgaattccggtgaagaagagaataataatcataataataaaggaaaattacaagagggtggtggagagctgtaattgcatagggacacaacatctctatagctatatgcagctaggagactcaagtgtgttggagatctcctcccatacccagcccgagatggcggtggtgttgccaccagaagaagtaccccatgaaggcagcgacaacagtggtggtggtggtggtagtgagatgattgggatggatttggatgcaaattcaggtgaaggaaatgaaggtaacaagatgagctttggagggaaccggtggccccgccaagaaactttggctctcttgaagataaggtcggatatggatgcagtttttcgagattcaagtcttaaaggtccactttgggaagaagtttcaaggaaattggcagaacttggatatcaaagaagcgcaaagaagtgcaaggaaaaatttgagaacgtgtacaagtacaacaagagaaccaaagagaacaaaagtggcaaatcacatggaaaaacctataaattctttgatcaattacaagcccttgagaaccaattcacaagtctcttacccgccaaaaccacaacctacttctactttggcaacaacaaacccattgacattgccaacaaggccaagtgatcatggtaacaaagttatctcttatgtcacaacttttccttccacaaaccctactctcatttcaccttctccacaaaccaacactaccaccaccaccaccacaacaacatccacaaccaaccctagagattcatcacgaccacaaaccaacaacaacaataatagtgtcacacactctttgccaaacatgaacacctctttctctaccaccactgcctccacctcatcctccacagcatcagatgaagacttggaagagaggtataggaggaagagaaagtggaaggactacttcaggaggctcactaggaaggtcttgttgaagcaagaggagatgcaaaagaagttcttggaagccatggaccaaagggagagggaaagggtggcacaacaagacaattggaggatgcaagaaatggcaaggatcaatagggagcatgagattcttgttcaagagagatcaacagcagcagccaaagatgctacagtcattgcattattgcaaaagatgtatggccaacaaaaccccacacaacaagttgaagtagagccaccaccacaacagaagcaaacaattccccaatcgctgcctccaatattaatgccaaacaataatttcgaggtcaagaaaataaataatggtcacagtgttactagtactactactggtactgttgctactgctactactactacttcgccggtgaattcttcttcttctcggtggccgaaggcggaagttcatgctttgataaggataaggacaagtctagaaaccaagtatcaagagaatggaccaaaagctccattgtgggaagatatctcaattgcaatgcaaaggctagggtacaaccggagtgcaaagagatgcaaggaaaaatgggagaacatcaacaagtacttcaagagagtgagggagagtagcaaagaaaggcgtgaagatagcaagacatgtccctatttccacgagcttgaagctctatacaaagaaaagagcaaatcgtccaagaacccctttggcatcttccagaatatgaagcctaatgagatgatgctgatgatgacggagccactgatggtgcaaccggagcaacaatggaggcccccacctcaatcattggaagagggtgtagggatggagaatgcaagtgaagaatatcatgaaaatgaagaaaatggtggtgacgatgatgataacattgaagaagatggagatagtgtggaagatgaaggagcaaacccgtgtgagattgcgacaaataattaaacgtgcttcagtggacaccgttgaagtagacaagataaggaattttctgaatggagaaaaattacgtgtgtggttaaatttacttttacttatttcggaaaaaatagtcctttatttttttttcatttttttagacttcaaattgtgattatttcttaaggaaaacaaatgttgggtatagtatagtcattcaattttctatttttcggatggggttgtaacatgctactgaaaaaaattgtcatagattgttgacattaaagacgaaaaaatttaaaatttcgaactattaaaaagcggcgctctagaggatc

SEQ ID NO: 29136 - DNA, 2133 bp, Glycine max
  Clone ID: TF_GmC1404_2
caaaatttcgatatgtgatgtggttttctgacagtcattttgatacatacatggtgtgttttccaaataagttaccaaatcaaattggttcttcaaaagcaacattttcttcctcccttatttcggttacccactcttggttgggaatgaatgaaggaagctggcagagcttggctacaacagaaatgccaagaaatgcaaagagaagtttgagaacgtttacaagtaccacaagagaaccaaagaaggacgaagtgggaaatcagaaggcaaaacttatcgcttctttgatcaattacaagcccttgaaaacaaccctgcaattcatggaaagcaatctccaacacctccaaagccgccaccacaaacaacagcactatcagcaacaccagtgtcaatagtggtaacaacaactacaactacaccatcatcaataataatgccacttccattgccaccagtgtctaataacaacaacaacaccactgttccatccacaacatcacttcctatgcctcaaagcattctcaacataacaccaccatcaacactgaacatcacaatcccttcttttccaccatcaaaccctacaacatacttcccaacacaaacaccaaaccctactagcaacaacaacaacaaccctccaagcaccatcaccccaccttccttccccaatttccccgccgatctcttgtcgaattcgagttcttcatcgacttcttcggaggaaacaccgacgacggaggccagagggcgcaagaggaagaggaagtggaaggacttctttgagaggctcatgaaggaggtgatagagaagcaggaggagctgcaaaggaggttcttggaggccatagagaagagagaacaagagcgtgtggtgagagaggaagcgtggagaatgcaagagatgcaaaggatcaacagggaaagggagattctagcacaagagaggtccattgccgcagcaaaagatgctgctgttatgacatttttgcaaaagatagccgaacatcagcaacaagaaactatcaatcttgaaccagcattgaataacaacagcatcactgttgttccacagcaaccagtgccacaagcaacaccaacatcaactccaacaccacaacaagcacaaacaacaacagttcctgaggccccacaagtgcagccattggtcccacaactacaacaacaacaacaaatagtggtgagtaatgtggaaatcaacaaagctgataataacggtgagaatttgatgatggaagcaagctcttcaaggtggccaaaagtggaggtacaagcactgataaacctgaggacaagcttggaaacaaagtaccaagaaagtggaccaaaagggccactgtgggaggagatctcagcgttgatgaggaaaatggggtacaaccggaacgccaaaaggtgcaaagagaagtgggagaacatcaacaagtacttcaagaaggtcaaggaaagcaacaagaagaggcctgaagattcaaagacatgtccctattttcaccagttggaggctctatacagggagaagaacaagggagaggggcagatgaagccggagagcatgatggcgccgctcatggtgcagccggagcaacaatggcctcctcaaacaacgcttgtggtaccgccagaagtaaccatgggagacacccagaatgacccccatggaccggcagtaccatgaggagaatgaggatgacgaggacgacaaggaaattggagatgaagacgaggatgaggacgacgaaggaggtgataattatgagatagttgcgagcaaaccagccacagctgatgcttccggagagtgagaggaaaaaatattgaccaaaaagggcatcaattaaagaatgatggatcaatttgaattcacatattgtcggaaaaatggtggtgttgggatgaaatttggtattgatggtggatggtgatgtgattgtattgaagattttgaaaatgcacgtacttcagaatgacacatgggtataggggtagccagtagggtgggggaatctgggttggaagtacttggtacaatagcagcatatagtcagtaagattatatgttttttttgttttgaaagaagaaataattaattattttttgagctc

SEQ ID NO: 29137 - DNA, 1336 bp, Glycine max
  Clone ID: TF_GmC25141_1
cactttttaaaccctaatcccaaactcacttggtctgattgaaacgactttgcggtggctaagaggtcaatgttcggtggcggaggggaggacgcgctggcggcgcggctgggcatgatgccgccgtcgctgctgaatccagcgtcggtgatgtccggcgagatgtctccggcggttccggcggcgagggaggagagggggccggcgcagccgcagtggagccagcaggagacgcgggagttcatagcgatacgcgcggagctggagagagacttcactgcgtcgaagcggaacaagacgctctgggaagtggtgagtgcgaagatgagggagagagggttcaggagaagccccgaacagtgtaaatgcaagtggaagaatctcgttaatcgctacaagggaaaagagacatctgacccagagcatggcaagcaatgtccattttttgaagaattgcatgcggtctttacccaaagggcacataatatgcaacgattacttcttgaatctgaaactcgttcagctcataccaagaaaggggtgaaaagatcaagtggagatcggtcatcagaggaactctcagaagatgacaatgaggttgaatatgatagtgaagaggaaaaaccttccagaagtaatacccgcaaaacgaaagttgacaaagttggagtggagaagtcttcaagggcaagcaatccatcaaattctgccagtaatagtactagtattcaggaaatgctcaaggaatttttccagcaccagttaagtatggagatgcagtggagggagatgattgaaaggcgtgctcatgaaagacagttgtttgaacaggaatttatcaagtcactgaagaagcttgagagggagaggttaatgattgaacaggcatggagggagagggaagaacagaggagaatgagagaagagagtagggcagagagaagggatgctttgttgacgacccttttgaacaaactcattaatgaatctaactaacggaggcaatggcttggattacttgtagctgattactttgttgtttccatttattatatgattctaagtttagcacagaacgaactaatcttcaccgtagcttttgattacagagaatatgggaaaggagaatttggttgatgaaaggagtacttataggggtatatgaacaaaatcttttgaaaattgatacagaaagagtttttactatttagggatacttctgaatgataatatgttctgggacatgtaactaaagacgggtatggtatttaagctgtctgtatgatttttcttatatatgtacatatatattatattattatattgttgggatgcc

SEQ ID NO: 29138 - DNA, 2143 bp, Glycine max
  unsure (1)..(2143): unsure at all n locations
  Clone ID: TF_GmC1404_3
gcaccaccggttgttggtggtggtgctgctgcatcaggaggagcacatgaaggcggtgccaacggcggcggcggatcaaattcaggggatgatagagttgaggaaggtgacaagagctttggtgggaacaggtggccaagacaagagactttggctttgttgaagatacggtcggatatggacgtggcttttagagacgcaagtgtaaagggtcccttgtgggaagaggtttctaggaaactggcagagcttggctaccacagaaatgccaagaagtgcaaagagaagtttgagaacgtttacaagtaccacaagagaaccaaagaaggtcgaagtgggaaatcagaaggcaaaacttatcgcttctttgatcaattacaagcccttgaaaacaacccttcaatccatgctatgcaatccccaacaccaacaccttcaaagccaccacaaacaacagcactacttgcaacaccagtgtcaatagtggtaacaacaactactacaccatcaacattagtgtctaataatgccactgttccatccacaaatacaccccctttgcctcaagccattctcaacataacaccaccatcaacactaaacatcacaaccccttcttttccatcatcaaaccctacaacatacttcccaacacaaacaccaaaccctacaaccaacaacaaccctccaaacaccatcaccccagcttccttccccaacttctccgcagatctcttgtcgaattcgagtttttcatcgacttcgtcggaggaaacaacgacgatggggggagggggaatgaggcgcaagaggaagaggaagtggaaggacttctttgagaggctgatgaaggaggtgatagagaagcaggaggggctgcaaaggaggttcttggaggccattgagaaaagagaacaagagcgtgtggtgagagaggaagcgtggagaatgcaagagatgcaaaggatcaacagggaaagggagattctagcacaggagaggtccattgctgcagcaaaagatgctgctgttatgacatttttgcaaaagatagccgaacatcagcaacaagaaatcaatcttgagccagcattgaataacaacaacaacagcatcactgtcgttccacagcaaccagtgccacaaacaactacaacaccaacaccaacaccacaacaagcacaaacaacaatagttcctgaggccccacaaccacaacaacaaatagtggtgagtaatgttgaaaacaataaagctgacaataacggtgagaatttgacgatgggagcgagctcttcaaggtggccaaaaatggaggtacaggcactgataaacctaagaacaagcctggaaacaaagtaccaggaaaatggaccaaaagggccactgtgggaggagatctcagcgttgatgaggaaaatggggtacaaccggaatgccaaaaggtgcaaaaagaagtgttagaacatcaacaagtacttcaagaaggtcaaggaaagcagcaagaagaggccagaagattccaagacttgtccctattttcaccagttggaggctctatacagggagaagaacaagagagaggggcagatgaagccggatagcatgatggcgccgctcatggtgcagcctgagcaacaatggcctcctcaaacgcacgtggtgccgccagaagtgaccatgggagacgcccagaatgaccccatggaccggcggcacgaggaagttgaggaggacgaagccgacaaggaaattggagatgaagacgaggacgaggacgacgaaggaagtgataattatgagatagtagctagcaaaccagcttctggagagtgagagaaacaaatatcaacgaaaaagtgcattaattagagaatggtgggttaatttgggttcaggattgtcggaaaatggtggtgtgggagtgaaatgtgataggggtggtggtggtggatggtgatggggttgtattgaagattttggaaatgcacttacttcagaattaaaaaaaaaaaaaaagaaaaaaaaaaaaaaaaaaaaaaaaaaattggaagtacttggtacaatagcagcatatagtcagtaagattatatgtttttttgttttgaaaaaaagaaaaataattaattatttttnttagct

SEQ ID NO: 29139 - DNA, 1169 bp, Glycine max
  Clone ID: TF_GmC325_1
ctctctctctctcctccataaccaaaatatcaaacacccttcaaccccttctcttctctgttggatttcaatctctccctctcactctgatttttcctttttcaattttccatggagggtcatcatctccatcaccatcaccggcaacaacaacaacaacaacatcatcatcaacaacaacatcaacaacaacagcatcatcaccaccctcatcacaacatcacaactagtaacgtggatgccacggataggttcccccaatggagcatccaggagacaaaagagttcctcatgatccgtgccgagctggatcagactttcatggatacaaagaggaacaaacagctttgggaagtcatctccacccggatgaaggaaaagggtttccataaaagtgcagaacagtgcaagtgcaagtggaaaaacctcgttacccgctataagatttaaagggatgtgaaacgatggagccagaagcgacgaggcagcaattcccgttttacaacgagcttcaagcgattttcgcggcgagaatgcagagaatgttgtgggcggaagcagaaggagggtccaacaagaagaaggtgcacctttcctccgaggacgaggaagagggcaatgaagagacaagcgagggggatcacaagggtaacatcaccagcaagaaaaagaagaagggcaagatggtaattggtggaggagggagtggtaacaacaacttggagagtttgaaggagatcatggatgagttcatgaggcagcagatgcaaatggaggcacagtggatggaagcctttgaggcaagagagaatgagaggaggctgaaggagatggagtggaggcaaaccatggaggctttggagaatgagaggttaatgatggaccaaagatggagggagagggaagaacaaagaaggattagagaagaagttagggctgataagagagatgctctaatcactgctcttctaaacaagctcagaagagaagagatgtagttgctagtttgtttggctagatagattcatagctacctagctagcttgcttttatgtgtctttcttcttctcatgaagcaaagcttgatttaagaggtttgttctaacttcaaagaactcccccaatttatatatcttggtcaatattaatatatatatacatacatacat

SEQ ID NO: 29140 - DNA, 1010 bp, Glycine max
  Clone ID: TF_GmC325_2
actaacggctgccagaagacgacagaaggggggggtttgtttctgtctctctccaccataaccaaaacatcaaaaacacccttcaataacttctttctcttctctattggatttcaatctctccctctcactctgattttttttttctttttcaattttcatggagggtcatcatctccatcaccggcaacaacaattacaacaacatcaccaccctcatcacaacatcacaactagtaacgtggatgccacggataggttcccccaatggagcatccaagagaccaaagagttcctcgtgatccgtgccgagctggatcagactttcatggagacaaagaggaacaaacagctttgggaagtcatctccaaccggatgaaggaaaagggtttccatagaagtgcagaacagtgcaagtgcaagtggaaaaacctcgttacccgctacaagggatgtgaaacgatggagccggaagcgatgaggcagcaattcccgttctacaacgagcttcaagcgattttcgcggcgagaatgcagagaatgttgtgggcggaagcagaaggagggtccaataataagaagaaggggatgcacctttcttccgacgacgaggaagaaggcaatgaagagatgatgagcgagggggatcacaagggtaacatcatcatcagcaagaagaacaagaagaagggaaagatggtaattggcgtcggagggagtggtaacaacaacaataatagtagtagtagtagtaacaacttggagagggaagaacaaagaaggattagggaagaagttagggctgataagagagatgctctaatcactgctcttcttaacaagctcagaagagaagagatgtagtagtttcttttggctggatagatagctagcttttatgtgtctttcttcttctcatgaagcaaagcttaatttaagaggtttgttctaacttctaagaactctcaatttatataccttggtcaatattaatatatatacatacttt

SEQ ID NO: 29141 - DNA, 487 bp, Glycine max
  Clone ID: TF_LIB3242-060-Q1-J1-B12
aaatttttgtattttctctattatcttatgcttccattgccacctatgccatgaatttgatgagataagataaagccataaagctttttcttttgttttttttactttgtcttcttttggggttattgttatcaggaagctggcagagcttggctacaacagaaatgccaagaaatgcaaagagaagtttgagaacgtttacaagtaccacaagagaaccaaagaaggacgaagtgggaaatcagaaggcaaaacttatcgcttctttgatcaattacaagcccttgaaaacaaccctgcaattcatggaaagcaatctccaacacctccaaagccgccaccacaaacaacagcactatcagcaacaccagtgtcaatagtggtaacaacaactacaactacaccatcatcaataataatgccacttccattgccaccagtgtctaataacaacaacaacaccactgttccatccacaacatcactt

SEQ ID NO: 29142 - DNA, 1701 bp, Glycine max
  Clone ID: TF_GmC247_4
gaagtttcaaggaaattggcagagcttggatatcaaaggagtgcaaagaagtgcaaggaaaaatttgagaacgtgtacaagtacaacaagagaaccaaagagaacaaaagtggcaaatcacatggaaaagcctataaattctttgatcaattacaagccctcgagaaccaattcacagtctcttacccgccaaaaccacaacctacttctactttgactacaacaaacacattgacaagtgatcatggtaacaaagttatctcttatgtcacaccttttccttccacaaaccctactctcattccaccttctccacaaaccaacaccaacaccactaccaccacaacaacaacatccactaccgaccctagagactcatcaccaccacaaaccaacaacaacaacaatagtgtcccacattctttgccaaacatgaacgctcctttcttaaccaccaccacctccacctcttcctccacagcatcagatgaagacttggaagagaggtataggaggaagagaaagtggaaggactacttcaggaggctcactaggaaggtcttgttgaagcaagaggagatgcaaaagaagttcttggaagccatggaccaaagggagagggaaagggtggcacaacaagacaattggaggatgcaagaaatggcaaggatcaatagggaacatgagattcttgttcaagagagatcaacagcatcagccaaagatgctgcagtcattgcattattgcaaaagatgtacggccagcaaaaccccacacaacatgttgaagtagagccaccacagcaacagaagcaaacaatgccacaatcacagcctccaatattaatgccaaacaataattttgaggtcaagaaaatgaataatggtcacagtgctacaagtactactactactactacttctccggtgagttcttcttcttcttctcggtggccaaaggccgaagttcatgatttgataaggttaaggacaagtcttgaaatcaagtatcaagagaatggaccaaaggctccattgtgggaagatatatcaattgcaatgcaaaggcttgggtacaaccggagtgcaaagagatgcaaggaaaaatgggagaacatcaacaagtacttcaagaaagttagggagagtagcaaagaaaggcgtgaagatagcaagacatgtccctatttccacgagcttgaagctctatacaaagaaaagggaaaatctcagaacccctttggcatgtttcagaatatgacgccaaatgagacgatgatgatggagccattgatggtgcaaccggagcaacaatggaggcctccacctcaatcattggaagagggtatagggaaggataatgcaagtgaagaatataatcaagaaaaagaagaagaagtagaagaaaatggtggtgatgatgatgataatattgaagaagatggagatagtgtggaagatgcaggaccaaacccgtgtgagattgcgacaaataattaaacgtgcttcagtggacaccgttgaagtagacaagataaggaattttctgaatggagaaaaatttacgtgtgtgcttaatttacttttacttatttcggaaaaaaatagtcctttattttttttatcattttattaaacttcaaaatgtgattatttcttaaggaaaacaattgttgggtatagtatagtcattcaattttt

SEQ ID NO: 29143 - DNA, 465 bp, Glycine max
  unsure (1)..(465): unsure at all n locations
  Clone ID: TF_LIB3242-366-Q1-J1-B12
cggctcgagcggctcgagcggctcgagcggctcgagaaaaaatttgaaagaattcaccaccctttttgctctgtttatatttttaatttttctcgtgctctcagctgctgtaagtaattgttgcggtgctgttttggcaaagagggagagagagagagacccaaaagagactatgctcggggactcagctctgttgggaggaggaggaggagaaggtggtgcctccgccgatgtagtggcggcgaccgccacgcatgatgcgacaacgacgacgacgaccggaggaggcggtggcggatcaaataattcgggggacgatgagaggggtagaatcgaagaaggtgaacgtagcttcggcggtaaccggtggccgcgacaagagactntggctntgttaaggatacgctccgacatggacgtggcgtttcgagatgcaagtgttaaaagtcccttgtgggaagaagt

SEQ ID NO: 29144 - DNA, 1172 bp, Glycine max
  Clone ID: TF_GmC1796_2
ggctcgagaaacttgtcagtaacaataatggtttggtagaagtagtagtcgcccttgaaacaggacaaacgatacgaactttccccaactcaaaacaacacacagactccagttactgaaattgccctgtttcatttttctcccctaaatttcaccgacgctgtcttttttctcttttgaccttaccctttgagagtttcgtggctgtaatttcgttgtaaccgatgctggaaatctcaactttaccggaaaccgcgacggagaacgcggacggcggttccgcggcggtatccgacgggtcgaaagcggagcacagcgaagacggtgaccggaattccgccgcgaaccggtggccgagagaggagacaatggctttgctcaagataaggtctgaaatggacgttgctttcaaagacgcaaaccccaaagcccctctctgggaacaagtctcaaggtcagtttccttcttttgttttcccctcttttcaactgaaaccccttctatcattccttaattagtaatactaatgttacacttaattcataaatgtattgtatatatatagtctttcattttttggtgtaataatatagtagtgattgaactgaatgaattaattataaattcaggaagttagcagagctaggatataatagaagtgctaagaagtgcaaggagaaattcgagaacgtttacaagtaccataggagaaccaaagaaggtcgttttggaaaatcaaacggtgcaaaaacttatcgatttttcgagcagttggaagccttagacggaaaccactcacttcctcctccgacaacaacaaccgacaacaacaacaacgttgatgatgatgatgttatcctcaacgcggttccgtgttccgttatagctgcggcggcgcacgagcattcgagttcgacgacgtcgtcttcggggaagatgaagagaaagctgacgcggtttctggaggggctgatgagggaagtgatagagaagcaagagacgctgcagagaaagttcatggaagtgttggataagtgtgaaaaagatcgaatggcgagggaggaagcgtggaataaggaggagctcgagaggatcaagaaagaacgcgagcttctcgctcatgaaagatcaattgctgcctgcaaagatgaagctgttcttgtgttcttaa

SEQ ID NO: 29145 - DNA, 1085 bp, Glycine max
  Clone ID: TF_GmC4164_1
attcccggggtcgacccacgcgtccgcaacactgcaagtgggcctgagggttatttatctgaggaagacaacactgcaagtggagccgagggtgatttatctgagtcagaggattcagatgaattttggaaaccattcattacatcattaccagttgagaagtcaatcaatgctgacaatggttatgtttcaccaaaggagcaaaaatccaatttgaagaaagatgagtctgaagacattgatgaagccaagtcagaagaaacatctaattctgaagccaagtcttcaaaatcagttaagagaaataaatggaaaactgaggaagttaagaagctaattggtatgcgtgaggaactaagtgaaagatttcaagttgtgaagggaaggatggccctctgggaagagatttctcaaaaattgttggctgatgggatctgcagaagtcctggacagtgcaaatctctgtggacatctttggtagtcaaatatgaggggatcaagaatgaggataggaagaaaagttggccatacatagaggacatggaaaggataatgtctgataaagaagcccctgcaaaatgattggaaatatggtggacactggacaggataagaaatattttggagaaccatctacattaaaattgttgataagtttgagtgtggtgaccgggaagataatccatgacttgcatgacattgaagatccctagtgttttttagggctgagggatagacagcataaaggggttggctttcatactggcacgggaatgtctgagtttatgggacgatttattctccacctccaatgcctgtccccgtttttttattacatttgtgtcataatttataatatttgttggtggcacatattgggtgccctaagcaaccatggaaatgtctacctcttttccagacattgaacactgaaaagaaagttttcatacttttaaaaacgagtgccaacttaaattcccagtgtgtttgaatgtgcatttggagctccaaattttttagaatgagtcaaatatgatttttgtattgaccaatatgtttggatgtgggcttgaaacacgattctg

SEQ ID NO: 29146 - DNA, 1177 bp, Glycine max
  Clone ID: TF_GmC1059_2
gtaactggaattcagaaccacagtgaaaaccagaatgaagatgggagtgaaatactaaatagcactactgccagaggtgctgaaagctggacagaatctgagattgcaaggcttcaacagttgagagctgagatggagacaaggtatatgcaaagtgggtgttcagaagaggttatgtgggaggaaatagctaccaaaatggcttgttttggttacgaaaggagtgctgtggtcttcaaagagaaatgggagagtataagtaactatgcaaggagtgtcaaggatggaagcaagaagcgcaaggaagactcaagaagttgtttttacttcgataacagtgaccaatcttctctgtataaccaaggaggtgcctattgtgatatcaacgatcaaaggcacaagactgggaggctgcaaacaaatgatggctcttcaccttccaattcaaatgttggaaatacagttgcgcttgataactgctttcccttcttgatgactgagagtggaaatttgtgggagaactatagcttaaaggttaataaagcaagccaaaaccagtgatgagagtgaaattatatggttgacacttgtaagaggcaagaaaatttcgcagccttttatctcagatgatctcacattatgtaagcaagagctaactgatgagggtcgtttatgtatagagactgatgatgataaggtgctcaatcttattatatttatggaatcaaggtgaaaaataatgtgttcaagtcacgtacgtaagtttaatgagggagactacacattggcaaatatcactgaattgttggggtgtgagtatgacactaattcaggtgaatttctccattagctgatttcttttatgcgtgcaaatggaatttgcagttatattacttcacatgtcgcatcttccgataatgttcatatcattcattagttggtcaccgtctttctcctagtttccaccttccacacctatcttgccttttttttaattaatttttttggatatttatactgtgctggccttttgtgtttgtgtactgaaaggtagcaatttactttggtatttatttattggtcaatagttttatgaaccgggagaaagtgatgtattgatggatattgttgaagcatcggacattgttacaagcataaaaaaggccagatttactta

SEQ ID NO: 29147 - DNA, 728 bp, Glycine max
  unsure (1)..(728): unsure at all n locations
  Clone ID: TF_GmC429768_2
tctacctcgcgttcgaagtgagagtgagagagaaggatcaatctaaataatgagaagtgaatatctctcatagtgtcgtacagcatacaccacacgcatacatttgtacacagacatgggaccatttctctgcgtttaaattttgatctttttggtggacgacaggatccgagtctgccgcttccctctccatatcatcatcctcctccttcaccttttcttttcatctctctctctctcattctcttcttcttcttcgttaaccttctcctatggaaatggaggaccatcatcgtcaccatcatcagtatggcatcactgatctgaggcaactcgttaacggccctcggccgactcatttccccaccatgccgccaccgcccaaggcggagctgttccccggcgactccaacctgcaggctgcgacacaacaacactacgagatgatgatgtttggtcgtcaagtagccgacataatgcctcctcgttgtcttcatgacttcgcctccaccgattccgccaccaacatcgccgttgccactcccaccaccacccctagcgccttcactcctncgcttagttgcttagaggccgagaccgcaggatgcattggtggagacgcctccactggaagatggcccagacaagagactctcactctccttgagatcagatctcgcctcgactctaaattcaaagaggctaattcaaaggtcccttatgggatg

SEQ ID NO: 29148 - DNA, 631 bp, Glycine max
  unsure (1)..(631): unsure at all n locations
  Clone ID: TF_LIB4366-014-R1-N1-D5
ggaatagaaatattaatagttctcattcctcaaactagctatagctgtcggggctcgccaaattctaagttctttcaaatatacacaatcaatttatatgctatattaaagatagccagcatcaaccaaaaaacaaaaatacaaaaaagagggggtacacttcttattatgggaatcaatgaattaaaactgatcaaaatccaaagaaggtacctgctgttgctgaacactgaaaccactaccagaccccacctgcgaagaagactcatgagcttgggttgtttgatctggttttacttgctcgggattctgatcaggtggagtattattcaagtggctttcagattgtagaacgagttttccttgattgtagagactgctcaactgatgaaagtagggacaagttcttgagtcaagggacctcttcttagtaatatccttggttttcctgaagtacttgtttatgttctcccacttctctttgcacctctttgcactcctcttgtatctcaactccgacatcccttgtgagattctctcccacagagggaccttgttgttcccttccttctcctcattgnntgtgttgttgttcacactggtgcacctcaggtttatgagtgccaacact

SEQ ID NO: 29149 - DNA, 1942 bp, Glycine max
  Clone ID: TF_GmC1059_1
ctcgagccgaatcggctcgaggagtgggaaaaagtgcagggagaagtttgagaacctgtacaaatattacaagaagacaaaggaaggaaaagctggaagacaagatgggaagcattacaggttctttcgtcaacttgaagccttatatggtgaaaacagtaaccaagcctcggtgccagaaaccaattttggcagtggtagccttcgtttccacacaagcagtcgagccaattagcctcgagaaacaaatcaagaaatgtttcagtctcagaagcattgtgacagcctaagcctcaccaacttcactgatttggacacttcatcatcggatgacaatgatcaaaatagcactggcagggaactcaacaaggacaatgactccatggagaagaggagaaagagggtgagtggaagaagctggaaggtgaagataaaggacttcattgactcacagatgaggaagctggtggagaagcaagaggagtggttggataaactcacaaagacactggaacagaaggaaaaagagagagtgttaagagaagaagagtggaggagacaagaatctgtaaggttggagagggaacacaaattttgggctaaagagagagcatggattgaagcaagggatgctgctttaatggaggctttgcacaaattaacacgaaatgagataatgaagagtactcattctcacgagggtctaatggtaactggaattcagaaccacagtgaaaaccagaatgaagatgggagtgaaatactaaatagcactactgccagaggtgctgaaagctggacagaatctgagattgcaaggcttcaacagttgagagctgagatggagacaaggtatatgcaaagtgggtgttcagaagaggttatgtgggaggaaatagctaccaaaatggcttgttttggttacgaaaggagtgctgtggtcttcaaagagaaatgggagagtataagtaactatgcaaggagtgtcaaggatggaagcaagaagcgcaaggaagactcaagaagttgtttttacttcgataacagtgaccaatcttctctgtataaccaaggaggtgcctattgtgatatcaacgatcaaaggcacaagactgggaggctgcaaacaaatgatggctcttcaccttccaattcaaatgttggaaatgcagttgcgggtgataactgctttcccttcttgatgactgagagtggaaatttgtgggagaactatagcttaaaggttaataaagcatgccaaaaccagtgatgagagtgaaaaaaagtttgacacttgtaagaggcaagaaaatttcacagccttttatcagatgatctcacattatgtaagcaagagctaactgatgagggtcgtttatgtatagagactgatgatgataaggtgatcaatcttattatatttatgggaatcaaggtgaaaaataatgtgttcaagtcacgtacgtaagtttaatgagggagactagacattggcaaaatttcacaggtgagtatgacactaattcaggtgagtttctcttgtagcagatttcttttatgcgtgcaaaatggaatttgcaattttatattacttcacatgttgcatcttcaatgatgtttatatatcattagttgttaaccctcaaaaaaaaaaaaaaaaaaaaaaaaaaaaaaaaaaaaaaaaaaaaaaaaaaaaaaaaaaaaaaaaaaaaaatttctcctagtttccaccttccacacctatctggccttttttttaattaattttttgggatatttatctgtgctggccttttgtgtttgtgtactgaaaggtagcaatttctttggtatttatttattggtcaatagttttatgaaccgggagaaagtgatgtattgatggatattgttgaagcatcggacattgttacaagcataaaaaaggccagattttctttaa

SEQ ID NO: 29150 - DNA, 1925 bp, Glycine max
  Clone ID: TF_GmC5795_1
tcgacgcgctgctccatccgtagcaaccagcccgactaccccgcccccctccggcgcctcctgccacatccccaagccccctgtgctcatcgtgccaaagatcgtcccccccgctcagcaatggaggcctcccactcaagatgaacaaggtgcagccaaggagcacaagaatagtgagtggaaggaaagagaggagggggtagagggagaagatgatgacgagaatgaagagggagacaaagagaaatgggaggacatcgacaataacgtcaaagaggtagtggcgcaacaagaggcttggagggtccaagatatggcaaggatcaatagaaaacacgaacttcttgtccaagaaagatcaactgccgcagccaaaaatgttgcagttattgcttttttgcaacagttatctggtcagcaccaaaattccacggtaacacaagcccagctcaatttccctcaacaaccacctccacaaaaagttacaatagtacaaccaccaccacaacaagctccacaaccacaagctccattggtgttgtcaaatagtgacaacatggagattcagaaaatgaataatggtcacagtgttgttactgctactgttactgctactgctactcctactcctactactactttcgttgctgctgctactgctattactactactccttcttcattgagttctttatcttcttctaggtggccaaagacagaagttcatgctttgataagactgaggacaagtcttgaaaccaagtaccaagaaaatggaccaaaggctccattgtgggaggatatatcagcaggaatgctgaggctcgggtacaacaggagtgccaagagatgcaaagagaaatgggagaacatcatcaagtacttcaagaaggtcaaggagagcaacaagcaaaggcgcgaggatagtaagacatgtccctattttaatgaacttgaagctttatacaaagaggggagcaagactcagaacccctttggcgcttcgttccacaacatgaagccacatgagatgatggaagatcgttaattaacactaagaaacaacagttcacatgggccagcaaagcagaagcatagctatagtgggtgtacatgtttttgcgctcataaatttatgtgtaaagtgtaaattgaagatgagagagagagagagagaaaaaaagaatacgaggtcccatagcagtttaatgaaatgaaataaaataaaaaagtcacatgcatgatgacacttaaactttcttcagtggacaccgttgaatgagacaagataaggaagtttctgattggatggagagttttaattttaattttaattttaattttaattttaatatatatttttttcttcttctgggggatggatttttaattattatgtaagttgattttaatttttccaaaattggggttaggagatgtcactgaaagggcatgatgatggcacaaacaccggcactataaaattcaattctttaataatgaatgacccatctaaaagcatggtggtgcagaagcagaagcagaagcagaagcacaaggtacctatctgacacactttctgatcatgggccagcttaaaagcagatcattggagctgtgggtcacattccggccgccatgaactgggatcagagatcgttaattaacactaagaaacaacagttcacatgggccagcaaagcagaagcatagctatagtgggtgtacatgtttttgcgctcataaatttatgtgtaaagtgtaaattgaagatgagagagagagagagaaaaaaaaagaatacgaggtcccatagcagtttaatgaaatgaaataaaataaaaaagtcacatgcatgatgcaactcttgtaattttcctttactttcattatatatcacggaaccactgtgtggtactgctttc

SEQ ID NO: 29151 - DNA, 3085 bp, Glycine max
  Clone ID: TF_GmC1404_1
ctatatttcaaaaacccataaaagattttaccaccctttttattatcgccatcctttttttttcccccccacaaactattatctttttttcttctcaagcaatgccatcaaggttctgtgcagtgtttgtagagagagagagagaaaaagatgtagaaagctagaaagacaagagaacaagagaaaaaatattataggaagagagggagaaactaatagagagtcctatgctgggggactcagcagtgttgggaacaggaggaggaggctctggtgatgcagtggcagcagcaccacctgctgcatcaggaggagcacatgatggtggtgttgacggcggtgacggtggcggtggcggatcaaattcaggggatgatagagttgaggaaggtgagaggagctttggtgggaacaggtggccgaagcaagagactttggctttgttgaagatacggtcggatatggacgtggcttttagagatgcaagtgtaaagggtcccttgtgggaagaggtttctaggaagctggcagagcttggctacaacagaaatgccaagaaatgcaaagagaagtttgagaacgtttacaagtaccacaagagaaccaaagaaggacgaagtgggaaatcagaaggcaaaacttatcgcttctttgatcaattacaagcccttgaaaacaaccctgcaattcatggaaagcaatctccaacacctccaaagccgccaccacaaacaacagcactatcagcaacaccagtgtcaatagtggtaacaacaactacaactacaccatcatcaataataatgccacttccattgccaccagtgtctaataacaacaacaacaccactgttccatccacaacatcacttcctatgcctcaaagcattctcaacataacaccaccatcaacactgaacatcacaatcccttcttttccaccatcaaaccctacaacatacttcccaacacaaacaccaaaccctactagcaacaacaacaacaaccctccaagcaccatcaccccaccttccttccccaatttccccgccgatctcttgtcgaattcgagttcttcatcgacttcttcggaggaaacaccgacgacggaggccagagggcgcaagaggaagaggaagtggaaggacttctttgagaggctcatgaaggaggtgatagagaagcaggaggagctgcaaaggaggttcttggaggccatagagaagagagaacaagagcgtgtggtgagagaggaagcgtggagaatgcaagagatgcaaaggatcaacagggaaagggagattctagcacaagagaggtccattgccgcagcaaaagatgctgctgttatgacatttttgcaaaagatagccgaacatcagcaacaagaaactatcaatcttgaaccagcattgaataacaacagcatcactgttgttccacagcaaccagtgccacaagcaacaccaacatcaactccaacaccacaacaagcacaaacaacaacagttcctgaggccccacaagtgcagccattggtcccacaactacaacaacaacaacaaatagtggtgagtaatgtggaaatcaacaaagctgataataacggtgagaatttgatgatggaagcaagctcttcaaggtggccaaaagtggaggtacaggcactgataaacctgagaacaagcctggaaacaaagtaccaagaaagtggaccaaaagggccactgtgggaggagatctcagcgttgatgaggaaaatggggtacaaccggaacgccaaaaggtgcaaagagaagtgggagaacatcaacaagtacttcaagaaggtcaaggaaagcaacaagaagaggcctgaagattcaaagacatgtccctattttcaccagttggaggctctatacagggagaagaacaagggagaggggcagatgaagccggagagcatgatggcgccgctcatggtgcagccggagcaacaatggcctcctcaaacaacgcttgtggtaccgccagaagtaaccatgggagacacccagaatgaccccatggaccggcagtaccatgaggagaatgaggatgacgaggacgacaaggaaattggagatgaagacgaggatgaggacgacgaaggaggtgataattatgagatagttgcgagcaaaccagccacagctgatgcttccggagagtgagaggaaaaaatattgaccaaaaagggcatcaattaaagaatgatggatcaatttgaattcacatattgtcggaaaaatggtggtgttgggatgaaatttggtattgatggtggatggtgatgtgattgtattgaagattttgaaaatgcacgtacttcagaatgacacatgggtataggggtagccagtagggtgggggaatctgggttggaagtacttggtacaatagcagcatatagtcagtaagattatatgttttttttgttttgaaagaagaaataattaattattttttgagctcaataaataagttgatgagggagaggggaagggttataagatagagaaaaaacttcagacttgcatgagaggtgaggttcaacataaaatgaataagcaagaaaccttgattaatgttatggtactagctatataggttttttgtactaaattttcatgttcatgttgatgtaaatgcgagaaacgattaattgtggggggggtttgtctttattttgtttctttaatttccttttcaattttgttactcttcaaatgttgtcaatcatttttgtttcttttcctccttcattgtatattatcttgtcttgatgagttaaaaaaaaaaaaaaggggcggcaaggattgccggacaatggtggtatgggagtacaatgtgataagggtggtgctggtggatggtcatcgggttgtattcaagattttggaaatgcccttacttcagaattacacatgggtataagggtagccagtagggtgggggaatctaggttggaagtccttggtacaataccagcatatagtcagtccccccacatgtttttcccccccgaaaaaagacctcaattaattattttttttagttaaat

SEQ ID NO: 29152 - DNA, 2036 bp, Glycine max
  Clone ID: TF_GmC696_1
cggacgcgtgggcacatgaaagaagaggtaaagaagagagaagtggaaacacaaaacacaaacacaaacatgttcgatggagtaccagaccagttccaccaattcataactccaaggacctctctacctcttcacttacctttccctctccatacttcaggaggaacccccaatacgactaccttcccctccaattttgatccctataaccatccccatcaattgccactccaacccaacaatctcttgcacccattacaccacaaagatgaagacaaggaagaaaacaccaccgtcccgatgaacttggaaatccaaagggatcaaaggcaacaacttcccgagctgattgatccctggaataacgatgaagtgcttgcgctcttgaggatcagatctagcatggaaagttggttcccagaactcacttgggaacatgtctcaaggaagctagcagagcttggatataagaggagtgcagagaagtgcaaggagaagtttgaagaagagagtagatatttcaacaacattaattacggcaagaataataataataataataatagtagcaattatcggtttcttagtgagcttgaacagctttatcaccaagggggtagtggtgatcatcatcttgaaaatacgactcagccaccactgcagaaacaagacaagatgggccaccatgcattggagttggaagtagaaggggattctagaaacgttgttgacgcattggtgacaaaacaaaacgagcaaagcgacgaggcactagcagtggaaaagatcacaaaggaccgcaagaggaagaggcctgataggtttgagatgttcaagtgtttttgtgagagcattgtgcacaagataatggctcagcaagaagagatgcacaacaagctccttgaggacatgatgaagagagatgacgagaagttcactagagaggaagcttggaagaagcaagagattgagaagatgaacaaggagcttgagatgatggcacgtgagcaagctattgcaggtgatagacaagccaacattatccaaatccttaacaaattctcagccacttcgtcccctgcaagccacaccctcaagaaggtaaacaatgattcaaacctaaacatccacattacacaaaaccctaatccttcacaaacagaaaaccctaccttaagtgttgcacaagacacattacaagtgattccttctacttcttctacttcaactccagctcttccccagaaccctagttcttattctctaaatatccagaataataataataatattccagtagagacaaattcggttttgaataaagggaatgagaaagacgatgttgggagaaggtggccaaaggatgaagtgttgacactgataaacctgaggtgcaccagtgtgaacaacaacaacaatgaggagaaggaagggaacaacaaggtccctctttgggagagaatctcacaagggatgttggagttgggatacaagaggagtgcaaagaggtgcaaagagaagtgggagaacataaacaagtacttcaggaaaaccaaggatgttaacaagaagaggtcccttgactcgaggacttgtccctactttcaccaattgagcagtctctataatcaaggaaaacccgttctgcaatctgaaagccacttgaatagtccacctaatcagaatcccgagcaagtgacaccagatcaaacaacacaagctcacgagtcttcttctcaggtggggtctggtggtggtttcagtgtgcagcagcagcaggttgatcatggaggtgagaaaaccttgatgcaagtaccttctttggatttcgatcagttttaattcattgatttgtccatgttctgtcacataataagaagtgtagcacttttttttgaatttttgttttctggttaatgctggctttctttaatatagcatataaattgattgtgtatatcttgaaaacttagaatttggcgagcaccgacagctatagctagtttgaggaatgagacccattaatatttctattc

SEQ ID NO: 29153 - DNA, 1657 bp, Glycine max
  Clone ID: TF_GmC1490_1
ggctcgacttcacgctgacacacactacacaaacccctaaccttccttccttccattcactactactccttcactttacttcaaaatttcacccttccaaatccccaacttttacaattttactattagaatttaccatctctctttctcttcctcaatccaatccaatccaatcccctctcaatcgaagcaagaaaaccatgtatttatcggagaagcctcgtcccatcgatttctacaaggaggaaggcgcgcgcgacatgatgatcgaggtcgtctccaacggcgacctccctcctccgccgccgccgccgccgatgattctcggcgagagcagcggcgaggaccccgaggtcgagatcaaggccccgaagaagcgcgccgagacctgggtccaggacgagacgcgctctctcattggccttcgccgcgagatggacgcgctcttcaacacctccaagtccaacaagcacctgtgggagcagatatcggcgaagatgagggagaaaggtttcgatcgttctccaaccatgtgcaccgataagtggcgcaacctcttgaaggagttcaagaaggccaagcaccaggaccgagggagtggttccgccaagatgtcgtattacaaggagattgacgagatcctcagagagaggagcaagaatgtgcagtataaaagccctactcctccgcccaaggttgattcctttatgcagtttgctgataaaggtattgacgataccagtatctcttttgggcctgttgaagctactggaagaccaacactgaatcttgagagaagtttggatcatgatggacatcctcttgccattaccacagctgatgctgttgcagcaagtggagtccctccttggaattggagagagactcctggaaacggtggagaaagtcagtcatgttgtggaagggttatatcagttaaatggggtgattatacaaggcgaataggtattgatggcaccccagaagccattaaagaagcaattagggctgcttttaggttgagaactaaacgtacattttggttggaggatgaagatcagattatcagaagtattgaccgtgaaatgcctttaggaaattacactcttcacattgatgaaggaatggccattaaattacctctctatgatgagcctgaccatatacctgtgcatactgaagataagatattttacactgaagacgatttccgtgattttctgacccgccggggttggatatgtctaagagaatttgacagctacagaaatattgacaacatggatgatcttcgacctggtgccatatatcgtggtgtgagttgaaagcaggtacatggtgtggtcaatgttcagctaccataaaatgtctggagaactgtggtggggactgttcagatctttgatgtatgtgcggcactaacctggaattgtatttgttttaagttttgataatgctgtttatagttttatataggaaaaggaactagtccctttgcacaaattccgttccaatcattggccttaacatgtctgtaaatatgcatttgcagtgagaacatattgtctaattttatagtggatcattttcatcactcttaactctatgtagctaagttggacagatgcatattatgaagcacacacctttcttgttc

SEQ ID NO: 29154 - DNA, 2124 bp, Glycine max
  Clone ID: TF_GmC1796_1
ggctcgagatttcaagatgctctctctctcccccttgttttaaacttgtaaataatggtatggtagaagtagtagtagcccttcaaatttcaaactgaaatagcacaaacaataccaactctcctcataccaaaacacacaactccagttattgaaattgaaattacccttttccttttttcccccaaatttcacccgaggctgtttttttttcttttttttttttttctctcttttgaccttaccctttgagagtttcgtggctgtaatttcgttgtaaccgatgctggaaatctcaactttaccggaaaccgcgacggagaacgcggacggcggttccgcggcggtctccgacgggtcgaaagccgagcacagcgaggacgatgaccggaatcccgccgcgaaccggtggccgagagaggagacaatggctttgctcaatataaggtctgaaatggacgttgctttcaaagacgcaaaccccaaagcccctctctgggaacaagtctcaaggaaattatcggagctaggttataataggagtgcgaagaagtgcaaggagaaattcgagaacatttacaagtaccataggagaactaaagaaggtcgttttggaaaatcaaacggtgcaaaaacttaccgatttttcgagcaattggaagctttagacggaaaccactcacttcttcctccgacaacaaccgttggtgatgatgttgtcctgaacgcggttccgtgttcggttagtgcggcggcgcacgagcattcgagttcgacgacgtcgtgttcggggaagaagaagaggaagctgacgcagtttctggaggggttgatgagggaagtgatagagaagcaagagacgctgcagaggaagtttgtggaagtgttggacaagtgtgaaaaagatcgaatggcgagggaggaagcgtggaagaaggaggaactcgaaaggatcaagaaagaacgcgagcttctggctcaggaaagatcaattgctgctgccaaagacgaagctgttcttgcttttcttagaaagtttgcagaagcagaagacacggtgcagttactcgagaaaattcaggttcaaaacgacaaacagaaaaacatgaaacaaaatggcggtaatgataatgctaatggaggtggtggtgtcacagttgtcactgatatggataaacaagaatgtggaaatactaatgtcgtgttagtgttgggaattttgtgcacatgagtagttctcgttggccgaaggatgaagtggaggctttgataaggttaaggactgagtttgatgtgcaggcacaagggaataataataatagtaataatgggtctaaagggcctctttgggaggagatatctttggctatgaagagcattggtgaagtgcaagtaaaatgggagaacataaacaagtacttcaagaggatagaaatgggagaacataacttctgtctctcgcagccacttcatgaggagacgtgtccttattatcaccaccctgaggctttgtacagtaagaagcctaagaaggtggatcatgggaacgagttgaagcctgaggagctgttgatgcatatcatggtgagtcaaagtcaagaacagcaacagcaacaagagatgcagactcagactcagtcaccatctgaagatgctgagagagatcagaatcagggagataatgaagatcaaagtgagtatcagaatcagatggttgataataatagtccttccattgcaattatgagttaaaaagcttggtttcaagagattctttctttagtatgctaaaattgaacatcttctctgatgacaaccaacgtgggttcctttgactttccaactattcatcaacaagagcaggagaagatttcaatatttcattttgttgctgggtttaggtggtagtaaatacaaatcaatctcaagggtgttgtttttgtatgtattacagtacactgtattttccaattttcaattcttcatcgtttttttttcttttctttagcgaacatggtagatgatacaaggaacacctgcacagagaaagagagagagatttacctctcagtaaaaaacaaagtcactgggcgtgttattttaatattaaaaacttttccctag

SEQ ID NO: 29155 - DNA, 411 bp, Glycine max
  Clone ID: TF_LIB3050-002-Q1-E1-G8
gggagaacataaacaagtacttcaagaggataaaggagaagagcaagaggaagcctcaggattccaagacgtgtccttattatcatcaccttgaggctttgtacagtaagaagcctaagaaggtggatcttgggaacgagttgaagcctgaggagctgttgatgcatatcatggtgagtcaaagtcaagaacagcaacagcaacaagagatgcagactcagactcagtcaccatctgaagatgctgagagagatcagaatcagggagataatgaagatcaaagtgagtatcagaatcagatggttgataataatagtccttccattgcaattatgagttaaaaagcttggtttcaagagattctttctttagtatgctaaaattgaacatcttctctgatgacaaccaacg

SEQ ID NO: 29156 - DNA, 1984 bp, Glycine max
  Clone ID: TF_GmC1764_1
ctccaattgatccatctactctggtgaaagcggaagatattgatgcttatgcgccaaaggatttgcttattgtgacaacgggatctcaagcagaacccgtgctgccttgaacctcgcatcttatggaagtagtcatgctttcaaactagccaaggaagatgttgttttgtattcagctaaggttatccctggtaatgagtctcgtgtaatgaaaatgctaaaccgcatatcggagattggatcaacaattgttatgggaaaaaatgaaggtttgcacacatctggccatgcatatcgtggagaattggaagaaatacttagaatagtgaagccacaacattttcttcccatccatggagaacttttgttcctgaaggaacatgaattacttggaaaatcaactgggattcggcacactgctgttattaagaatggagagatgcttggtgtttcacatttgagaaatagaagagtcctttctaatggtttcatttcccttggaaaagagaatttgcagttgatgtatagtgatggcgatagagcatttggtacatcaagtgatctctttattgatgaaagattgaaaattgcattagatggcatcatagtgattagcatggaaatatttcgccctcaaaatttagacagtccagttgagaacaccttaaaaggaaaaataagaattaccaccagatgcctgtggcttgacaaggggaagctgttggatgctctccataaagctgctcatgctgctcttgcaagctgccctgtaagctgtccactggctcatatggaaaaaattgtgtctgagatgttgagaaaaatggtgaggaagtacagtggcaaacggcctgaagttattgccattgccatagaaaatcctgcagctgttcttgctaatgagataaacacaaagttgtctggaaaattaaatgtggatgggatgtcggcattgagaaaagtggtggatggacatgagaaagagaatcagagaaccgaaatgcaaataagagatcgtattgatgtaggtggtctactacctacaaaagacaatgctatctcaagtggagctgaggatggcttgtctgatgcggaggatccaaatgattattttaaaccatttgttgaatcctctccagttgagaagtcaattaaaactaacaatggttatgttccacgaaaggagaagtcatccccattgaaggatgactgttctgaagacactgaagaatgcaattctgtaaatacatcagattctgaacccaaatcttcaaaatcagcaaagagaaataaatggaaacatgaagaagttaagaagctgattgatatgcgtggggaactgaatgacagatttcaagttgtgaagggaaggatggccctctgggaagaaatatctcagaatttgttggctaatgggatcagcagaagtcctgggcagtgtaaatctctgtggacttctttgttacagaaatatgagcaggaggtgaagaatgaaaagaagaacaagaaaaaatggccgtattttgaggacatggaaaggattctagctgataacaagacactagaaacaaaatgattataaaggtgatgcaccagacaagaaaaatttgcaagagttttctgcattatgattggtaatatgtctgagcatggtcgctgggaaggtaatccatcagttgcattattcttgcatcttgaactccttcattgaatatccatagttttgtgaggagatggacagcgttaaatgcattgacattttacattaacacaagttaatgagggagactatgctggttcaggggatgatttatccccttcctcaaaaggtaactacctacccagtgacagcattttagggtcattttgatgatattgattgacatattgaacaactattttaatgatagtgaagggttaatataatgtaacgagaccaaagtacattttttctgttacttataattaatttcattattttgtt

SEQ ID NO: 29157 - DNA, 622 bp, Glycine max
  Clone ID: TF_GmC1490_2
cctaaccttccttccattcactactcctccttcacttaaaaaatttcagccttccaaatcctcaacttttacaattattacaatttagcatcactctttctcttcctcaatccaatcccctctcgatcgaaccaagaaaatttaagaacccaaaccatgtatttatcggagaagcctcgccccatcgatttctacaaggaggaaggcgcgcgtgacatgatgatcgaggtcgtctccaacggcgacctccctcctccgcctcctccgccgcctccgccgatgatcctcggcgagagcagcggcgaggaccccgaggtcgagataaaggccccgaagaagcgcgccgaaacctgggttcaggacgagacgcgctccctcattggccttcgccgcgagatggactcgctcttcaacacctccaagtccaacaagcacctgtgggagcagatatcggcgaagatgagggagaagggtttcgaccgttctcccaccatgtgcaccgataagtggcgcaatctcttgaaggagttcaagaaggccaagcaccaggaccgagggagtggctccgcgaagatgtcgtattacaaggagattgacgagatcctcagagagaggagcaaga

SEQ ID NO: 29158 - DNA, 1169 bp, Glycine max
  Clone ID: TF_GmC4079_1
attttttcacctctccccaaaaccctcgcgccgcttttttttctctttcattatttttttaccattttttttatggacctcttcaccggcgaccacttccccgtccccgaccacgtcgctccgttccccgattccggcgacctcctcttcgccgccgacctcctctcccaccgccacaacccccagaagttccgccccatcaggtccgtccccaccgcccccattgccaacccttctcctccccctctctcgcacgatccgattccctccgggtcgggtcacgccccatgccacgaatccagcttgtcttttgatgctgaggatgaagatgaggatgatgacaattcatcagcaagtaccaaaggacatggccctagaaagaaaaggagaaagatggtgagaaagctcgaagattttgcgaaggatttggtggtgaaggtgatggaaaagcaagagcagatgcataaacagttattggaaatcatagaaaacaatgaaagggaaagaataaagagagaagcagcttggaagaatgaggagatggagagaatcagaaaagatgaagaggctagagcccaagaaaattctcgaaatttggccctcatatccttcattcagaacctgttgggccatgaaattcaaatcccccaacaacctgcaaaaccatgcagcaaaagagaagaggatgaagttgaggcaagtgctagaaaagaactgaacaatgatccaggtgacaatagatggcctgatgttgaagtgcaatcactcatcactgtgagaacttcattggagcacaagtttcgtctcatgggatcaaaagggacaatatgggaggagatatctgaagcaatgaatggcatggggtacaaccgctctgcaaaaaagtgtaaggagaagtgggaaaacatcaacaagtactataaaaggacaatagggagtggcaagaaaaggcgtcaaaatagtaaaacttgcccttactttgatgagttggacattctgtatagaaagggtctcttaagtattggaaatgccttgagcaatacctgcggtgttccccagattgaagtaaaggagttgaatgaaacttgaataggtagtacttgatagtcgtagatacggcttatgtaaaagctccttcattcagcatttatttagccattcttcctttc

SEQ ID NO: 29159 - DNA, 499 bp, Glycine max
  Clone ID: TF_jC-gmro02910048f02a1
ggctcgagctttgcatagatctgttgcagagcctagaatcattgtgcaaacaacaagtgaagtgaatctcttagatgatggatatcgatggcgcaaatatgggcagaaagttgtcaaaggcaacccatatccaaggtgatattggtttcccccctacactttgattgcttatatttaatgaataattatggatgagcattatcattgtctgctaagtgacaagtttaagtgaaaaaaaggctcaccgtaaataaagtatgaatggacaagttcaacaacgtaagtttaacatgagtttaaaatgagtgaaaaaggctcaccattacaaattgctcccatagtttaaaatgcagtataaaaaggttaatctataatataagttttgtcccgcacatacttatgtatatgaatatttccccacagcataaaatttctggatccgccactacatctaatggtttaaggcatttgagttagatatgatgtgaagttaatttat

SEQ ID NO: 29160 - DNA, 357 bp, Glycine max
  Clone ID: TF_GmC1323_2
caccagcgtgagaggctgcccagcacgcaaacacgtggagcgtgctgtggacgattccaacatgctcgttgtcacctacgaaggagaacataatcactcgcaaatcgcttctgaggtggcaaatgttatccttgaatcatcttagtcaaccttaagactagtgcatgccaatgctttacttcatttatatgatttcttaattctattggtctttgtctttttttctttctttcttgaagtatttattttaaaattcattgaaatattaaattaattagatacaagagtattggttggtctttgtaagacttattattatatagaaaatgtaaagaaattaaacagcataataaaaat

SEQ ID NO: 29161 - DNA, 508 bp, Glycine max
  Clone ID: TF_GmC328634_1
cttcaaagggaaccacgatgtcgaggaggtgagaattgcaaactgagaactatgttggaccaaatcaccaaaaactacaaccagttacaattgttcattgctttgcagaagcagaagcagtgtcagaagatggagacaaatttaaatgggatgatgtttggtcaacatttattggacccacgaggaccattcaccaaattagacgctcaagttgcaccatttgcagatgataaatctggtcaacggggtcatcctgaaactgatcctgtagaagatgttcttgaacaatcaacctcacagagttggggctcatccaagagtcccaagtttgaagagtccaactctagtgagcttcctttaaaaaaaaccagggtttccgtgcgtgcaagatcagaagctcctctgattagcgatggatgtcaatggaggaaatatggacaaaaaatagccaagggtaatcctggtccccgtgcctattatcgttgcactatggccgtaggatgcccgg

SEQ ID NO: 29162 - DNA, 650 bp, Glycine max
  Clone ID: TF_GmC273044_1
gctctaagaaagatatctatgataataaaaagaataatattacaagcacatatatgtaaaagaaatgaacattgtgacattttttctttaaattctttagtctaaaggatcgaaatttcagaacttcaaactaaactgaaatgttttttatatccactataaagcaccaaaactttgaggtaacattaggttccatccatgtcatgctattcaaacatttgagatacacagattacagagttaggctgtatatgtgatcgtttctcaatatatgctcgaagctttcagttgacttctgcacaggatgaatatgcatcccttcgtaggttgttaccacaatctcttcgtctttagtatggcgttggatttgtttcttcacattgcaacctcgataagaacatctgcagtaactatagttaacaaagataagaatactagacactcataacaacattttggatgttctcctgatcttaaaaaaaaactacgatttctacttcctatattaacatatcatgtaattattttgaggcgacaaactgaaaaaatttattgtttaattctacgaaaataaatcgtttcagggcaaagaaatggctttgtaaattttctgaaatatatatatgcttaatccagtatatcaacatgac

SEQ ID NO: 29163 - DNA, 533 bp, Glycine max
  Clone ID: TF_jC-gmst024140b12a1
ggctcgagagttattacatttttcacgaacaccggttgcccctttagaaaacacgtggtgagggcatctcatgatccaaaagctgtgattaccacgtatgaggggaaacacaatcatgatgtaccaactgcaaggaatagttgccatgacatggcaggaccagcaagtgcatgtggacagacaagagttaggcccgaagaaagtgataccatcagccttgaccttgggatgggaattagcccagctgccgaaaacacatcaaacagtcaagggagaatgatgctgactgaatttggggatagtcaaattcacaccagcaattccaatttcaagttcgttcataccacgaccgcgccggggtactttggtgttctaaataacaactctaacccatatggttctaaagaaaatccaagtgatggtccatctgtaaaccattctgcttattcttgccctcagaacatatggagaatactaatgggtcactgaaattgcttgaaaacaaaaaattaaataaaatgaaattctgagtt

SEQ ID NO: 29164 - DNA, 2637 bp, Glycine max
  Clone ID: TF_GmC943_1
ggcgcctaattcgctctcttctaccacaaaccactcaatcctaagaaatccatttgaaatttcaagtctcgttctggctaagtccatgttcattgtttactatacctcaccactccaaggttctcgtaattttcttcagcagaaaacgaaactattgcttccagagaagagcatcatctacgaccattttggcaatattataaaacaagacaaaaatggagagtgacttgagctgggagcggaacacactcatcaatgagctaattcaggggatggaggtagcaaggaagttgaaggctgacttgaagttgccgtattcagttgacacaagagatctgcttctgcagaggatattatcttcttacgaaaaggctctactgattctaagatgcagcaatgcatcaacttccgagttgcagggcatgaatcaagcaacaccaactttgctacccgagtccccattagcctaatttgctcctttagcctcactcctgctctcttctacgtcaaatcctaagaaacccatttgaaaatttaaaatctcgttctggctaattccatgttcattgtttactatacctcaccactccaagggtctcataaatttcttctgcttccaactctgctgcagaaaaagaaactgttggttctagatacaagtgggtttccagagtagccttccgcagcactcagggctgttgggcaacaaagcaagtgcagagatcagatgaagatcccacaatgtttgacataacttacagaggaaatcatacctgttctcagggaaacaatgccgttctgccacccaagtcaccagaaaaacatgagaaaccagcacacagtcataacattgacattcaccatgcacaggcatcacaagaaagccttgcaaagttcagaagtatcttgtctgtcaacacagataatctggacaatggagatatggcatatgctttcactttcccttccacttcatttggatgcatgaaacaagacaaccacagcttgattcctttggccctggagaatgactccttcttaagcgacctataccaaacacacctgttatccccaacaacaccagaatcaaattatttcccatctccaactttccagatgaatgagtttgatgggatctacaacaggtcacattcgaaatccgatatcaatgagatcatttccaccaacacatcagcaaccaattctccaattcctgatttcaatttctcacttgatccggtggaaattgatccaaatttccctttcaataccccaggatttttgtgctgattgcactataaatggaatactataagaatgtagtcttcataaaacgggacaatttcagacagcagtagaattgtagaataaagaatgagcaactgcagcacttatgaacgtccttgtagtcaatatcagaattgcaattttggctccgtgttagcaattagcagtatgcactttcgaataaacttgtctgtcaacacagataatctgaacaatggagatatggcatatcctttcactttcccttcaacttcatttggatgcatgaaacaagacaaccacagcttgattccttgggccctggagaacgagtccttcttaagcgacctataccaaacacaccttttatccacaacaataccagaatcaaactatttcccatctccaactttccagatgaatgtgtttgatgggatctacagcaagccacattcggaatccgatatcaatgagatcatttccaccaacacatcagcaaccaattctccaattcctgatttcaatttctcacttgatccagtggaaattgacccaaatttccctttcaataccccaggacttttctcctgattgcatttcactataaatggaatactataagcacatagtcttcctaaaatgggacaacttcagacagcagtaaaattgtagaataaagaatgagcaactgcagcacttatgaaggtccttgtggcttgtagtcaatatcagaattacaattttggcactgagttagcaattagcagtatgtactttcaaataaaatagtctctccttatttttgttagttaggactgcaaatttcaagtgaacctgtagactgcaagttcctaccgctgtgccctaactctgggccaaagttggagcatctgcagcacctacgtgcggccctgtggctggtcctcgtggcctgtagtccatttctggctctcagtttgcgctctggggtggctatttggtgtgactgttctttctgctagttcctacacctaattccaatgatccttggtatgcaatcaactatttaatcaaaaaattctcctggacaaaagaatttatttcctctaagaaaaagctccacttattctaaaatgcaagcaatcatcaacttccgagttgcaagccatgaatcaagcaacaccaactttgctacccgagtccccattatctgtccatggaagtcctctgcgcgaggacgttgatgggaccatcaaggatcaccaagaagttaaacatgattcaaagaaaagaaaagcaacgcccaaatggatggatcatgtaagagtgagctgtgaaaagtgtcttgaaggaccacatgaagatagctaccaactgagaaaaatatgtcag

SEQ ID NO: 29165 - DNA, 773 bp, Glycine max
  Clone ID: TF_GmC94_3
gataaacttaattcattttactatcttctttttcgagtgtttattgaaaaatttattcttacatgacctaaattttgtgtttatggagcctaaattgatatatatcttgacctttcaattttcaggaactactatagatgcactcacaaatttgaccaaggttgccaagcaacaaaacaggtgcaaagagttcaagaggaaccaatcctatacaagaccacctactatggcctccacacttgcaagaacttggcaaaccctgagatcatacttgaccctatgtccccttcatcctcatccaagttccttagctttgacaactccttcccaaccccatcaaagcaagagtgcccctttctctcatcttctaatttgccatcatcagtgaaaggggagtgcaaggaggaggtccctccctcaacttcctccaatcattatctcatctcttctgacctcacttttgatagctcaccaaggcatcatgtcactctatcatcaacacttgactcagagtacaagagtgtggacatttcggatgtcttgtatgattctgctcagcttgatgatgcctttgaacccttccttgaatttagatgagcatgtccttgtttggtttgtgattttttttatataatttttactttagtgaaggcagtacaaaacaaaattgtctaatatttagtagtacttttcttagataaatgtaatatccgtgcttttattgtaaattttgtcattttcaatgaatgagaaatgatcataatgtttcaatg

SEQ ID NO: 29166 - DNA, 396 bp, Glycine max
  Clone ID: TF_GmC1329_2
aattcggctcgagggagaatgaaaatgatggccattcctattcttctgctgggagtagaactgttaaggaacctagagttgtagttcaaaccacaagtgaaattgacatacttgatgatggatataggtggaggaaatatggacagaaagtagttaaaggaaatccaaacccaaggtatttccatcttttagattttaatagaagagtttaactgtgatgtactattggactagtgtaaaaaaagtcgactgtaaatcaattaaaaatttgtggacttttaagttagttattacaaaaatcaacaaacccaacacgatttgtaattggatgatagtataaaaaagcatttatactattcattcatttcaattaaactcttaatagaatggattagt

SEQ ID NO: 29167 - DNA, 430 bp, Glycine max
  Clone ID: TF_LIB3242-323-Q1-J1-D7
gtcacagttcaaacagtatgtgacctatttcaatacatagactcatttaagctaagcctttgccttttgtcttgttggtttttaacatagcaagttctctttttctaatattttcaatctgattccttgtaacagcaacagccatggagttatcaggagaccacaaagcaggataatttttcttcaggaaagagcatgatgaaaactgaaaaatcttcatccatgcaaagtttttcccctgagattgctagtgtccaaaataatcatagcaatgggtttcaatcggattatggcaattaccccccacaatctcagaccttaagcagaaggtcagatgatgggtacaattggaggaaatatggccaaaacaagtgaagggaaggaaaatccagaagtatttcaaatgcccataccccactgcctacaaaaa

SEQ ID NO: 29168 - DNA, 829 bp, Glycine max
  unsure (1)..(829): unsure at all n locations
  Clone ID: TF_GmC1330_3
gttgtttttagaacgaggatggaggaagctgcttccgctggattaaagagcatggagcatctcattcgactcctttctccaacctcttataattccaattcttcttcttctcctcttctcaataccaatcccaacaacctccactgctcccaaatcaccgacttcaccgtctccaacttcaaacaagtcatcaaccttctcaaccgcaccggccacgcccgcttccgccgctctccaccccaagcccaagcccaagcccaaacccaggcaacccaaacccaaacaagtcttcagcctcaaccagagacccaacaacaagggttcagtttagatttcgtgaagcccaccattctaaactcaaagcccatcaacaaagacgaaactttgactctttcaacaacctcttcttccttcatgtcctccgtcaccaacgacgccagcgtctccgacggcaagatcggacctttcctccctccctccgccgccaaaccccctctctcctccgcccaccggaaaaagtgccgcgacgccgccgcagcactctccgccaaaccctcctgccactgctccaagaaaaggaaatcacgcgtgaaacgaacgattcgggtgccggcgataagctcaaagatcgcagatatcccaccggacgagtattcgtggagaaaatacggtcaaaaaccgatcaagggctcaccttaccctcggtattattctattccttcttctatcttcatgctgaatcggtcaaagtcaaatgcagatctcaaagttctttctttnttcagaanaaanattaactatgattaaggtctatgataaaagatcgaac

SEQ ID NO: 29169 - DNA, 171 bp, Glycine max
  Clone ID: TF_jC-gmXLIB3563P059cb11a1
cgagagaatagggacaaaccatggctaaggggaatccatgccctcgagcatactacagatgcactatggctgttggttgctcagttagcataccagttctacgctgtgctgatgatagaacaattatcggtgacaacatatgacggctcacataatcatccactgccacca

SEQ ID NO: 29170 - DNA, 469 bp, Glycine max
  Clone ID: TF_jC-gmst02400030c12d1
aatcaattgtatatgatattttttggatatttataataattggcaggaattttggtaatataattaaagtttagtttgatgtgaaggtagctgtaaacctagggaaaggactatttttaactgccttctgaccatacttccgccatctgtagccatcctcaagatgatcaacttcactcttggtcataaatgcaaaccgtggctgccgtattcgcttttgccccttgtttttacctttactcggtatctcaggcggtttatcgtcggagacggtggatttctccggtggatcctcgctggagctggaagaaatcgattggttgttcgaccgcgacggcgcggcggcgaccggttcaatcgaatcggtcagagaggactgaaccggcttccacaatccgtcgtcggtgccgatccggttcggctggtccggttcgaggttccacacgaattccctgagtatgctccgctc

SEQ ID NO: 29171 - DNA, 746 bp, Glycine max
  unsure (1)..(746): unsure at all n locations
  Clone ID: TF_GmC737383_1
accaggagagaaaccacctatttcaattttcaccaaacctcttcctctagaaacatcatcaacctctatataaagataattggaagagagaagggagaaggagaaagggaaaagatcataagaagtgatgtcaacaacttcccatcccattgttcaccacagcttattcgatgagcaggaccagatacctacacagatgggtttcttttcctttccaacaaaccttactttccctcctttgggttgccatcaatcctctttgaaagcctttagttccatagcaccttcttcacttgctatatctcaacaagattctgcatcaaatctaacagcagaaaccctattctcaaccactgctcaaaagtcaagagaagacctcacttctagctttggaggaggtcaattcctatccttgcatagatcaagtgtaaatccatgggcattgggagaagtggctgaatgcttcagcagtaaaagaagtggatttgatgatcatcatttccgaatttcagccatgaagatgaagaaaatcaaggcaagaaggaaggtgagagagcctaggttttgcttcaagaccatgagcgatgtggatgtattggacgatggctacaagtggaggaagtacggacagaaagttgtgaagaacacgcagcaccccagctatttccggtcctcacttgatagctgccctcttttggtttcgccggtacgcttgtccttgattaaagaatattaannnnnaaacc

SEQ ID NO: 29172 - DNA, 279 bp, Glycine max
  Clone ID: TF_uC-gmflLIB3260P015f01b1
cccacgcgtccgcctttgaacttgttttgttgctagacacccttgtacatttctctgtgtgcatctgtaatatcctctgcaatgcaaaccactagttgtcaatttttcggtaaaaaaaaaaaaaaaaaaaaaaaaaaaaaaaaaaaaaaaaaaaaaaaaaaaaaaaaaaaaaaaaaaaaaaaaaaaaaagggcggccaatagaaaaaaacaaaaaataaaaaacacgggcatgcgacataaaaaaattttttataaggaaaccctaaattcaatggggg

SEQ ID NO: 29173 - DNA, 940 bp, Glycine max
  Clone ID: TF_GmC1080_1
gcatatttcaagtgctcttttggtccaaactgcccggtccaggggggtgtggatgatcaagctgttctggttgcaacttatgaaggagagcacaatcacacacacccttctcaaatggaggtaaaaacgagggtgcaaagatgcatggatgatcaatctgttctggttgcaacttatgaaggagagcacaatcatactcacccttctcaaatggaggtaacaacaggctccaaccgttgtatgactcttggttcagtaccatgttcagcgtctcttagctcttccccaccaacagctacccttgactggacaaaatccaagtccagcagtgagtctaagaatacaagtcccaaaaccgaatcaccagaagtcccgcaggttttggtagagcagatggctacttccttgaccaaggatcctaatttcagagcagcactagttgctgccatctcaggaaaaatgttgcacaataattaagtagaaaatgagtgaagtgtatttaactcattctataagtggatcttgtttagagcataggatctctatgtaaatacaacataggacattgctacatatatattcctcaatttaatcaaatccttttggtgggaatcgagctccactcaggatcgatagcatgtctagctgattgtgcatttgctaatcatgctcatctcagtcttctctattcttctgcatctggatgattaaaattaggtttacaattaagttctggcgaagtttctatagcatacaaaagcaaagagaaactttgtttcgaaaagtgcaactctattgagtattgagtattgacaatacaatatctccttgtcattttccaactgtcgcaacttctcaggctgtttaaaaaaatatatagaaaaaaaaaaaggaaaaaagaaacccccccaaaacgggaaaaaaaaaaaaaaaaaaaaag

SEQ ID NO: 29174 - DNA, 457 bp, Glycine max
  unsure (1)..(457): unsure at all n locations
  Clone ID: TF_LIB3242-205-Q1-J1-E11
ttctcgagcactcctntaattaaacctatcctcaagccacttttttttatacaaactcttaataanntttagagctntttttatagagagcggtggcgcaantatattcanatatttttttacattcaatcctaaccctattatttattacaaatacaccaacacttgttgcccttttagaaaacattttgataaatcatctcattatccaaaatcttttattaccacatattattggaatcacaatcatcatgttccaactacaaagaatattttccattacatttcaataccatcattttcaaattgacatacaataaatattcccgaataaatttataccatcatcctttaccttttaattgaattaacccaattttttaaaacacaccaaacagtcaaggttaaataattcttttttaaatttttggatattcaaacttaccccaacaatttc

SEQ ID NO: 29175 - DNA, 636 bp, Glycine max
  unsure (1)..(636): unsure at all n locations
  Clone ID: TF_LIB4280-035-Q1-K1-C10
ccacgcgtccggcaaatctttgaagatcatcaaaggtgaaagcatctggtgggaagcattgaaatggaatgtagcagagtggggagatgctggtcgacccaattattttgagcgaattttttcaccaattaacgaggaggctgacatgatgaaccaactagctgcacttcaagagactcaactaaatgaatatcacaatacgacatatcagggaatttcaagttctaaacagtcgatagcaaaaatattagccccagtttcatctgtgggtaggggtagttcaaacagtgaagcccaaaagcggaaagtcgttgctgagccaaaaatatttcaagaggtaacaagaaagctttataaaactatcaatgcggataaacgaagagaagtttggacagcacagatacgtgtcaatgcggaagggtgtgatgatgatggatatagctggagaaaatacgggcaaaaggaaattcttggagctaagtatccaagaattcattntcgggtgccatgccaaagagaanaggaagaggacggccaanagggtcacatgttcagaaggaggttaaagagagtgcggatggtgaattcgtcatttctcctaatattcctttgaatgtgtntgaatctgatcctgac

SEQ ID NO: 29176 - DNA, 683 bp, Glycine max
  Clone ID: TF_GmC1027_3
cgttcgcgtctttcttccctacggcaaagccgcgctatctatcttctttcctccacctaaccagatcaaccctaatcctatatatcatatcgatcttactacttctcatagcttcaatgtgaggcctcacgaatgaataaggatttgggcatttgagagagatcatatggagaatactaagatgatgggggtgaagatacaggactatgcttctaatatggagagtaataattatccattctttgatttctctgaagataagggctctttagggtttatggagctattgggtgcgcaagactatagtcctctccttgatttccctctatcgtcacacgtgtcagggcctcaaacctcttctgttaaggaaccacctgagactaagaaagagtgttccgaggtaactaataacaaccagcaacctgcgactccgaactcttcatccatttcctccgcgtccagtgaggttttctatgatgaacagaataaaactgtagatcaagcacctgaacaccaaaagacaaaggaacagttgaaggctaagaagacaaatcagaagagacagagagaaccgagattcgcgttcatgacgaaaagcgaggtggatcatctggaagatggatacagatggagaaagtacggtcaaaaagctgtgaaaaacagcccctttcccaggagctact

SEQ ID NO: 29177 - DNA, 1864 bp, Glycine max
  Clone ID: TF_GmC6804_1
gagaagacgacagaagggggcccccaccatttatatttgctctcaatcttttttaccacccacgtttttaaaacctcttcatacacacaccttctttttcttccttttctttctatatatagtgacaaagaaaattggtgttgggtttgatttcgatggagaattattccatgttgttctctgtttccaattcctcaagctacccaattggagttggaagctctcaaattggttatagtggtcaaagctccaatgcgtttcttggtctaaggcctagtaatgaattagctagtgatgatcatgagaagagacaaggtggtggtgatggcaacatgttaatgtctcagatcagtggtggtagcattaatgtgagtgatgagttaggtggttcgggaaatagtatcaataagccaaagaaaggagagaaaacaaggagccagcctagatatccttttcaaggttaccgatagagggaagttcttgatgatgggtaccgatgaagaaaatatggccaaaaagctgttaaaaacaacaaatttccaaggttagttgtttcaactttatttcatgttattgcattttttttttgtctaaaaagaggaatcaaacgcagatatcaatagtagagaatttagaataattcattcacactattcaaccagacctccagaatctaccgaactactagacctttcttgattgatttcatgctgtttgttgttgatcttgtttagttttcgcttctgctgcttctgcttcatcttgtttagtttttatcttgtggcaatggcgcctgctaagtttgacttggaaaattgatacgtgtgtaaattgtacaaagaatataacaagaccccaccatggatcttatcggtttgaattttgaattaagaatagaaaaaagcgaggttaattcttgttgagttcatactgggcaataatcaattgaaaacacttttctagctgcgcagtcttgcttcaattgttttttgttagtttaggataaatattttctaaaggggaaagaaagtatttattacttgatcttctttttttgctatttgcagcggctttcttcttcattcctattttctctagctgtcttttcttcggtcaaatcaaaagagaaaaggaatagaacaagaacgaaattaacctgtgtatgcatccctgcgtgctcgagatatatatatatatatatatatatatatatatatatatatatatatatatatatatatatatatatatatatattgtacttatacactatacactgtgcatgtataattttttgtataacaaagagagatagaaaaatcaagtctaaaggaagatgatttatgtgatgaagaaagataaaaaaataacaaaagaaaataatgccataattcatataattctaattaaaagggttcataagagacaattggatatatatgcatatgctatgttcctttaaattttatggaaaccattgttcttctgtaataaataatccagtccaaactcgaagaaactacatggtggatgaaatattcaacaaacccataaactttcgtctacatatgcagaatatctagacgatcgatgataactacttgcagtacttttgttccccctttgatacaaaaataaaactgtgtcaatagaaagtaagatctagtttattgcaaaactcttcttagacaatcttctttttttctttctttccatttgtttttttaaattggaatattattaggttatgtaaattcagctgtcaagttcagtactgctgaaaatatatacaggtgaatatcctttaacttattccttttattgtggtggttattaatacaatgttggaatacaagctagctag

SEQ ID NO: 29178 - DNA, 172 bp, Glycine max
  Clone ID: TF_LIB3093-052-Q1-K1-F6
cccacgcgtccgctaccatgcttccttgcagtacaccctctcatgcttctgcgctttttatagcccctattttaaatatagcccttgactgtcttttttccatacttcctccacgaataatcatcattatttatatttgcatgtttcttgcatatatcattcaccataattt

SEQ ID NO: 29179 - DNA, 1318 bp, Glycine max
  unsure (1)..(1318): unsure at all n locations
  Clone ID: TF_GmC5708_1
cttgccatgctgaaccactcgtccgttctatttgattcacaccttcgcactctctctatcaccaatcccttatatcccccctccacttagctgaacataattcaccacttcaccatcaatttcccctccaatttcccatttatgatccatttggcatttcatcatatttcaccacttgtcctactccacttggatgatttcctaacgtattgttttcacaaatccttgttcttcatcagctaatagtttgagtccaacgaattcagcaacactatagatatatgctatatcttcctttccctatacattttccttccaaagtatctctagttctctacaaatcaacgtggcacattttttagcctaagaaaagctttagctgcaactcaaattcaaagtgtaagcctttcttgtttttattagtttatcttcaccaatggaagagaactttaagtgtgaacaagttggtctcattgatgagctaatgcaagggaaggagctagcaaagcagctctgtgaccatcttctagtctcatcatcatcatcatcatcttctcatgaaacaaatgaagtcctaattgagaaaatactttccacctatgagaaagcacttgccatgctgaattgcaaggctgatgtaggagaaagtaaggccaagaatggcagcatgatggattcccattgtcctctcacaaatggtagccccaaaagtgaggtcttggagcctgaggttaagaacaaaaatgtctttaagaaaggctcgagccatgtcaacgtgcacagaacaagtgaaggtgtgcttgggaacggcgcatgaaggatctctggatgatggctatagttggagaaaatatggacagaaggatattctcggagctaagtttccaaggtaaaaatttgggtttttttgcctcaaatatgcataattgaagtttttttaccataagggaaaatttgcataatttggtatttgaatatgactgaaattaaagaaaggttcatctatatagcctttttgataaactattactggagttactgccaaaggccataggtaggcacccctcaaacaaaaataacaaaaaatcattggccaatggagtctaaagagggaaataaataataataacaaattttggcacgcctagctcatgttccctcgttgtaacttttatcacttttcagccaatggagtgagtgaggacaaaagtgctttttataaaaagacaagtaaaacttatctaaaggacaacgttagctagattgaattcactacaattgcagctttttataaatgcacangtgtcattaattctga

SEQ ID NO: 29180 - DNA, 875 bp, Glycine max
  Clone ID: TF_GmC5713_1
ttgataacttgatcttgttttgtgaagactgaattcaaatgggtgccaattaattcagtcttcacaaaacaagatcaagttatcaaatttttctaatgtatctcatcaccgaatgatcatttgggtgcaaaggagtttagaggaccctacaatacttgttacaacgtatgaaggagagcataaccatggtcatcaaagagctgaaatatcacttgtctcaaaccaaagtgaagcccttcctcctcttaaagggtcaagtcctgtttcctcacctaatacagcgacaattcgaagtgctgtttgccccaccgtaacgcttgatttggtcaagtcaggattggttgaatttgaaagtgcccaaaagtcctctatccagcaatttttggttcaacaaatggctacttctttgacaagggatcccaatttcacaacagaacttgccactgccatttcaggaaaaattctagaggcccaatggtgaattattaacctaggtgtaacttaattcataatatatactgaatttgtgggagatatccccaaaatacaattttagagaaatgtgataaattttaaatgtaattaaatctcggactaagagattatagttgttgttaataaaaaacacacatcattattatgaacaaattatcaattttaaaaaataatctctctcttttttaattatcagaaagattataaaaaaaattattttcttaaaataagttcaatcatgtatatactcactgcactgaggagaagggattgtattagtttgcttgcttctttttagaggggctgaagagacaaatagttggaatgtatatagaaaattaaagtgccaaaagaaaaatcagatttcctcttatgaaaaa

SEQ ID NO: 29181 - DNA, 825 bp, Glycine max
  Clone ID: TF_LIB4164-057-R1-N1-D6
gcatgcctgcagagtgatattatcttcttacgaaaaggctctactgattctaagatgcagcaatgcatcaacttccgagttgcagggcatgaatcaagcaacaccaactttgctacccgagtccccattatctgtccatggaagtcctctgcgcgaggacgttcatggggccatcaaggatcaccataattcaaagaaaaggtgaatattactgaacagacttggtagctgtttcctggcacataaacatcagctatgtctggtaactggttatactatagctcctaacttgtatttgtgtttcttttttaattgctttcagaaagataacgcccaaatggatggatcgtgtaagagtgagctgtgagagtggtcttgaaggaccacatgaagatggttacaactggagaaaatatggtcagaaagacatccttggagccaaatatcccaggtgagagaacttccctcggtcctgctttaaaaagaattacaagttttcttaaggataaaattgccttcaccttggccagcttctaattaacgactcattgtgacaatttgcagaagttactataggtgcaccttccgcagcactcagggctgttgggcaacaaagcaagtgcagagatcagatgaagatcccacaatgtttgacataacttacagaggaaatcatacctgttctcagggaaacaatgccgttctgccacccaagtcaccagaaaaacatgagaaaccagcacacagtcataacattgacattcaccatgcacaggcatcacaagaaagccttgcaaagttcagaagtatcttgtctgtcaacac

SEQ ID NO: 29182 - DNA, 909 bp, Glycine max
  Clone ID: TF_GmC1374_1
caataacatgactctttatttataatgcaggagctattatagatgcacgagtcagaagtgcggtgtaaagaaaagggtggagaggtcattccaggacccaacaattgtgatcacaacatacgaagggcaacacaaccatcactgtccagcaactctgaggggcagtgctgcaagcatgttgtcatcaccttccttttttggttcctcttatatggcgtcaagcttaccccaagattttcttgctcagttggttccaagttatagccaaattaatgatcaccaaagtccaatgtttcaccaaaacctttcccataatctccatccacagcctcaacagcagcaccagttccaactctctcatgaccatggtttgttgcaagacctactaccatcattccctggcaaacacgagccatgaactcactaaaaacctagtgcatgttttgatttatttattttaggaaaaataatggttttatatttcatcactactagaaaaattaaaattagtaacggaataatctatgtaggttttttaaaaaatccgttactaaaatttggtgatctgatctcaaattaattagtgaaggaaaattaattttctatcactaattttgatcaccaatttattgatttttagaagtatttctaggagtttttaaaagaaaaaacaattgctttttcaagataaaccagaatcaaacatgcacttaacccatttctattagcgtatggtggagcttgcagtgtattgcacactgtctatatataagtatgtgtagtaattaagtagtagtagattccctcttggttaattacctcctctctttaagtcacatgtatgtacctagatttgtatggaaatgaaaaacattgattattcttaaatgagtatttagaattacttca

SEQ ID NO: 29183 - DNA, 1586 bp, Glycine max
  unsure (1)..(1586): unsure at all n locations
  Clone ID: TF_GmC38338_1
gtatctctctttcctcgcaaaaccccacccctttccttcttttctctctctaatccaaagccaaaccaaaatttccaagaaaaaaaaatatataacaagttattaacaatcctaacacactacagaaacagatccttacagccaccaagtagagaccgaataacaatgagtattctcttcccaagaagttcctcagcagcaaagaggaaaagggtcattagagaacttgttcagggtcgagactatgctactcagttgaagtttctgcttcagaagcctattggccctgatgggtctgtttctgctaaggaacttgtggccaatgtgctgagatctttcgctgaaactctctctgtgttgacttcttcttccgaggattcaacaagtggtcatgatcatgaacgaggttgctcagaatcttgtaatttccggagaagatgcctcgcaggtggaaagcattgatccgaggtctgagggttcaactgagagtaagaagggatcaaaggatcggagagggtcctataaaagaaggaagactgaacagacatggaccatagttgcccaaactactgatgataatcatgcatggagaaagtacggacaaaaggaaatcctaaattctcaatttcccaggagttacttcaggtgcactaggaagtttgaacaaggttgccgagcaaccaaacaagtgcaacggatacaagagaatcctgatatgtacaccattacgtacattggctttcacacatgcaaagacaccctcaaggctccacaaatggtgacacattctgaaacttgggactcatttcttggtcctgacgcaaatgtgccaaatgaacattattccatcattggatcacaaagccaaattgtaatacaagaatatcccaacgatgagactgatccaagtgatctcacagatgctaacctgtggtctgatttgaaggattttgaactatccaatgacaagcctgcaggtttgaaaatagcacctgaaaatgcagattctgtgtattcatgcactggctcgagaagtttggacatggattttgggatattctctcctcatttctgcagcaccgaggacttccactttgatgaaagccaattgctttagttaccctttcgtaatctttaaccatgtaatgtattttgatcagattgaatatttttagattttgatttttccaagtttcatgtgtacaccatggagtgaataacaatttgatgatcattcacacatgcatgtcaccaagtcaatctaattaatgtaatgtatgttaatgtctgtctgaaatgtgctttgaaaagattgattcgataacatagaccaagtcaactatatgtataggtgctacatataatatatataccatatgtgtgcttatatagcttccttttctttttgtctccttgtaaggcagtgtcatgcatgaacctatgaacccacagtgtgattattataaagggttatgggacatgtactttggttctaattagccaagtaattaagtgtaatatatgttgatttaatcaattaaaataaaagtttggatttgatannnaaaaaaaaaaaaaaaaaaaaa

SEQ ID NO: 29184 - DNA, 758 bp, Glycine max
  unsure (1)..(758): unsure at all n locations
  Clone ID: TF_GmC143554_1
gttacagctggagaaaatatggacaaaaagatatccttagtgcaaaatatcccagaagctattataggtgcaccttccgcaaaacaaaggggtgctttgccacaaagcaagtgcagagatcagaagaagaccacactatctttgacataacttaccgaggaagtcacacatgtaagcgaaacgatgccgttctgccgcctaagtcaccagattatacgcatgccgcaccagtgactgtcaaaacggataacataacggcaccttccgcttcgtttggatgcatggcgcaagataactaccacgacttatttccttctctggccgattcggctcgagcattttttagcaccccttcccaaacatcctcgttatctgcaaacacacctgaatcaaattattttgtgtctccgactttcctcgaacatgaattcgatggggtctgtaacaagccctgccctgattctgaacttgcccggctggtttcagctgatacatcaatcaccagttctccaattttcgactttaatttctcgctcgatgcagtgggaattgattatccaaatttccccttcaatatatgaaaatatggttagcatttgcagaaattgcacttgagaatgaatttcatactattttgtagaaagtatggttagcatttgaagatgatgtataacactccagacagcactaataaatgcccctgtagttcattctgaataaccacgttacttaagggnngtttaatcannttaaataac

SEQ ID NO: 29185 - DNA, 673 bp, Glycine max
  unsure (1)..(673): unsure at all n locations
  Clone ID: TF_GmC80686_2
ctcttcccttgtccttcttcctactatactatattttctctctctaatcaatcatagttctgatcttcatacacttaccccggaaacctccatttctcagatcaagcttgcacgaagacattaaaaaatagaaatacatacatagctatggacaataatacttgtgcctcctcccaacttgagtcagaagaagcatcttttgagcacaaatcagaaactcaaacatcaaagaaaaggaaaatggttgagaaaacagttgtggcagtgaggacaggagagaatgttggcaagctgaagaatgaagggctaccttcggatttttggtcttggaggaaatatggacaaaaaccgatcaaagggtctccatatccaaggggctattacaagtgcagcacatccaaaggttgttccgccaaaaagcaagtagagagatgccgaactgatgcttcaatgctcataatcacatatacctctacacataaccatccatgccccactgccatcaccacaaattcaccccaacaaccaanagaattatccgaatccgaaaccaccccagacctctcagctaccacaaaggaggaagacccaagactatagaactagaagaagagcanaggggataatatagcccagtgatgaagttacaatgaagaaaatntcattacttgca

SEQ ID NO: 29186 - DNA, 1032 bp, Glycine max
  Clone ID: TF_GmC6804_2
cccttatattggccacgttaacattaagcgtcgcccccaccatttatatttgctctcaatcttttttaccacttccatttttcttttccaaaacctcttcatacacacaccttctttttcttttttctttctatatatagtaacaaacaaaattggagtagggtttgatttcgatggagaattattctatgttgttccctatttccaattcctcgagctacccaatttcaacgagtggtgttggaagctctcaaatcggctataatggtcaaagctccaatgcgtttcttggtctaaggcctagtaatgaattattaggtagtgatgatcatgacaacggaggcgaaggtggtggtgatggagatggcaacatgttaatgtctcagataagtggtggtagtaatactaatgtgagtgatgagttaggtggttccggaaatagtaacaataaaaagaaaggagagaagaaggttaaaaagcctagatatgcttttcaaactaggagccaggttgatattcttgatgatggttatcgatggaggaagtatggccaaaaagctgttaaaaacaacaaatttccaaggagctactacaggtgcacgcatcaagggtgcaatgtgaagaagcaagtgcaacggctaaccaaagacgaaggggtagtggtgaccacttatgagggagtgcacacacacccaattgaaaagacaacagataactttgagcacattttgagtcagatgaaaatatacactcccttttaaaccttcttctccacaaacagtgtacctcaattgggaactacttgtagtacttttgttcccccctttgatacaaaaataaaactgtgtcaatagaagtaattaagatctagtttattgcataaactcttcttagacaatcttctttctttctttccatttgttttttttaaaaaaaaattggattattattaggttatgtaaattcagctgtcaagttcagtactgctgagaatatatacaggtgaatatcctttaacttattattcctttt

SEQ ID NO: 29187 - DNA, 734 bp, Glycine max
  unsure (1)..(734): unsure at all n locations
  Clone ID: TF_GmC89194_1
gaaaaatatagacttagcgaggacttatattggtggtgtgtacagtgcagaaatttcgtccataaacgctgcagactacacccactatatagttatgcttcaaaagtttggtgtcactctgggaaaaccaactgagttgtagtaacaagcttaaaggctacataaatggaagataaagctgcgataaaagaattgctggaagacgaggaaaacccatatgataatactggaaacaaacaagatgcggagaaattaccaatgctacacacccggcagtttttgaatatgggcgagtcttcatcaattttagacggcaacacaaaagcatgtgcaatagcagaaaacgctgaaaagaaaatgttaggcaaaaaccttgcatgtgatgataataagtacaatgttgaaggtgaaatcaacagtcaaataacatcgcatgaagcaaaaagcacagaagatcaagtatctgaggttacttgcaggagagctagagtgtccataagagcaagatcagatttttcttcgatgtttgatgggtgtcaatggagaaagtacggacaaaagacagcgaaaggcaacccttgtcctcgagcctactaccgttgtagcatgggaactgcatgtccggttcgtaagcaggtgcaaaggtgtttcaaggatgagactgttctcatcacaacctatgaagggaaccacaaccatccnctcccaccagcagcaagacctttggcaagctc

SEQ ID NO: 29188 - DNA, 2433 bp, Glycine max
  Clone ID: TF_GmC1123_1
ggctcgaggctatcccttatggacaaaggatgggtttcctctcaatctcttcttcctcccacacccgacaatactatgtttcctctcctcggattccccgtcaaactcagccgccccaccatggaactccaccatgataaccgcaaacttgtcgctgaagtcgacttcttctctcatactccgccacccaacatcgtcaagaaggaacttgatcaaacacctcttcacattaatactggtttacaactccttactgctaacaccaggagtgaccaatctaccgtggatgacgggctttcatcggatgcagaagataagcgagccaaaaccaccgagcttgcacagttgcaagtggagcttcaacgcatgaacgctgagaacaagaagctgaaagagatgctcagccatgtcaccggtaactacaccgccttgcagatgcatcttgtgacactaatgcaacagaaccagcagcgaacagaaagcacggaaaatggggttgctcagggaaaggtagaggataaaaacgttggtgttggtggagggaaggtaccaagacagttccttgatataggtcccagtggcacagcagaagtagatgatcaagtttcggattcttcttctgatgaaagaacacgatcgagcacacctcaggacaataacactgaagctggaacaagagatggagcgagaaataacaatggtaataaagcgagttgggtagggaagagagtccagactcagaatcacaaggttggggtcccaataagcttcagaaagtgaacccttccaatcctatggatcaatccactgcagaagccacaatgagaaaagctcgtgtctcagttcgtgcccgctcgaagcaccgcggcacataattaataataattagtatctattcaagtatcaacaatataagcaatatattgctgtggctaaagctcgatattaatttcgtggtattgttaatataggttcaacgttgtgctgatgatagaaccattttggttacaacatatgaaggcacgcataaccatccactgccacctgctgctatggccatggcatcaaccactacagctgctgctagcatgttgctttctggatcaatgtccagtgcagatggaataatgaacccaaatttgctagctagagcaattcttccttgctctacaagcatggcaacactctcagcttcagcaccattccccactgtgactttggaccatcacacacaacccataacccaattgcaatttcaaaaggcctggtgcccccattcccaagtacccttccttcaagcacagcctaagaactttgggtcaggagccgccccaattgcacaagcacaagcactttataatcaatcaaaattctctggtcttcatgttgtctcaggatgtaggatcttctcaattagcaccacaagctcctagaccacccttacaaccaagccaacagccctcacttgctgacacagtcagcgccgccgcctccgccatcaccgccgatccaaacttcaccgccgtgctcgccgccgccatcctcctccatcataggcagtgctcataattcaaacaacaacaacagcaacaacaacacaagccggactaccattagcagcttttcaggaaactgaacattttctttttgggttcaattttttggttaatattgttattattccttaaactttttatttttgtacatgggtactataagggaaaatgaaaccataaatgttcatattctttttagtccatgtcttgggagggatatatatgatatattagatcagaaaaaaatgcttttttgtatcaactttctctttgaataattaataatgttttatatttgatgcagaaaatacaccaaggagtaagtcaacaaatgaagacacacataaccatccactgccacctgctgctatggccatggcatcaaccactgcagctgctgctaccatgttgctgtctggatcaatgtccagtgcagatggagtaatgaaccccaatttgctagccagagcaattcttccttgctctacaagcatggcaacactttcagcttcagcaccattccccactgtgactttggacctcacacacaacccaaacccattgcaatttcaaaggcctggtgccccattccaagtacccttcctccaagcacagcctcagaattttgggtccggagccaccccaattgcacaagcactttataatcaatcaaaattctctggtcttcagttgtctcaggatgtaggatcttctcaattagcaccacaagctcccagaccacccttgcagccaagccaacatccctcactggctgacacggtcagcgccgccgcctctgccatcacttccgatccaaacttcaccgccgtgctcgctgccgccatctcctccatcattgggggagctcacaattcaa

SEQ ID NO: 29189 - DNA, 181 bp, Glycine max
  Clone ID: TF_5761350
tgataatcatgtatggaggaagtatggacaaaagggagttctgaattctgaatttcctaggagttacttcaggtgtggtcataagtatgatcaaggttgccttgcaaaaaaacaggtgcagcgggatcaagagaattcaaatatgtaccgaactacctacattggaattcacacatgcaat

SEQ ID NO: 29190 - DNA, 1898 bp, Glycine max
  unsure (1)..(1898): unsure at all n locations
  Clone ID: TF_GmC943_2
ggctcgagcttaggatttgacgtagaagagagcaggagtgaggctaagaaacccatttgaaatttgaaatctcgttctggctaattccatgttcattgtttactatacctcaccactccaagggtctcataaatttcttctgcttccaactctgctgcagaaaaagaaactgttggttctagatacaagtgggtttccagagtagaagtgaggctattgggcatgagataaacagcaagcaccatcatctacgacccttttgactatattataagcaacacaaaaatggagagtgacttgagctgggagcagaacacgctcataaatgagctaattcaggggatggaggtagcaaggaagttgaaagcagacttgaagatgccgtattcagttgactcaagagatttgcttgtgcagaggatattatcttcttctcgagccgcgctagccgaatcggctcgcactcgcccaatttgctcctttagcctcactcctgctctcttctacgtcaaatcctaagaaacccatttgaaatttgaaatctcgttctggctaattccatgttcattgtttactatacctcaccactccaagggtctcataaatttcttctgcttccaactctgctgcagaaaaagaaactgttggttctagatacaagtgggtttccagagtagaagtgaggctattgggcatgagataaacagcaagcaccatcatctacgacccttttgactatattataagcaacacaaaaatggagagtgacttgagctgggagcagaacacgctcataaatgagctaattcaggggatggaggtagcaaggaagttgaaggcagacttgaggatgccgtattcagttgactcaagagatttgcttgtgcagaggatattatcttcttatgaaaaggctctactgattctaagatgcaatgcatcatcaacttccgagttgcaggccatgagtcaagcaacaccaactttgctacccgagtccccattatctgtccatggaagtcctctgcgcgaggacgttgatgggaccatcaaggatcaccaagaagttaaacatgattcaaagaaaagaaaggcaacgcccaaatggatggatcatgtaagagtgagctgtgaaagtggtcttgaaggaccacatgaagatagctacaactggagaaaatatggtcagaaagacatccttggagccaaatatcccagaagttactataggtgcaccttccgcaacactcagggctgttgggcaacaaagcaagtgcagagatcagatgaagatcccacagtatttgacataacttacagaggcaagcatacctgttctcagggaaacaatgccgttctgccacctaagtcaccagaaaaacaagaaaaaccaacacacagtcataacattgatattcaccgtgcacaggcatctcaagaaagccttacaaagttcagaaacatcttgtctgtcaacacagataatctgaacaatggagatatggcatatcctttcactttcccttcaacttcatttggatgcatgaaacaagacaaccacagcttgattccttgggccctggagaacgagtccttcttaagcgacctataccaaacacaccttttatccacaacaataccagaatcaaactatttcccatctccaactttccagatgaatgtgtttgatgggatctacagcaagccacattcggaatccgatatcaatgagatcatttccaccaacacatcagcaaccaattctccaattcctgatttcaatttctcacttgatccagtggaaattgacccaaatttccctttcaataccccaggacttttctcctgattgcatttcactataaatgggatactantagcacatagtcttcctaaaa

SEQ ID NO: 29191 - DNA, 808 bp, Glycine max
  Clone ID: TF_GmC1687_1
gttggatgatggctacaagtggaggaagtacggacagaaagtggtaaagaacacacagcacccaagaagctactaccgttgcacccaagataactgtcgagtaaagaaacgcgtggagcgcttggcagaggatccaaggatggtgataaccacatatgaagggagacacgtgcactcgccatcaaatgaacttgaagactcgcaaaccccttttgaacttagtaatttcctgtggtagtagcatacaccatcataatgtttacatatatgtatattttaatatatcgtagagactagagatgaagaccgaataagtagagaggaatgagtaaaaattgccagtgtatcaaggaaatggtgcatgcatgctttggttcattgtcaattttcactcgtttccatctaatattcctcccattttcaccctttccaaaagcacaacatatatatgtggttgtgttttttagttttcaagcgtctagatcaacatttcagaagtgtacttaacagtcttggtggtgtttcataaaaactcaacagcaaattaaccagtaatatttgtaagttgcaaactgggttcaagcttttaattatttttttgcgcaccttggaaatgatgcatgcatgctttgtttggttcattgtcaattttcactcgtttccatccattcctcccattttcaccctttccaagagcacaataaatatacatatacagttgtgctttttttgcttctgtctgggtgtacggattaaaactaattaagaaactagtggcatttgtacgttgccctagttttatatattg

SEQ ID NO: 29192 - DNA, 1594 bp, Glycine max
  Clone ID: TF_GmC37350_1
ctcaccctcacccagacaaaaaccctaactttctctctcctctctcattctcactctctcacctcaatctctccgcgttttctcttcaaattctccagaattcgattcaaatttccttcaacacaattaacacagatcgcgttcttgttcgcacttcaaaattcgcgcgcgcacttcatgaatggaagacaaagacagagcagcctcctccgatccaaccgcagatgctgagttcgccggcgacacgagttggacactcgccgccgatgactccgacggcgcatacctgttccccggcgacagagagcggagcatactcagggaattcgtgtggaacctcgaaccggaccagccgaaccggatcggcaccgacgacggattgtggaagccggttcagtcctctctgaccgattcgattgaaccggtcgccgccgtgccgtcgcggtcgaacaaccaatcgatttcttccagctccagcgaggatccaccggagaaatccaccgtctccgacgataaaccgcttgagataccgagtaaacgtaaaaacaaggggcaaaagcgaatacggcagccacggtttgcatttatgaccaagacgtgaagttgatcatcttgaggatggctgcagatggcggaagtatggtcagaaggcagttaaaaatagtcctttccctaggagctactaccggtgcacaaacagcaaatgcacggtgaagaagagggttgaacggtcttccgaggacccaacaattgtgattaccacatatgaagggcaacactgtcatcacacagttggatttcctcgagggggaatcattagtcatgaagctgcatttgcgggccagttggctccaacaatgtcacagttttattatccgattcaattacccagcagagagaatgatgattataataataatactttgagcactatttctcagccatgccaagcacaggatgaaactggagaaggatcaagtgttatgatgccagctgatggatcgtcaccgtcacagccttccacggatgaagggttgcttggagatattgtacccccgggaatgcgcatcagatgagagaattatttgatgctgatgatcatgtggaagtggagcagagaaaatgcatgggcatgcatgcatctttattttctgcatactctgagcgagtaggccacaagtggcagcatttttttttcttttagcagcaagtcccttttagccatctattgtctcgagaagcgaatctagtattcatgcatgggtaccatactacttggtagcaggtaattatctaccttgaccttgagcagttgagctaagtgttatatatatcattcatttagtgatatatagttatatattatgtatgtatgtatgtatatagtttatattattttataagcgatagccaccgtgcataattaatgtatatttaacgcggtttagatttgccaaattctccttaagactgtacaatttgtatcaaacctaaactcctagaacactttcatgcatgttcattatttataatctatgtagaaatacataacttttgttttattttatatccagatttgacaaattttattttc

SEQ ID NO: 29193 - DNA, 1424 bp, Glycine max
  Clone ID: TF_GmC623_1
cccatataggctcgaggttttttaaactttcttaacgcaacaaacacatagccacatcttctctttctcttcccatggcattctgactcatacccaaattattgattgtttgtctatcgaatcagtgagaaaatggcagtggagctgatggggttcccccaaatggacgaacagaaggcaattgaagaagcagccgccgaaggcctcaagggcatggaacacctcctccgtctcctctcccatcaaccttcccacctccgcactcaccacaccgacgccaccgtttccaacttcaaaaaactcatctcccttctcaaccgccgcaccggccatgcccgtttccgccgcgcacccctcccttccacttccaactctctcgccccatcccctccactggctaacccggtcaccttcgccccttcgcagtcacagagtctaaccctcgatttctcaaaacctaacatgttcaacaccaccaacgccaaatccatggacctcgagttctctaaagaaaccttcagcgtctcctccaactcctccttcatgtcctccgctatcaccggcgacggtagcgtctccaatggcaaactaggatcctccctcttcctcactcctccgccagtctccgccggaaaacctcctctctcgtttgctccgatcaagaagaggtgccacgaccaccgcgagcactccgacgacatctccgggaaactctccggctccagcaagtgccactgcaccaagagaaggaagaatcgagtgaagaaaacggtaagagttccggtgatcagttcgaagatcgccgatattccgccggacgagtactcgtggaggaagtacgggcagaagccgatcaagggatcgccgtacccgagggggtattacaagtgcagtagcgttagagggtgtccggcgaggaaacacgtggagcgtgctccggacgatccgacgatgttgattgtgacatatgaaggggagcaccggcactcgatgcaggagaacatttccgggggagtgggtttgggattcgagtcaacgtgagggtggttgcaatgtaaatctgacattattaaaagaaaagattatattacaggggaatcttaatcttctcccaccaaagtcttcttattcaactttttgaaagtagtttggagccaagtgtgaattagaagggtagtttgtttagtgggaatggtaaaaggtcccaatccaagttgatgcctcggaatgggaaaaatggaatgacgtttaaactccattctcttcccttctttgcgatccacttaattgcgcacacaagcgtttcatttcgtcaagttaatatcttgcaaatcaaattttaaaactagtttcagttcttttttggtaaacccgagtagtaagtctaattaaaaatgtctaagggacatggttttttatccatt

SEQ ID NO: 29194 - DNA, 1317 bp, Glycine max
  unsure (1)..(1317): unsure at all n locations
  Clone ID: TF_GmC42427_2
ggccgggcccgggccatcctcaaaaaaaaaacaaaaaaaacaagacaccaaccaaagtttcagtttctctctattctaacgttgttgaatggcagtagatctggcaaatattaggatggaagagaatatggcgattcaagaagcagcttccgctgggttgaagagtatggagcatctgattcgcgtcctttcttctcaaatcccttctgcttcgtcttcttcttctaacgcacaccaccaccgtcttaatctcaaccaccttgactgcgcggaaatcaccgacttcactgtctccaagttcaaacaagtcatcaacttgttgaatcgcaccggccacgctcgctttcgtcgcgcaccttctcatccttctccttcaatttctccctctcaacctcaacctcagccacaaccacaaccacagacgctgactcttgattttgcaaaacctgttatggtaaagtcaaatcccaaccctaacccttcttctaccgatttgtcggtttctcaatattctaagaccaaggacacaaccacctttagtatatcccctcccatgtccaccaccacttcttccttcctgtcatccatcaccgccgacggcagcgtctctgacggcaagatcggccccgncatcctcgccggcggnaagnctcctctcntctcatcccaccggaaaaagtggtacgacgccactctctccgncggggaaagctcttcctccgctcactgccattgctccaagagaaggaaatctcgtgtgaaacgaatgatacgtgtgccggcgataagttcgaagattgccgatatcccagcggacgagtactcgtggagaaagtatggtcaaaaaccaatcaagggatcaccttacccacgagggtattataagtgcagtagcgtgagagggtgtccggcgaggaagcacgtggagcgagcccaggatgaccccaacatgctcatcgttacctacgagggagagcaccgtcatccgcaaccgcgtctgccggaaacttctgccggcgccgccgcggattttgtctctcagcctgtttaagcgagggaggagatcggcaaagcatggcaccgacagagatgagtgattttgcaattaacggggggaaagaaaaagaagggaacttcttgcaagcgagggaaagaaaagaaaaagaagccaagtcaacttttgctttgttgtggaccaaaagagtcgtctactggatggataaggacttttatgtaaatttgacaaaaaattatgaaatactatacttagacatgtttttttgttcttatttaatagacattcattcactctcgacc

SEQ ID NO: 29195 - DNA, 610 bp, Glycine max
  Clone ID: TF_GmC652_3
atccagcccctttgcatagttctgttgcagaggcctagaatcattgtgccaccaccaagtgaagtgaatctcttagatgatggatatcgatggcgcaaatatgggcagaaagttgtcaaaggcaacccatatccaaggagctattacaaatgcacgacccaaggttgcaaagttcggaagcatgttgagagggcttcaatggatcctaaagctgtcataacaacatacgaaggaaaacccaatcatgatgtgcctgcagctaagactaatagccacacacttgccaacaatagtgcatcccagctaaaagcacaaaagtttgccatacccgacgtgaaacatagttccagcagcaggggtgttactggcaatgagcagcgacctgtggcaagtctaagattgaaggaagagcagatcacatagctttcttagttcataactttaggcgtaaatagccaaattcgtctttgaaagtgtgatgggttgacaaattagtccttaaaagatgaaaattttaaatttaattcttgaatgtacaaaaaaaagtgtgataaattaatgcgccaaaaaaaaaaaaaaaaaaaaaaaaaaaagcggccgctctagagga

SEQ ID NO: 29196 - DNA, 846 bp, Glycine max
  Clone ID: TF_GmC581_2
aggattagtagagccccggattgtgatgcaaagttttatggattctgaaatacttggagatggctttcgctggaggaaatatgggcagaaggtggtgaagggcaatccatatcccagaagttactatagatgtactaatatcaaatgtaacgttcgcaaacatgtggagagagccatagatgacccaagatcgtttgtgactacatatgagggaaagcacaatcatgagatgccactcaagaacacaggaactgtagcatctgaaagagattcacaggcttctcttagtaaagataaagcatgattgacacttcaattagttagcaagtatgattcaatttcaatggcattggctgtcatcagaaataattcagaggatccattccttttatatcctaaagtatgctcagaataattgaagttgatcagaaagatcaagacattgacaatttcgaatgcagtacctagctactgagactaggatatttacttctacaacaacttgttgataataacagtattggtgctgataatttgtattatatatggaatcaagggcactggctcagtggcactgcccttcaataactttccatctctgctagctgcctttgtataccaaaccggtatattctattgtctatcatcatatataaattaatctggagtacataatatcatatgctaataatttttgttgtaaatcactggcatcgccagaaagaaccccaaaagacctttataaactattagctatggacataattttgtttcttaatgtaatttaatctgatttagtttgtactttcttgttcaatacgttatgatcagcgagcaacgagccat

SEQ ID NO: 29197 - DNA, 940 bp, Glycine max
  Clone ID: TF_GmC193_1
attactaatttgaggatagtgaagagaaagaaagaatggatgatagaaaggtatcggaggagcttgtgagagggcttgagtttgctaatcaacttcgacaagtgatgattaatggaaaagataatgagtcatcagcaacaacgacaaccccatttgttcaaagtcttgtcaagaacgtgttcagatccttcaccaacacccttttcctcttggacaagtatccctcttacgaggtttctcacactactaaatctgaggactctcaagaaagttgcaagggtttcaccactaggaacaaaagaggctactagtatatatgaagaagaaatacgcaagaatgggaggaggtgtcgaaaactccaaaagtagatggccaccaatggagaaagtatggccaaaaagagatcctgaaagccaaatactcaaggaactactacaggtgcactcacaagtatgatcagaattgtcaagcaacaaaacaagtgcaaagaattcaagaggatcctccattgtataagaccacctatttgagccaccacacatgcaatgacttgctaaactatgaaatcatacctgattccaataataattctccttcggacacttccatattgcttagctttaacaacacctttcctactccaaccaaacaagagtgcccctttttatcatcttttccctcaccaacatcagtgaagaaattagaggaggtgattccggcctcatcttcaaggcataataataatgtcactctgccactgcctgatccctgggatgttatgtctaattctgccatgtgtgattctgttggccttgatgatgtcaacctttttttggattttgatgactaattgggtctgcaaatttaaatttgtttttcaatttgataggagtgctcgatagctagctatttataaaaattttaaattaagtcaattaa

SEQ ID NO: 29198 - DNA, 566 bp, Glycine max
  Clone ID: TF_uC-gmflLIB3275P057f01b1
gccacgcttacgaccgactttttcgcatcagcgtacagatgctaacaagcgctcagaagacaccatgactacaaaggcagagccaaatatacaagggagtgtaaattcaacttatcaagggacaactgcaaactcgatgtctaagatggatccagagtcaagtcaggcaacagctgatcatctatcaggaacaagtgaaagcgaggaagtaggcgatcatgaaaccgaagtggatgagaaaaatgatgagcctgaccccaagacgagagctgttataattctgcacaaaagcagaagtctcgcacacagatccagcttgttcacataggactgtcactgagcctagaatcattgcgcatacaacaagtgaagatgatctcttggatgatgggtatagacggcgcaaatctgggcagacagttgtcaaaggcaacccttatactaggagctattacaagcgttcagccaagggttgcaaggagcggaagcacgtggagagggctcctacagactctagagctgtcataacaacatacgatggaaaacacactgatgaagcgctagca

SEQ ID NO: 29199 - DNA, 637 bp, Glycine max
  Clone ID: TF_GmC6090_3
aagtatggccagaaagtggtgaagggaacccttcatccaaggagttattacaaatgcactagtgctggatgcaacgtgcgtaagcatgttgagagagcttcgacggaccccaaagctgtcataaccacgtatgagggtaaacataatcatgatgtacctgctgctagaaacagcagccccaacacagctagtagcaattcaatgccattaaaaccgcataatgtcgtgccagagaagcatcctttgcttaaagataaggattttggaggtaatgaccaaagacctgtacatttgcgcttaaaagaagagcaaattatagtataaaattctggtgccacgctcacttattccacgtccaagtacagaatgaagagaatgaagttgcctagaagatgaaatggatatgaaggtgtagtcactactcatagttggcaatgtctattgttttctagtttttgtatgtaacaccttttgtacatctaaattatggaattggttgtataagatgttgtttacaggtatgaatatcatttcaactaatgtacgaacattactattatataatttataaaataatccttgtaagttgcaaaaaaaaaaaaaaaaaaaaaaaaaaaaaagcggccgctctagagga

SEQ ID NO: 29200 - DNA, 273 bp, Glycine max
  Clone ID: TF_LIB3242-509-P1-J1-A7
cgaacactgattgcccttttagaaaactttttgagagggcatctcatgatccaagtgctttttttacaagatatgggcgcaaacacaatcatgatgttccaactgcaaggaataattgccattacattgcaacaccagcgtgtgcaagtcaacatacaagaaataggcccgaaaaaagagataccatcagccttaaccttgggattggattcagcccacctactaataacacaccaaacattcaatgtagaactactccttctcaacctgaat

SEQ ID NO: 29201 - DNA, 769 bp, Glycine max
  unsure (1)..(769): unsure at all n locations
  Clone ID: TF_GmC1278_2
gttcaaaccggatggagttttccagaaactgctaaacaggatggttttgcttcaagaataagtatgagcatggtgaaaactgaaaccacttctgccatgcagagtttgacccctgagaataataaccacaggaatggttttcaatcagatcataaaaactaccaaccacaacaagttcagaccttgagcagaagatcagatgatgggtacaattggaggaaatatgggcaaaagcaagtgaaaggaagtgaaaatccaagaagctactacaagtgcacataccccaattgtccaacaaagaaaaaagttgagaaatccttagatggacaaattaccgagatagtttacaaaggcactcataaccatcccaagcctcaagctgccaagaggaactcattgtctgcctcatcatcacttgcaattcctcattcaaatcatggcagcaatgaactaccacatcatcaaatggattcggttgccactcctgaaaattcatcaatttcaatggatgatgatgattttgatcatactaaatcaggaggagatgagtttgataatgatgaacctgatgccaaaagatggagaatagaaggtgaaaatganggtatatcagctgtaggaagtagaacagtgagagacccagagttgtggttcagacaaccagtgacatcgatattctagatgatggatacaggntggaggaaatatggacagaaaagtggtcaggggaaatccaaatccaaggagttactacaagtgcacattccca

SEQ ID NO: 29202 - DNA, 934 bp, Glycine max
  Clone ID: TF_GmC1308_1
aatccccactctctcacgttaataatgttgttatccgttttcgctgttacgaaccacctttactttattataaccctttgactgttgactacatcactcagcgcatgttagcaacagcggcgcatcgtactgttttaaattttattttgttttttcaggaagaatcgtgtgaagaaaacggttagagttccggcgattagttcgaaggtcgccgatattccgccggatgagtactcgtggaggaagtacggacagaagccgatcaagggatcaccgtacccgaggtgagtggtttgtggccgttgatttggtgttggctttggtcaaaggtgtgttaactgacgttgatttgttttgtgttctcagggggtattacaagtgcagtaccgtgagagggtgcccggcgaggaaacacgtggagcgtgcttcggacgatccgacgatgttgattgtaacgtacgagggggagcaccgacactcgattcagaccgcgatgcaggagaacatttccgggggagtgggtttggtattcgagtcaacgtgagtgtggaattaaagaaaggggaactgttggggggctttttttttgtagtaggaaaaaaaaaagaggtgaataggaaaattgaattaaggtggtggttgcaatgtaaatctgaccttattgaaagaaaatattattgtgctgttattatattattacagggtatcttaatcttctcccacaaaagtcttcttacctgattattttattcaagattttgaaagtagtttgggtcattgatgatgaaattttgtgattggagccaagtgtgatatagggtcgcgcaattagaaatggtaggtagtttgttttgtatagtgggaatggtaaagggtccctatccaagttgatgcctcgtaatggaaaaaatgaaatgacgtttcaactcaaaaa

SEQ ID NO: 29203 - DNA, 520 bp, Glycine max
  Clone ID: TF_GmC5674_3
aattcggctcgagacggctgcgagaagacgacagaagggctggtaaatgatgggtatcgctggcgcaaatatgggcagaagctagttaaagggaatacaaacccaagaagttattatcgatgctcgaatcctggatgccctgtcaaaaagcatgtggaaagggcctcttatgattcaaaaactgtaataactacctatgagggacagcatgatcatgaaattccccctggaaggactgtcactcagaatgcagctacaaatactcgcacaacggccactaatggcaaggcaggaaccaaatctgagggtaatactgatgatacaggggagcgaagcggcttgggcttaacaagtagattaacagagcaacaaactggcaagtcgactactaagtcaaaggctggtgatatggttgagtttcgtgtgatcaggctttctaatgagggtcctgaaattaaattaagtgagcaacaacaacaaaaggataactcagctactaaagatgattctgtcagcaatg

SEQ ID NO: 29204 - DNA, 2218 bp, Glycine max
  Clone ID: TF_GmC652_1
ttttgtgtgtgtcagagaggaaaaaaaatgaaaacatagcatttggttgggcaacttaagtcgtggactttttgccagtttttcttcaatcagatccaccaaacccatcacacaaaatcacgtaagattgtacctcccaactcaaaagcttcaaactttttccagtttccaaattaattaagacacagagagaaaaaccacaaaaaagctgcaaaattttcttcttttgtcacttttttttctgttttttcatcacaaaagtttgaaccttttctttccttccattgaatttggatggctggcggcggaggtggggaccggccgccgtggaaggaggcggcgccgccacgacccaccatcactctgccgccgcggtcgggttccatggagtcccttttcaatggaggattcagccctggtcccatgactctgctttctggctttttgggtgatggggatgatggaaagtccttctctcagctcctcgctggagctatgtcttctccggtggccggagctgtcgccgccggcgtgatggactcacctggtctcttttcatcttctcaggtgtcttttggaatgacacaccagcaggccctagcacaggtctcagctcaggcttcacaagccaactccaatatgcatatccaagccgaacattcattgacacaggctcctgcagctgcttccaatacaactcaacagctgatgccacctctaacttctgactcttgggctgcaatgactgaatccattgatcattctcactcagaacaaagattgcaatcatcattgttgaatgttgataagcctgcagatgatggctacaactggaggaagtatgggcagaaacaggtcaagggtagtgagtttcctcgaagttattacaagtgcacgaatccaaactgtcctgtcaagaaaaaggtcgagcgctcgcttgagggtcatgtaactgcaattatttataaaggagaacacaaccatcaatgtcctcatcctaacaagtgctcaaaagacaccatgacttcaaatgaaaattcaaatatgcaagggaatgtagattcaacgtatcaagggacgagtacaaactcaatgtctaagatggatccagagtcaagtcaggcaacagctgatcgtctatcaggaacaagtgacagcgaggaagtagccgatcatgaaactgaagtggatgagaaaaatgttgagcctgagcccaagaggagaaaagcagaagtctccagtcagatccagcttcttcacataggactgtcactgagcctcgaatcattgtgcaaacaacaagtgaagttgatctcttggatgatgggtatagatggcgaaaatatgggcagaaagttgtcaaaggcaacccttatcctaggagctattacaaatgtacaacgcaaggttgcaatgtgcggaagcacgtggagaggacatatgaaggaaaacacaatcatgatgtgccagcagctaagactaacagccacactatggccagcaatactgcatcacagttaaaatcacataacaccaatcccgagaagcataattttggcagcagaggtatgggaggaaatgaacaacagccggtcgcacggcttcagttgaaggaagagcagatcacctagttttctggaagaaacatcttagtgaggaagaatttttctcacctcacaagtcatctttatttagatgctatcgcattcttttttagtcttaggcctaagttttgataggggcctatcagtgcaaaccctaataaacaaatagtttaacactgatgaaagaggtaagggcaaaaggtttaaacaaaagtttgaacaatgaacgcaggttttggatgatgatgtactattagtaccttttgtgtacattgaaagtgtaagttatgttgtctaatatagttgttcatcatgttattccttgctaaaaaaaaaaaaaaaaaactttattaatatacatatattaagtatatgtgccatcaaatgctgcaactgagtggtaaaaaaaaaaaaaaaaaaaaaaaaaaaaaaactcgagactagttctcctcgtgccgaattgttttcaacgaaattttggatcatgaataactttaggcgtaagtagccttcgtctttgaaagtgtgatgggttgacaaattagtccttaaaagatgaagattttaaatttaattccccaatggccaaaaaaaagtgtgataaattaatgcgc

SEQ ID NO: 29205 - DNA, 445 bp, Glycine max
  Clone ID: TF_8282706
ccagtggaggaaatatggacagaagatagcaaaaggaaatccatgtccaagagcatactatcgttgcacacttgctccagcatgcccggttaggaaacaggtgcaaagatgtgctgatgacatgtccatcttaatcaccacatatgaaggaactcacaaccacccaattccagcttcagccacagccatggcttccaccacttctgctgctgtttccatgttgttgtcaggctcttcaacatctcagcctacagatcacagttttgcctatcatgcaaattctcctacactgttcagtggtgtcaatttcagtcttttagaccaaccaagagcaaaccaagtcttgttaccaaccccttcctcacatttactcccaacaatcactctagaccttacttctactccatcctattcattaaatcaagggaattgtttaccatcaaac

SEQ ID NO: 29206 - DNA, 665 bp, Glycine max
  Clone ID: TF_GmC125700_1
actttcatcagctcccggtctaaagatcagttttgagttattcttcactttcttgaaaccaacaggaagtgggtatagtatttccttctatatcattttcaaagtgtgttccacatgcactttttgtaggattataatttgtggttaatattaagtccgcacaactagttgtcacaatttttatgggtttaaccatgatttagcagttctaatcaggttttgaaatgcaacccaaactctcaaattttttaacatagacgaacaatttttagaagtgtcgtgtttctttagcattttaaaaaagcaatgacaattgtatcaataatgcttttgttctgaactggtatattgggtatctgccaatgaccaattcctctggtctaactgcaactcttcttctgctggttacacttgtcaagttgtctcttctcctactggttacactttttttagatgtttatttgctctctctgtccctctatgctgagcttacatggatacagtgttcacaaatgttctaaattaatttgactgcattgtctctccactcttccagaagttattatcgatgctcgaatcctggatgccctgtcaaaaagcatgtggaaagggcctcttatgattcagaaactgtaataactacctatgagggacagcatgatcat

SEQ ID NO: 29207 - DNA, 1678 bp, Glycine max
  Clone ID: TF_GmC1330_1
aaaccgcgcgtttcttttccctcttaacctcttcttcttactctcttacgttaattcttcgttgtctatgatggcattggatatgattgatgttgttcccaggacgaggatggaagaagaaaatatagcaatacaagaagcagcttccgctgggttaaagagcatggagcatctcattcgtctcctttctccttcttcttctcttcacaacaaccttaataatctcaatctcaaccacctcgactgctccgaaatcaccggcttcactgtctccaagttcaaacaagtcatcaaccttctcaaccgcaccggccacgcccgcttccgccgctctccaccccaagcccaagcccaagcccaaactaatcctcaaccacaacctcagatccaacaacaagggttcagtttagatttcgtgaagcccaccattctaaactcaaagcccatcaacaaagacgaaactttgactctttcaacaacctcttcttccttcatgtcctccgtcaccaacgacgccagcgtctccgacggcaagatcggacctttcctccctccctccgccgccaaaccccctctctcctccgcccaccggaaaaagtgccgcgacgccgccgcagcactctccgccaaaccctcctgccactgctccaagaaaaggaaatcacgcgtgaaacgaacgattcgggtgccggcgataagctcaaagatcgcagatatcccaccggacgagtattcgtggagaaaatacggtcaaaaaccgatcaagggctcaccttaccctcgagggtactacaagtgcagcaccgtgagagggtgtccggcgaggaagcacgtggagcgagcgcaggatgaccccaagatgctaatagtgacttacgagggtgagcaccgtcacgtgctgccgttaacttccgctgccggcgttagtttcggccattgagttaatcgacggcgtcttttggaaacttggcgggggacgttaaatgagcgtcggatcgtgaagtaacggcggatgcgaacaaggatcgattcggttcgaggacggaaaaagaaaagtggcaactaaagtcaactttcgcgttgtggaatgattttgttgacgaggacttttgtgtaaatttgaccccaagtaaagtagtgcaggtctcaaagaatgaaaattatagtgatctcatctgtttttctttatttctatttttttttaaaaagagacatttatttatttatttatttgatgttagagttgaattggttgaaggatggggctgcaataattttcttggtagaagaataaaaaaatattaatattgggagatctaagttgaaagattagattctttttgttgaaagaaaggacggtgtttgggggcaaaaagtcaaagtatgagggccccacagagaagcatgtggagttggaataataatgataactttagcattgagtaatggaaagtaggggggaagggaaggaacaggtcaatggttgttatggcgagtgggtcccactgcgtgttgttacttcaaaattcaaatatctctttctctctggtctctaatctctaatctctttgactggggtgcgtgtctccaattaagttacgtaacctaacctaactaacattgatgccaaggttgacgggttgaggccatataatagtagaattaaaattttatgaaa

SEQ ID NO: 29208 - DNA, 2249 bp, Glycine max
  Clone ID: TF_GmC5674_1
cgctttgccttgattttgaatcgtcaaataaataacgagtgttctaggtggactctctcccattgcttccttccacccaaacccacaacaacatatacgacatcttctgcaacacaacaactaaacattgttttgtttactcaactcgcactttcccttctccaatttcgaggtctcaattccggctttgaacagccacaagcacgcattgcttgttcaaggttcaatccatcattcaagacattcatggaagcagttaatgaaactagacctgtttccttctgatatacataaaaagggttcacatggtttcttcagacaaaagtgcggatcaaaatatcccttctgataaattgcagcagagagtgagtcttgatagtgatactacattgtcacaaggtcatgatactaaaaatgatctgtccaaaccagaggaagcaagtattctttctattgtagttaaaaatgaagaagggaaggattctgatgctattgcttgtgccttggaatcagatcaagaaggaagcacatgctctttaccacttgagaaacctttgcagaaccctgatactctttcgcatgagttgcctcgattgcagtccagtcaggaatttccctctataatacgcgaaaaggtatcaaaagatggctataactggcgaaaatatggtcagaaacatgttaaggggaatgaatttataaggagctattacaagtgcacacatccaaactgcctggcaaaaaagcaattgcagcagtcaaataatgggcatatcacagattccatttgtatcggtcagcataatcatcctagacctcaattgaactccacagtatcagttgagtgtgttctgcctgttgttgaacaagcaccacacaaatcctctttagccactgttgaagacaaagcatccgttgagcatggatgtatgcctcaacagatccagcctttacaatcctttccgcctgcaaaagtttccccagttaataagttgaatgcttcacatttatcattgactaaggcaaagaaccaggttcatgacaacgaggaacccgagtcaaagcggctgaagaaagacaatactaatcctgatgtcactagagttgacatgtcaactcgtgaatctcgtgttgttgttcaaacttcaagtgaggttgatttggtaaatgatgggtatcgctggaggaaatatgggcagaagctagttaaagggaatacaaacccaagaagttattatcgatgctcgaatcctggatgccctgtcaaaaagcatgtggaaagggcctctcatgattcaaaagttgtaataactacctatgagggacagcatgatcatgaaatcccccctggaaggaccgtcactcagaatgcagctacaaatgctcgcacaacggccagtaatggcaaggctggaaccaaatctgagggtaatattactgatgatacaggggaacgaagcggcttgggctcagcaagcagattaacagagcaactaaatggcgagtcaattactaagtcaaaggctggtgatatggttgagttttgtgtgatcagcctttctaatgagggtcctgaaattaaattaagtgagcaacaacaacaaaaagataattcagctactaaagacgattctgtcagcaatgatgttataagccattcaagttctggagttctgtgtagatcaaatgaacagctgaaaggtgaggtaaaacctatatcagaaggaagtaaggattgccttaatgtggttgccgtgcatgatactcgtagtacagaaagtgaatttaacaagcaatcaacagctgatgcagaacccgtccaaagctaaatttgcaatatttttcaaaggtgctgctagttacagaagagtataaatatttgacaatgacacaggctttacagatatactgtgtgattataattcctatttctactctaaccgtcactttactcttctagctctctccttgtctttgagcaggttgactaaatatgcaaattacaattaatactacattggatatcataacttgtataccattattatttgagttaaataagatttacattttcgtacacatgtatctaaaattctaatgtattgttgaacatactaagctatttgcatgtaattcttgttttgcctactaatgctttaatcttcctctcttcatgtaaatttagaaaatgcgttgcagaattgcagtaattgagtacagcaaaagttattccataaaaaaaaaaaaga

SEQ ID NO: 29209 - DNA, 3102 bp, Glycine max
  Clone ID: TF_GmC666_1
cccacttcgtccgcccacgcgtccggggggggtggagttgaggagtagtatacatagcagcagcacacacggggagagagaaaggaagacaagagagaatgacagagaaaacgtttaaaatgaaaacccaatgacccaacacagattcacaattcagtttcagagagagagagagagagagagatccactcttacaagtcaaactatgtctcactctctacattcacatttcacacacacacacccttcccctgaaatgacccttttgcccttctctctcggccttcatcttcttcttctcctttgactcaacaaccccccctctctctctttcacacagagagacactttctctctctacaccgcaatggacgccggcgaagccctctccgacgatccgaatcggcccaattccgccgccgacgcagctccggcccccgcgggagcaaggtacaagctcctgtcgccggctaagctcccgatctcccgctccccgtgcgtcacgatttcgccggggctcagtccgacgtcgtttctcgagtcgccggtgctgctctccaacatgaaggtggaaccttcaccgactacagggtcgctttctttgcttcatcaaacagcatatggttccatgacttctgctgcatctgctacatttcctgtaaccactgtgtgcttcaatagcacacgcaatacgtaacgatgatgagaattcggctcgaggaaaacctagcttctttgagtttaaaccacacaatagatcaaatatggttcccgcagactttgacaaccatgcaagtgaaaaatctactcaaatagatggtcaaggaaaagctcaagcttttgattcatcaccattagtaaaaaatgagtcagcatccccttcaaatgaattaagtctatcatcacctgttcaaatggattgctcaggaggtagtgcccgtgttgaaggtgatttggatgaattgaaccctagaagcaacataacaactgggcttcaagcatcacaagttgacaatagaggtagtggactttccgttgcagctgatagagtatctgatgatggatacaactggagaaaatatgggcaaaaacatgttaaaggaagtgaatttccacgcagttattacaaatgtacacatcctaattgtgaagtcaagaaactatttgaacgctctcatgatgggcagatcactgagataatttacaagggaacacatgatcatcctaaacctcaaccaaaccgccgttactctgctggaactattatgtctgtgcaagaagagagatctgataaagtttctttgaccagccgagatggcaatggatcctatatgtgtggccaggggtctcacctggctgagcctgacagtcaaccagagctatcgcctgtagcaacaaatgatggtgatctagatggtttgggggttttgtcaaaccggaataatgatgaggttgatgatgatgatcccttctcaaagcgaagaaaaatggaccttggaattgctgacatcactcctgtagttaagcctatccgggagccacgggttgttgtacaaactctgagtgaggttgatatcttggatgatggctaccgctggcgcaagtatgggcagaaggtggtgagaggcaatcctaaccctaggagttattacaaatgcacgaacactggttgccctgttagaaaacatgtggagagggcatctcatgatccaaaagctgtgattaccacatatgaggggaagcacaatcatgatgttccaactgcaaggaatagttgccatgacatggcaggaccagcaagtgcaagtggacagacaagaattaggcccgaagaaagtgataccatcagccttgaccttgggatgggaattagcccagctgctgaaaacacaccaaacagtcaagggagaatgatgctttctgaatttggggatagtcaaactcacaccagcaattccaatttcaattttgttcatactacgacagtgccggggtactttggtgtgctaaataacaactctaacccatatggttctagagaaaatccaagtgatggtccatctttaaaccattctgcttatccttgccctcagaacatagggagaatactaatgggtccttaaaattgtttgtacaacaaaaaactaaataaaatgaaattctgagttccattttgctttttcttttttggcgggtaaagctttaaaagcatagctcctcattttctctttggaaatgctgatagttcttttatgttcatatccttatatgatgagagctgctctttagcagaattagctgtagctgtgccccttcaggttgactcttaattctaattgctgtttgtataattatatacagattcttctgtacaaatatgaagcttataccaaagttgcttcaacaaaaaatcttgtaaaagtgtttggtggattcaactatttataagtagtttctagcctgttctcaaaatcatgaattttaaccctgagaattgctgtaaattcacggcagccagagttgcacacccctaagtaaaagggatgctttctcaatttggggatagtcaaattcacaccagcaattccaatttcaagttcgttcataccacgaccgcgccggggtactttggtgttctaaataacaactctaacccatatggttctaaagaaaatccaagtgatggtccatctttaaaccattctgcttatccttgccctcagaacatagggagaatactaatgggtccttgaaattgtttgtaaaacaaaaaattaaataaaatgaaattctgagttccattttgcctttttttttggcgggtaaagctttaaaggcatagctcctcattttctcttcggaaatgctgatagttcttttatgttcatatctttatatgataagagctgctctttagcagaattagcagtagctgtgccccttcaggttgactcttaaatctaattgatgtttgtataatttatatacagatttcttctgtacaaatatgaagcttataccaaagttgcttcaacaaaaaaccttgtaaaagtgtttggattcaactatttataagaagtagcttttagcctgttaaaaaaa

SEQ ID NO: 29210 - DNA, 574 bp, Glycine max
  Clone ID: TF_uC-gmroLIB3258097f09a1
gacaattagtaaatttgggtagggtattatagtattaacaatggatagagtctcaatatgttactattatacttgttttcacacacgcatttgaaaaaaacataaagatccctacctatatatagcaacatagttatcaactttaacctggctcctcctacttgacggtatctctatactggtggtacctgtacctgctactgcacttgacttaaatgactcattacagagtcagtgattaacatgatccgcagaaaaacttgttcactgggcagcttggggcatatgaacacttgaagtaagccctaggagaagggttatctctggtgacttttttaccatattttctccactgatatctgtccctcacatacagcaaaaatatccttgctcagattgatgccacaagatgccttgctaattcctcctcgagttatgtgcaaaattttatcaaatacatctggatgaccatagtggaatcgcaccctgtattgcccaagaaggcaagaaccataactgatatataaaaatgggtagcgccaaactggctttggaagatcagagagcaacgtga

SEQ ID NO: 29211 - DNA, 572 bp, Glycine max
  Clone ID: TF_GmC565008_1
gttcaacttcaaagtagctagctagctcccatgatggatcaagaggtagaaacgcttgaagcgaagctgcaacgtgtgaaggaggataatcgtacccttagagagatgctggaaactctgagcagcaaatgcgagaagcttcagtctcatcttcaagagatcaataatgaagaacaagaagtgagcacaaaatcagaccaaagtggatcagtattattagctagagccgagtttcccatagcacaaaagccatcacaaatctttgttaaaacccaccccaaggacaatagtttggtatgccgtatgcctattaattaattacttgtgattaatgctcaaatactgtcaggaacttcatacatttcacacaaattttaattccattgggaatatatatagatggtaaaagatggttatcagtgcaagaagtatggacagaagaaggttaccaaagacaatccctcgcctagagcttattacaagtgctacctggctcctagctgccccgtcaagaaaagggtgcaaagaagcttacaggataagtctttccttgttgcaacttatgaaggaaa

SEQ ID NO: 29212 - DNA, 1912 bp, Glycine max
  Clone ID: TF_GmC3118_2
gaccgtgagaataaaatgatgccaatcaattctatatctgttccactactagcaaactgtttcagacaagttgaaccggtgtactagcaaatacacacgaactgttccactacaaacctacgtgggggaagaaaaacaataacaagaaaggataaacatggggagcaatgaaattacaagagacctgccaattaatttagcaaggcttaatttcaaaacctatgctcagaagtgttcgagctgactccattgctttctcacctccaagctctagcgcttccccggtcagttctccttcggtgtccactgaccattgagtagaaattttcttgttttgtggggagtcaggtttcttcacctgcaaactgttcatggaggcaggtgctgcagcagccacaagaggagcacttggtggcccatgtcgtttcttggggactggcatgtcatggtcatgtacacccttgtatgttatgatgacggcatctgagttatctactgcggtctcaatgtgctttctgacaggacatccagcagaagtgcatctgtagtagttcctgggatgtggatttcctttcaccattttctgcccatacttgcgccatcggtaaccatcagcagatatccccacatctccggctgcatgtacaacaaacttggatttttttccaggttttactggagaatccatgtctgttaagtcacctttcttcattcttttttttggtactggctcatttacatgttcctctttcaaaataactttaccattaccactgatattagatgtgttttgtcgtttcttatcagtgctgcagggtgcttcttgtagagattcttttgaagaaatggatggatcagcatccttcagaactttgataggctgctccggaacactgttttctacaatgggttcactggaagacagaaacttattttccctaatggaattagtcttccgtggaggatcatgactgtgctcacttttatatacaatctctatcacatgacctgaatcatcacagcattcaatcttcttagcacaacaatctgaatgagtacacctgtaatagcttcgagaacctgtaggactcttcacttgcttctgaccatacttccgccagttgtatccgtcagatgctgatgtccttgcaacagaaacagcagataacgttttgcgaccagaaggatttttcctatctacttctggcacatgtgtgttattgacctttggagtagatattttctgtttttgtacggttggactagaaacaattgataaagattgtgtaacagaagttggtgatagatcagacaatggaattgaacacacagacacctgaagccgattttctgtctgagtttggagtggctgcactgctcctctttcaatagtttccttttcaggagattcaactgtctccttactttcggctttgccacccgaattcggagcagtagagctcccttgcaaatcgtcactccgatgctgcacagcaagggtttcaaccgaagaggtaacaccagcgcctagggtttctaaattggagtccgaacaaggtttgtcggagctccgtaactcgcggtgccgcgactcggcgtcggacagcgattccacaactcgttctgtttccttggtgagttgcgtttttgggtgagaatcgtttcctatggtgtctgactctgggagaggttggggtccatggcgctggtccatggcgcagtagcgcagggagagagagggtgaaggtttggagaggctgtgctttttatggtgtccaaaggagaaacgtttgggatttggcgaaacgccagcgtttgtgtgtgagtgtgtgagagtttgctggggaggggtgtgtgtctctgaccagcattgactcaggtgcctcttttcttaaggccctcgagccgaatt

SEQ ID NO: 29213 - DNA, 620 bp, Glycine max
  Clone ID: TF_GmC362_3
ggggtgaagagcactgtgagagtgccggcgattagttcaaaagtcgccgatattccaccggacgagtactcgtggaggaagtacggtcagaaaccgatcaagggttccccatacccaaggtgagtgatatttaattttgaccgttgatttagttgacttttatctcatcaagactcgttccctgacgtcgattttttttatcatcaggggttactacaagtgcagcacgattagagggtgcccagcgaggaagcacgtggagcgcgcaccagacgatcctgcaatgctgatagtgacgtacgagggggagcacaggcacgcggttcaggctgcgatgcaggagaacccagccggggtggtggggttggtgttcgagtcaacgtagagaatgagaaagaaggtccaataaaaaaataataataaatttggaagtggaggacttttttaaaaaatatatatatataatttttggaaagtgtagtgggaagaaccaagaagtaaggacaatggctgccttgtaaatttgttttatttttatctttattattattgttatattttagttgtcatagactcgtagagaggtgaaaaatggaatctcaagttgtttatttatttct

SEQ ID NO: 29214 - DNA, 963 bp, Glycine max
  Clone ID: TF_GmC6782_1
tgtcgagccgattcggctcgagaagaccaaagaaaaaaccaaaatcatcgtgtggtttttcaaggaccaaattcaaatcagtcataaaaagggggggtatggaaggaggagagagaggtgttaatcccaataattatgagctccaagtttcattcgcaaacacccctcaagccatccatgaaatgggttttgttcaatttgaagaaaaccaggttcttagcttcttggcaccctctgctcaatcccaatcttctcagctctctcaatctctaaacgcctgcaacggtggcagcaatactgctgttgctgccgctaccacaaccgccaccgccaccacctccggatccggagcaacaattggtttcagccataatgaccttgtatccagaacttgttggtataataatgaacaggtgcgaacactggatcccaaagctgtcaatgatgaaaattgcaccggaaatactagtgatggtggcaacaactcatggtggagaagtgctggctcagagaagaacacgatgaaagtgaggaggaagctgagggagccacggttttgtttcggaattcggctcgaggtagatgtgcttgatgatggttataaatggaggaagtatggtcagaaagttgtcaagaatagccttcacccaagaagctactaccgctgtacccataacaactgtagggtgaagaaaagagttgaacgactctctgaagattgtcgtatggtaataactacctatgaaggcagacacaaccactctccttgtgatgactcaaattcatcggaacatgaatgtttcacctctttttgaacaatgtcgtttcaataattattatgtattattaataattaattagctgtacgtgacattttcatgaaggatattgcattgtacttatattgttactatttgttattgagctcagtcactctttcatggtataaaaaaaaccaaaccc

SEQ ID NO: 29215 - DNA, 1285 bp, Glycine max
  Clone ID: TF_GmC244_1
aaaataccctgttcagtgtgttacatacactttgacggaaagggttagctagcgtgacagtgcattcacctagtggaccaaacaagccactgcactatcttgtttttatatttattttcttttgcatcatttgaccggggtaataccctatgaccctcctctttattttctttaacacctcctcctctttcttttctcagcaagtatggccgtggaattcatgatggggtacaggaacgacactttcgcggaggataatgcggttcgtgaagctgcgtcggggctagagagcgtcgagaaactcatcaagttgctgtcgcatactcaacaacaataccagacaacctcaaagtcttccatggaaaacatcgacaccgactacacagctgtcgctgacgtcgcggtttctaagttcaagaaggtcatttcgcttctgggccgcaccagaaccggtcacgcgcgttttagaagagcccctgtgcctgtgcctgtgcctgtggcttcacctccaccttcggaaccgagagtctaccgtgctacgccgctgcagcagatcccgccacccacccttcacactcactctgtcactgaccactctctgatccccaaaattgagagaaaggactcttccaagaccattaatttctcctattcaaattcgtttgtctcctccctcaccgctggcgataccgacactaaacaaccgtgctcgtcgtcgccgtcgccggccacggcttttcagatcacgaatctctctcaggtctcctccgccggaaagcctcctctttcgtcctcttcgttgaagaggaagtgtagctctgagaacttgggttctgctaagtgtggcagttcctctagccgatgccattgttcaaagaagagcagaaaaatgaggcagaagagggtggtgagggtaccggcaataagcttgaagatggctgatattccaccagacgattattcttggaggaaatacggacagaaacccattaaaggatccccccatccaagaggttattacaagtgcagcagtgttagagggtgtccagcgcgcaaacacgtagagagggctctggatgatccatctatgttggtagtcacctatgaaggagagcacaatcatacactctctgcagccgaagctactaatctcatcctagaatcctcttaactaattaatcatcgttttcccatcacaaagtatgttctgatcatgtcattcatggcttgtacaattgaaatttttaatcgagcagagctttatctcgaaggagattaattgaaa

SEQ ID NO: 29216 - DNA, 2031 bp, Glycine max
  Clone ID: TF_GmC1123_2
caataggatccattcacccatttttctctctcagatttcatttttcttcttcttcttctctctcttctttgtgcttattgtattttatggacaaaggatggggactcacccttgatacctcttcctctcaatctcttccattattcccttccaacgataataagatgtttcctctcctcggattccccgtcaacctcagccgcgcctccaaggaagacgatgaaaaccgcaaagttgtcggtgaagttgacttcttctctgacagaaacaaacctacacctccaccctctcacgaccacaacgttaaacccaacatcgtcaagaaggaaatcgatgaaacacctcttcacattaatactggtttacaactccttactgctaacaccgggagtgaccaatctaccgtggatgacggggtttcatctgatgcagaaaataagcgagccaaaaccactgagcttgcacagttgcagtggagcttcaacgcatgaactctgagaacaagaagctgaaagagatgctcagccatgtgaccggtaactacaccgccttgcagatgcatcttgtcacattaatgcaacagaaccagcagcgaacagaaagcacggaaaatgaggtggctcgagggaaaagtagaggatagaaagcatggtgttgtaggaatggtgcctcctagacaattcctggatttagttccgagtggtacgaccgaaatagatgatcaagtatcgaattcttctttgggtgaaaggactcgatcaaccacacctcccagctgcaataaaaatgatgataaggataagaaagagactactgatcgtccacactctggcaaattattgaaccatacgacggatccatccactagtccggaagccgctatgagaaaagctcgtgtctcagttcgtgcccgatcagaagcacccatgatcagtgatgggtgccaatggcgaaaatatggacaaaaaatggctaaggggaatccatgccctcgagcatactacagatgcactatggcagttggttgcccagttcgcaaacaagttcaacgttgtgctgatgatagaacaattttggtgacaacatatgaaggcacacataaccatccactgccaccagctgcagtggttgatgccatggccatagcagcaggtggcagtggatggttatggcatcaaccactgcagctgctgctaccatgttgctgtctggatcaatgtccagtgcagatggagtaatgaaccccaatttgctagccagagcaattcttccttgctctacaagcatggcaacactttcagcttcagcaccattccccactgtgactttggacctcacacacaacccaaaaccattgcaatttcaaagggcctggtgccccattccaagtacccttcctccaagcacagcctcagaattttgggtccggagccaccccaattgcacaagcactttataatcaatcaaaattctctggtcttcagttgtctcaggatgtaggatcttctcaattagcaccacaagctcccagaccacccttgcagccaagccaacatccctcactggctgacacggtcagcgccgccgcctctgccatcacttccgatccaaacttcaccgccgtgctcgctgccgccatctcctccatcattgggggagctcacaattcaaacaacaacaacaataacaacagcaacaacaacacgagcaggactactattagcagcttttcaggaaactgaacattttctttttggttccattaactttgtatttttgtacttgggtactataagggaaaatgaaaccataaatgttcatattctttttagtccatgtattgggagggatatatcatatattagatcagaaaaaaaatgtttcatttttttgtatcatcaatttctctttgaataatgttgtatatttgattcaaaaattctcttgggagtaaatagacaagggcaaatgaagaaagaatcgtctatctttattttttcttcctttgtctcgtgtttatctttaattttt

SEQ ID NO: 29217 - DNA, 1033 bp, Glycine max
  Clone ID: TF_GmC1123_3
tggaaaggtaccaaggcaattccttgatataggtcccagtggcacagcagaagtagatgatcaagtatctgattcttcttctgatgaaagaacacgatcgagcacgcctcaggacaataacactgaagctggaacaagagatggagcgagaaataacaatggtaataaaagcgagttgggtagggaagagagtccagactcagaatcacaaggttggggtcccaataagcttcagaaagtgaacccttccaatcctatggatcaatccactgcagaagccacaatgagaaaagctcgtgtctcagttcgtgcccgatcagaagctcccatgattagtgatgggtgccaatggagaaaatatggacaaaaaatggctaaggggaatccatgccctcgagcatactacagatgcactatggcagttggttgcccagttcgcaaacaagttcaacgttgtgctgatgatagaacaattttggtgacaacatatgaaggcacacataaccatccactgccaccagctgcagtggttgatgccatggccatagcagcaggtggcagtggatggttatggcatcaaccactgcagctgctgctaccatgttgctgtctggatcaatgtccagtgcagatggagtaatgaaccccaatttgctagccagagcaattcttccttgctctacaagcatggcaacactttcagcttcagcaccattccccactgtgactttggacctcacacacaacccaaacccattgcaatttcaaaggcctggtgccccattccaagtacccttcctccaagcacagcctcagaattttgggtccggagccaccccaattgcacaagcactttataatcaatcaaaattctctggtcttcagttgtctcaggaatgtaggatcttctcaattagcaccacaagctcccagaccacccttgcagccaagccaacatccctcactggctgacacggtcagcgcccgccgctctgccatcacttccgatccaaactcaccgccgtgctcgctg

SEQ ID NO: 29218 - DNA, 626 bp, Glycine max
  unsure (1)..(626): unsure at all n locations
  Clone ID: TF_LIB4391-036-R1-K1-E2
caaggttggggtcccaatatagcttcagaaagtgaacccttccaatcctatggatcaatccactgcagaagcccaatgagaaaagctcgtgtctcagttcgtgcccgatcagaagctcccatgattagtgatgggtgccaatggagaaaatatggacaaaaaatggctaaggggaatccatgccctcgagcatactacagatgcactatggcagttggttgcccagttcgcaaacaagttcaacgttgtgctgatgatagaacaattttggtgacaacatatgaaggcacacataaccatccactgccacctgctgctatggccatggcatcaaccactgcagctgctgctaccatgttgctgtctggatcaatgtccagtgcagatggagtaatgaaccccaatttgctagccagagcaattcttccttgctctacaagcatggcaacactttcagcttcagcaccattccccactgtgactttggacctcacacacaacccanacccattgcaatttcaaaggcctggtgccccattccaagtacccttcctccaagcacagcctcagaattttgggtccggagccaccccatttgcacagcactttataatcaatcaaaattc

SEQ ID NO: 29219 - DNA, 1511 bp, Glycine max
  Clone ID: TF_GmC94_1
cccacgcgtccgattccacataataatattacgcctcccctcatccgtatagacactaggttcaacttgtgagggggatcaaaacattcctagattgcaaacaacaaggttggttcaacttgtgtgaagggattggaacatggaaaatcttggtggttctagtcgtaggaaagcaattgaggagcttcttagagggcgtgattctgcccaacaacttaagagtgtcatcaatgggacttatgatgatggatcagccaccccatttgctcaacaacttgtgaaagaggtgctcatgtccttcacaaactccctcttgttcttgcacaacaaccccacttctgaatcacatcatgtcttcaatgttcaagtatgggactctcccaagtctgaggactctcaagagagcaattgcaaaagctccaccattaaggaaccaagagggtgctacaagagaagaagaactgaacaaacatgggagaaggaatctgaagctccaattgatgacggccatcactggagaaagtatggccaaaaggagatcctgaatgccaaattccctaggaactactataggtgcactcacaaatttgaccaaggttgccaagcaacaaaacaggtgcaaagagttcaagaggaaccaatcctattcaaaaccacctactatgggcaccatacttgcaagaactcggcaaaccctgatatcatacttgaccccatgtccccttcatcctcttccaagttccttagctttgacaactccttttcaaccccatccaagcaagagtgcccctttctctcatcttccaataatttcccatcatcatcatcagtgaaaagggagtgcaaggaggaggtccctccctcaatttcctccaatgattacctcatctcttctgacctcacttttgatagctcaccaaggcatcatgtcactctatcatcaacacttgactctgagtacaagagtgtggacatttcggatgtcttgtatgattctgcccagcttgattttgtctttgaacccttccttgaaattagatgagcatgtccttgttttggtttgtgatttttttttttaaatttaacctttacttcagcgaaggcagtgcaaaacaaattgtgtaatatttagttgtacttttcttagataaatgttatatccgtgcttttattgtaaattttgtcattttcaatgaatgagaaatgatcataatgtttcaatgaaaaaaaaaaaaaaaaaattttaatattttaaaaaaaaaaaaaaaaaaaaaaaaaaaaaaaaaaaaaaaaaaaatttctgggggccgcaagttttttccttttagggggggtaaatttaacttgggcccgggccgcggtttaaaaacgtcgaaatgggaaaaacccgtgggtaccccaattaattgcctttgggaaaaatcccccttttcccagttgggttatttgcaaaaaggcccgcacgaatcgcccttcccaatctgctaggtaggacacgactgggcgcggcg

SEQ ID NO: 29220 - DNA, 1235 bp, Glycine max
  Clone ID: TF_GmC25797_1
gtcttgacggtcccattttcaccccattgtgcaaattgaaagtagtagggaacccctactatagctactacatcatcacaatgacgtcaccttaacgtctctcgtgttgacacgtagctcagtgaggctatttcgctgcatcctccaagaaggtgtttggaaggatccttcccaccccatgccaaaagcaagcatattaattaaaaaaaatagaaaaaaataaaacacaattttattttattataggatatttattagttatttattggatataagtggcagcatgctttagtcctaagcgtgataaaaagccaaagactcttaggtttttggctctttgcagaatctttgagtgacacatacctagctatcacctcaatggattactattttggaaaccttaatcctaacccttattaccatcactctgccgtagtgaacatggcatctccctcctccgagttcatgttatctgattatctcgtgttggaagatgctcttgttgttgatcatcatcaagagtcttggtcacaaagcactgaaactgaatcgtcggagaaagcaacctccagcgatgcaagtcatgggttcggtgatgcaacctccaccaacaccaacatgcatataaagtgccaaaatagtgggattaagggaaagaatgcagaagtgagtcaaaggatcacgtttagaaccagatcgcaacttgaggttatggatgatggatataaatggaggaaatacgggaagaaaacagtgaagagcagtcccaacccacggaactactacaagtgttcaggtgaaggatgcgatgtgaagaaaagggtggaaagggatagggatgactccaactatgtgttaacaacgtacgacggtgtccacaatcatcagaccccgtctactgcctactacagccaaatgcccttgctgcattctaatcatgattgggccctccacccttctgcaaactcataatatcctccttaatatagtaatatccagagataggagaatcaacttatacttttaggattactttttatctttattatttattttttataagagattttaaaaaataaataatgagaatagagaataattttaaaagaattattgttgatgtaagttaatctctactctgtatatatatatagttattgactcatttagtatattgcctgtcaataaccattattacatgtatattgattattatgcaaattccagtccacgct

SEQ ID NO: 29221 - DNA, 1220 bp, Glycine max
  Clone ID: TF_GmC80686_1
gctttgctatcatcctttgccttgtcctcttcccttgtccttcttcctactatactatattttctctctctaatcaatcatagttctgattttcatacacttaccctgaaacctccattctcagatcaagcttgcaccaaaatacatacatagctatggacaataatactagtgcctgtgcctacccccaacttgagtcagaagaagcatcttcagagcacaaatcagaaactcaaacatcaaagaaaaggaaaatggttgagaaaacagttgtggcagtgagggtaggagagaaggttggcaagctaaagaatgaagggctaccctcagatttttggtcttggaggaaatatggacaaaaaccaatcaaagggtctccatatccaaggggctattacaagtgcagcacatccaaaggttgttcagccaaaaagcaagtagagagatgcagaacggatgcttcaatgctcataatcacatatacctctacacataaccatccatgtcccactcccatcactacaaaatctaccaccacaaaggaggaagaccaagaacatatagaactagaagaagaagaagagcaaagggataataataataataagcccagtgatgaagttactaatgaagaaaattttcattacttgcaatctccaatacgttgctccagccaagatatcattatagaacaagaagatcctttcaaactaaacacggagaaaagccatgatcgaatggatctcctcttagaggaagagcctctttgttttgcacagctcaagaacttgtctgcttccaaaaacgaagaacttgactttttcgatgagcttgaggagttacccatgtcttcatctttgttgcactttacgaggaacattttttccgatgaaaggattcccgttggcccttcttgattctagtgttgttttctcggtgcttgctatgctagtgacagtgtatgtattgttttcatccatgttatatatccattaatttcagctagtttttcaattcggaacttttctttttcttttgtaccctttatttatatgattatatcctatacttttaattaattattggttcacaactaagcatagttcatcactttggcgtgagcagggttagtgtgtagacaaaatcatcagctcttgcaattaaaattaaagaatgatggtttggctcacaatcaatggtatattgttcattctgtattc

SEQ ID NO: 29222 - DNA, 1472 bp, Glycine max
  Clone ID: TF_GmC1027_1
cacgcgtccgctcaaaactacacacaacctttctctctcttttacacacacacccctaagctataaaccagatcaaccctacctctctccacttcttactactgtgaagtttgagtttgtggtgcgcgagagatgagggatttgagcatttaagagatcaacttgttaggtatatggagaagaaagagatggctgtgaaaactgaggatgcgattgggtcctcttctttcccttgttataattcaaacctttatccattctcgaacgcgtttgatttctctgaggttgacaaaagctctttagggtttatggagttactgggtgtgcaggactatagtcctctgcctgagttaccacagctttcaactgtgtccgtgcaacctcatcactctacagttaaggttccgtctgataacgggaaagagtgttctgaggtgttgaatcaccaacctgccactccaaactcttcttccatttcatccgcgtccagtgatgcagtcaatgatgaacagaataagactcttctagaccaagcagaagaagatgatgatgaagaagaaggacaacaaaagactaagaaacagttgaagcctaagaagacaaatcagaagagacagagagaaccaagattcgcattcatgacgaaaagcgaggtcgatcatctggaagatggatacagatggagaaagtacggtcaaaaggccgtgaaaaacagcccctttcccaggagctactatcgttgcaccagtgtttcatgtaatgtgaagaagcgtgtggagcgatctttcactgatccaagcgttgtagtgacaacctatgaaggccaacacacacatccaagcccagttatgcctcgttcaggtgtctccgctggatacgccaacaacttcggttcagttttgccaccgggaaactacttatcccagtatcagcactaccaccaccaacaacaacaacagcatcttgtcaacacattgtcctctttgggttttccttacaatgattcttcatctccaaagaacgctgtttttactcaagagagacggctttgcagtaatcacgggacgaatgcgtttctgagggaccatgggcttcttcaagatgttgttccttcacacatgttgaaagaagagtagagctgatataactccagtaattattagtcatcatgcttctatgtgatttattttttgctgactttttcctatgagacttaggtgagaactctagtactggtacatgtaatttttcttcctgaccggaggtaatattagtgatcatgatcatatatacttgtaaaacccactttatctttttccacatagccccatcatgattatggctgtatagcatgatggattatgatttaatgcagggactacttctagttctagttctaattaaagaacatatggactacttctagttctaaaaaaaaaaaaaaaaaaacccctgccgcctcgctctctctc

SEQ ID NO: 29223 - DNA, 577 bp, Glycine max
  unsure (1)..(577): unsure at all n locations
  Clone ID: TF_GmC98460_1
cctgctcgccgtgcaggactacaacgtgccgttattcgattggctccccgccggtgtcggacaccatccttcgccgtctccggccagctccaacgtccccgactcctccgaggtgctcaacacgccggcgtcgcctaatttttcgtcgatttcctcgtcgtcgaatgaggctacggtcaataacaactccgaacaacagagtgggaaagaattacaagaagaagaaggtggtaatggaggcagaggagataaccaagatcaagacaagactaagaaacagcttaaagcgaagaagaagaagaagaagaaccaaaagaagcaaagagaaccaagattcgcgttcatgacaaagagcgaggttgatcacctagacgatggttataagtggcgcaagtacggccaaaaagctgtgaaaaacagcccttatccaaggagctactaccgttgcaccagcgcgggttgcggcgttaagaagcgcgtggagcggtcctccgaagacccttccatggtggtgacaacctacgagggtcagcacacgcactcgtgccctgcttcngctcggtctagccttggcttc

SEQ ID NO: 29224 - DNA, 2785 bp, Glycine max
  Clone ID: TF_GmC595_1
tctcgcttaagaaacaagacatgtggaaattcaatgaacctacaaaacaaactgatttttcacctgagcggacagcaacaaaatctgaattcccttcaattcagagcttttcctcagagatggcagaaggaaaaccagaaatacaaagtagctcagttcccgggtctggttattttgactacacaagtgcatctcagtctgtaagagaacaaaagagaacagaagatgggttcaactggagaaaatatggacagaaacaagtgaaagggagtgaaaatcctcgtagttattacaagtgcacacatccaaattgctcagtgaagaagaaagcggaaaacttttccactggacatatcactgaaatagtatataagggccaacatagccacccaaaaccgcagtctactagaagaacaaactctcaatcaattcatcaaccttcttcgtcttgcacaaactcagggataactgatcattcagtggtgactctaggaaatccacaaatggatcatttctccatacaagaagattcttcagcttctgttggagaggaagagtttgagcaaacaccgcaaaccagttattccggaggagacggagataatcttggacctgatgccaaaagatggaagggagataacgaaaacgatggctattcagtctcagcaagcagatctgttagagagcctagagttgttgttgaaaccacaagcgaaattgatatacttgatgatggctttaggtggaggaaatatggacagaaagtagtcaaaggaaactcaaatgcaaggagctattacaaatgcaccgcccctggttgttcagtgagaaaacacgttgagcgagccgcacatgacatcaaagctgtgatcacaacttatgaagggaagcacaaccatgatgtgcctgctgcacgtggtagcggaaaatataactcgaacagaaattctcagaacagcaacatatcagcgcctataagaccctcggcagtgaattgttattctaactcatcaagtttcacaaattctctctataataatactaggcttccagcaactggaaatcaagaatcattttcactggacaagttcaagaatcctggaagttttggctattcagatcttaacagaccaatgggttcacataccaatcatgcacaatacacagatgctgcatactcaagggccaaggatgagaggaaggatgattcattccttcagtcatttctctcaaaggacttctaaatttggagtggaccacaactttacatattatcctggatatgtttttgtatagcatgtaggattttagttattcacagcagaatatagacaaaaaaattgcaaatgtttacttatttacctcttttagattagtgactggcactacagccatagtgacagaaaattgctgctatacctgtctgccaagttcttgtccaaattgaaacttcaactttatcataggattgactgatgaattctgttattcttttgttgtatttgtagggaaaaaaggttcttctggaagaatcttacgatatttcattaatcagtagcaagtgtgcttgtgttggctatttctactatgctctttctaattttagtttttatcaaatgatttgtgatgaatatcaggaggtccaggacttccataatttgtaccaatatcaacaccgggatttgataaattttcaattcatagtccttgatgtgaatcatacatagtccttaatgcaatttttgttgataacgatatgttaactgacatctgatttaattagaaaagaaaacacaattcaggaaaatttccacgcctgaaaaatttgtgataaactgtgtctaaaggttgaaagttgaaccctctaggattttaacaagtcaaaattctttttggatgtacattaagtagtcagattgcaaagaaacaaaaaatgaaattcagtttctagtcttctgtcttccattgcttgcgtctcacagtcagattcaaataatgcattcaccacatcatctttttttggtcacattggtcaataaacagtctcaagtacaagaaacatgattaaacattacatgtattcgtatatgaaatcaatatcaaatctcactgtatacatatgcaccgagccagagaggtgaggcctgactccttttctcattaatatacagaaaaaaagtgatttgtatagaagtatgaaactgtagtaggagagttttgcaaagttaagacttcatatataaggttgagttgataatttgtagcctgaaatgagggcagatactgctagacacaagaaggcaaaaattgacatgctaatggctgcagctgaagagtctgtgaatatattgtctgccccttctctcattctatttgtcattggaattgctgaagatgctgatgatatcaaaagatatgcaatgatctgatctccaaaaaagtcaatcatagctgccattcttggctgaagcaattgttttgcagtggagagttcctgaatttgacggaacgcttgggctccagtgtacaaactagacaaaatcgctatagccagcaaatacctgtcatcctccaaaaaccacggctcgagctcgagccgatgcttattgctggccatgataaagaacgaaatcagagagaaaagcagagcgacccctctcagtcccaacgaccctctcttgatcaagtcctccctcttccaccgccgcaggattccgccgattccgccgtggctcgccggcgcgaggtggccctcactcggcgcagaaggcgccaccggcctcgt

SEQ ID NO: 29225 - DNA, 1516 bp, Glycine max
  Clone ID: TF_GmC608_1
gataactctctgtagcgaaaagtcagcgccttcttttgtctctctctctcaaaaaaaaaattccacacactgcagagtttgtctctctatggcggaagattgggatctacatgcggtggttagaggctgctccaccgttacatcatcctcagtgtcttcttcttcatctccttcttcctctggttttgcctcttcttacttccaccctgaagctgcagtttcttcttcttcttcttcctattctggcttcaacatcttcaagggtgaacaaggaataagccaagttttgtcgctctctgcgtacccctttgaggcaaggagctccattgaggaattgcatgagctttgcaaacctttcttctccaaatctcagcctctaacgttgcaagcctcttcacctttgtcctcactctcttcctattcctctgcgccacccaaatctgtttcaacgcaagagaaacaacaacagaggagcaagcaggcacatgctgtcaccaccccacgatctaaaagaagaaagaaccagcttaagaaagtttgtcaagtgccagttgagaatctctcctcagacatatgggcatggaggaaatatggccagaaacccataaaggggtctccatatccaagggggtactatagatgtagcagctcaaaggggtgtttggcaaggaaacaggttgaaagaaacagatcagacccaacaatgtttatagtgacttacactgctgagcacaaccaccctgctcctactcacagaaactctcttgctggctccacacgtcagaagccattggtacctcaaacagccaccaccactgaagaagactctgacaagagcaagagcctcacaaaacccacttcccctgccacctcaggggcagaagaagaggctccaacaccatcacaaggggaaaagtctgagagcagagaagagaaagaggatgtgatggatgatgaggaagaagatgaatttggcttgtctgatatggtgctttcagatgacttctttgaaagtttggatgaactgagccaacttacggctccttctgttgtcactggagactgtttcagtgaccccttttcagcaattgcaatcccttcttgggtggctagtggtgctgctactgctagtgggtgtagatgattctttcgggcaaatcatcacaatgcttttcattgatgacaatagggaccttttctttttggtttttgtttgtagaggaaatggaacattttggaggaatctttactaacaatggtttgtggatgggaggaaaagttttccttagtagagtagtagtgactagtaaggtagatcaagcattaatcttgttaaaaatcaatgattattattaggcattcatagttttattatttatgtcatacctatgttaatgtaaaaacaatatattttagtaagctttttgtatgctccttgagttgtggttgagttcattgtatttgacattggttttgtgatataaattggcagaagcacttttgggttgacttatag

SEQ ID NO: 29226 - DNA, 2405 bp, Glycine max
  Clone ID: TF_GmC86629_1
gcaagagctacaaaatataataataatatatatatatatatatatatatatatatatatatatgtttttttttccttctcttcctgcttaggactttaagtaattatatatataattatatttttatatatattatatatactctaaagttggaagctttttattcttatgtatgatggttgtgttgtgtgagttctcaagggaagcaaagtcctatctttcacacctttcagtctcaaccgtgggaagaagaatctagggtttaacagcaccaccccaagtccatcaaggtctgtgctttggtgcttctttttttttttttgttttgttttgttttttctttctcactgggaaattgggtcgattttttttttttgtcggaaggaggatatgctgcaacttgtgaggtaccctcagtttgttctgattccaaggttgttccttgttgccaaaaaacattgctttttttcttcatgagttggaattttgagactttaacctgaaattctgtttttgtggctccttgtctggtgaaaaaatgggattttttttcatctgggtcgttttatctgccacatagggctgaatgtctgatatgtttgtggataagtggggtgattttttagtattctggtgttttacttgtttggtttagttctgccccttgtttggggacttagttttttttttattaattttttttagaggctaatatggaagaggttgagcaagctaatagagtagctgttgaaagctgtcatagggttctgagtttgttgtctcaaccaagggatcaggttcagcataggaatttaatggtggaaactggggaagctgtggtgaggttcaagaaagttgtttccttgcttcacagtggtatgggtcatgcaagagtgaggaaggttaaaaaccctcaaatccccttttcccaccaaagcatcttcttagacaaccccaattgcaaaaccatcaacaaccatcacttcaaaaatctgcagtttccccaaaccagcttccctgacaattcaattcaggaacttggttcaaccattaagaattcactctctcttggacaaccctctttggaattgagctccaatgggaaaagtcctcttcacctcacacagcaggcttcatcaaatcactatcacttctttcagcagcagcaacaacagcaacagcaaaggctgttgctgcagcagcagcaacaacaacaacaacaaatgaagcatcaagcagaaatgatgttccgaaggaacaacagtggcataaacctgaattttgacagtactagctgcacaccaacaatgtcatccactaggtcttttatctcttccttgagcatagatggaagtgtggctaacttggatggaagtgccttccatttaatcggagctccacactcttctgatcagaattcccagcagcacaagagaaagtgttctgccagaggtgatgagggaagcttgaaatgtgggagcagtgctagatgccattgctctaagaagaggaaacatagagtgaagagggcaattaaggtgcccgctatcagcaacaaacttgcagatatccctcctgatgattattcgtggaggaagtatgggcagaagccaatcaagggctctcctcaccctaggggatattataagtgcagcagcatgagagggtgtcctgcaaggaagcatgttgagaggtgcttggaagagcctaccatgctaattgttacctatgaaggcgaacataaccaccccaagttaccaacacaatctgcaaatgcatgaactatgtggagagcttaaccagatcaagcccatcattcaatttgtcaaaacctctctgtgattggcttgagatgctgctgtacatattttaagtgatgcaaacaagcagggatgatggatattgttggcgcagattttgtcttttggatagtttggctaaccagccgttttatttagagggtgaggatgaggatcactgattaaatgaacaaagtctgtaaaattagctagtttcaattcgtaagaactatttcatctttcttaagcctgttataaacatctcaaggttttctaaatgaatgaaaatgcctttgaaaaatggtaatattcttcgtaaaaaaaaaaaaaaaagggcaaaaaaaagcgaaaaaaaacataaaaaatcgcgaaaaaaaaaaaaaagaaaaaccctgggggggggccccgtacccaaatcccccttatagggattcaattaacgcccgttaactgccctggattttccaaccctttgactggaaaaaccttggcgttcccaaactaaatccctttgaagcaaattcccttttcaccatttgggtaaaaaccgaaaggccccgccccgttctcctttcccaacaattcccaaccctaattgccaattgg

SEQ ID NO: 29227 - DNA, 375 bp, Glycine max
  Clone ID: TF_15203247
ggaattccgcacgaggcaaaaaccaattaagggttctccatatccaaggaattactataggtgcagcagttccaaaggttgtatggctcgaaaacaagtcgaacggagtaacactgaacccgacatgttcgtcgttacgtacaccggagaccactcgcatccccggccaactcaccggaactcgctcgccggaagtacccggagtaagactctggtaaccaatccgccaccgtcacctgggtcactctcctgcttccaagccacccctttttcttcttcttcttcatcgccaccacactctccaacgtcgccggaggaagatccacggaaaccgccgatttagaacccgacccggatatggaaaccgacgggaac

SEQ ID NO: 29228 - DNA, 1213 bp, Glycine max
  Clone ID: TF_GmC121755_1
gcttgagagaatgaaggtggagaatcataggctgaagaacatgcttgatcaggttaacaacaattacaatgccttgcagacgcatttggtgagtttgatgaaggaccagatggacaaggaggatgataaacaacaaccgcatcaagtgtttgatggaaaactagaagagaagcaagctgggaatggtggtggagccttggtgccaagacagtttatggatcttggattggccactaatgctgacaccaatgaaacttcgcattcccattcttcgtccgtgataagaagtcaggattcaccaccaacaaataatacagaggtggcatccaagaagaatgggggtgctagtgatgaaggactagtgtttgatcaagacaagaaggaatttggtaggggaattgagagagaggatagtccctcggatcaaggggtagctgctaataacaatgttccaaagtttagtcctccaagaaatgttgatcaagctgaggccaccatgaggaaggctagagtttctgttagagctcgatcagaggcacctatgataactgatgggtgtcaatggcgaaagtatgggcagaagatggccaaaggaaacccttgtcctcgtgcatattatagatgtaccatggcagcaggttgcccagtgagcaaacaggtgcaaaggtgtgctgaagacagaacaatactgatcacaacatatgaagggaatcacaaccaccctttgcctccagcagctatggcaatggcacaaaccacttcctcggcagcaagaatgctgctttcaggatcaatgtcaagtgctgatggcctaatgaatgcaagcttcctcacaaggacactcctcccttgctcttctagcatggcaactatctcagcctcagctccattcccaactgttacattggacttgactcagtctccaaatccattgcagttcccaaagcaaccaagccaattccaaatccccttccctggtgtccctcagaactttgccaattcacaagcctcattgctgcctcagatatttggtcaggcactttataaccaatccaagttttctggccttcaaatgtctcaagattcagacccttcccaattgagtaatcaatctcaaaggccaccaccacaccttgctgacacagttagtgctgccattgcagctgatccaaacttcactgcagctttggcagcagccatcacttccattatt

SEQ ID NO: 29229 - DNA, 548 bp, Glycine max
  Clone ID: TF_uC-gmflLIB3260P022b08b1
ttttccacgcgttctgtcacgcgtccgtccactcttgcgttgacgcgtgggtgatgccatatgatggaaaattgcatgggataccgaaggtctgtaaaatccatggatgtataacactgagagaaccttatagggtgattgagacttgccctgacattgatattcttgatgatggctattggaggaaataagtcggtcagaaagtaacgaagggcaatcctaatccaaggagttactacgtttgcacacacccaagatgtgcagggaataagcacgtggaaagagcgtctcatgacttaagggctgtgatcacaccttatgagggagctcacacccataatgttcctgcaccccgtttcagtgacggccattttgttaacagagcattgctcaataatgtttcagaccacaccaactctgcatacactctcgtattggtattgccagtgattcaccaatgtgacaattctcttcacatccaaagatcacaagcagcaccaaaagggccttgtcgcttgaccctagacatgctagaaagtccatgaagt

SEQ ID NO: 29230 - DNA, 202 bp, Glycine max
  Clone ID: TF_9204323
aaagaggaacatggtggatgagccagagcctaaaaaaagaatgaataaaggtgacttaacagaaatggattctccagtataacctggaaaaaagcccaagttcgttgtacatgcggcaggggatgtggggatatctggtgatggttaccgatggcgcaagtatgggcagaaagtggtgaagggaaatccacatactagggag

SEQ ID NO: 29231 - DNA, 974 bp, Glycine max
  Clone ID: TF_GmC1119_1
tcagaattctgctcgttgctctacgcaccatagtctttgttttcatttactaccatatttagttatcagcaatggacttctactttggaaactctcctccttatcccaataattatgctcataattctcttaatatggctctatcttcccctgagattgcactatccgattatctcatgctcgatgactatgttgatcatcaagattctcgatcatcacaaagcaccgagtcatctgaaaaagcaaccttcaatgatgccactcacggattcagtactggtgcaacctctaagaataataacataaactgcaaaaatgggattaatgaaaacaaaggtggagtgggtccaaggatcgcgtttagaaccaaatcagagcttgagatcatggatgatggatacaagtggaggaagtacggcaagaagtccgtgaagagcagtcccaatctaaggaactactacaaatgttcaagtggaggatgcagtgtgaagaaaagggtggaaagggatagagatgactacagctacgtgataacaacatatgaaggtgtgcacaatcatgagagcccatttaccacatactacagccccatctccttcgtacattctgatactactttcaaatgacaccaacttcaaacccttttgggcatttacacctccctagcttaattatgtgccaagaaaaagcttggaagattcgatcgagcaggggaagctatgtatcattgcattgtctaatcaatcataatttattttcatgctgtaataggttgaagagagtttctatacctttttttggttccacgtttaatatatctctcaattaaaaatcagcctttgctagttcatgtaacaaggaacatgattctccatgtgtaaagttgttcaaatcttaaaagtaagtatcttgtattaggattagagtatctctcttgtactctgtttaataataaaagttttgcctcctaaaaa

SEQ ID NO: 29232 - DNA, 585 bp, Glycine max
  Clone ID: TF_GmC421_2
tttgtctacatcttttcaaaccttacaatgactttttttggttgaaattctacagtacactaacttgtacctgtttcccttttccttgtccaaaaattccttggtcaaatttggcaactttcgtttttccaatgtgtccatgtgatttagaagaataatagcactcctagatgggcttgtctcgtgctgtgctaaacttgtgacatgtaggagttactacaagtgtacacacccaggatgtccagtgaggaagcatgtggaaagagcttcacatgacctaagggctgtgatcacaacctatgaggggaagcacaaccatgatgttcctgcagctcgtggcagtggcagccattctgttaacagaccaatgccaaacaatgcttcaaaccctaccaacactgcagccactgccataagtcccttgcaagtgatccaacacagtgacaattcccatcagaaccaaagatctcaagcaccaccagaggggcaatcacccttcaccctagagatgctacaaagtccaggaagttttggattctcagggtttgggaatccaatgcaatcttacatgaatcagcagcaaca

SEQ ID NO: 29233 - DNA, 720 bp, Glycine max
  Clone ID: TF_GmC120733_1
aagttggtgaagggaaatccacatttcagaaactactacagatgcacttcttctggatgtcctgtccgaaagcacattgagactgctgtggataattcaaaagctctcatcataacgtacaagggaatgcatgatcatgacatgcctgtgcccaagaaacggcatggcccgccaagtgcttcacttgtggctgcggcagcacctgcttcaacgaacaatgtgcagttaaaaaaaactggattgctacaaaaccaggaaactgaagctcaatgtttagaggacacagaaggagagttaaccggggaagcgttggaccttggtggtgagaaagcaattgagtcggctcgaactcttttgagcataggttttgaaattaaaccttgttgaatacatctttcataaatcatgcagttgcattgcatctatattaattaattggtaggcctcatgtaattttggcggtttcccatgtttaccttctctttcttgatttctttactcatgtatgtagtcttttagtggagcagttatatttgcttgtacacatgttcagcttgtctgaaacagcttgcgtagtcgagcgaatatggaattgacttgtatcttattctcagggagagtgagaacaggtgaggatagtgttatcattcaacttcactcacacattgtttgtttgagtgtaaatagaaaggaatgaaataaaaaggaagtcgataggat

SEQ ID NO: 29234 - DNA, 2059 bp, Glycine max
  Clone ID: TF_GmC6090_1
gagtttgcacgacaccaagtggactttgtgctacgagtgttgaagataacacgaaacaaaaaccatcatttagttgccatccatctcccaccgatgtccactcccaacaccgattccggcacggcgccgccaccgcgccccaccatcacgctccctccgcgcccctccgccgaggccttcttctccgccgccgccggcgccagccccggccccatgaccctcgtctccagcttcttcggctccgacgccgccgccgactgccgctccttctctcagctcctcgctggtgccatggcctccccgatggccttctccgccgctgccgcagccgccgacaactccggcaaggacgacgatgggccccacaaggggttcaagcagagcagacccatgaatttggtcattgctcgttcccctgtcttcactgtgccacccgggttgagcccttctgggtttcttaactcccctggcttcttttcccctcagagcccctttgggatgtcccaccaacaggctttagcgcaggttacagctcaagctgtcctagctcaatcccatatgcacatgcaagctgattatcagatgcctgcggtaacagctccaaccgaaccacctgtacggcagctgtcttttgctctaaatgaagcttcggagcagcaagtggtatcatgtgtatcatctgtatcagaacctagaaatgctcaactcgaagcaccggaactctcacaggctgataagaaatatcaaccatcatcccaggccattgacaaacctgcagatgatggctacaactggcgtaagtatgggcagaagcaggttaagggtagtgagtatccacgaagctattacaagtgcacacatctgaattgtgttgtgaagaaaaaagttgagcgtgcccctgatggtcacataactgaaattatctataaaggccagcataaccatgaaaagcctcaggcaaataggcgtgccaaagataatagtgattcaaatggaaatgtaactgttcagcccaaatctgagtcaaactcacaaggttgggttggacaattaaacaagtttagtgaaaaaattcctgattcttcagttgctaaaagtgaccagacctccaatcaaggggctcctcctaggcaactactacctgggtcaagtgagagtgaggaagtgggtgatgtagataatagggaagaggcagatgatggcgagccaaaccctaagagaaggaatactgatgttggggtttctgaagtacctctgtctcagaagactgtcacagaacccaaaatcatcgtgcaaacaagaagtgaagttgatcttttggatgatggctacaggtggcgaaaatatggtcagaaagtggtaaagggaaaccctcatccaaggagttattacaaatgcactagtgcaggatgcaacgtgcgcaagcatgttgagagagcttcaatggaccccaaagctgtcataaccacgtatgagggtaaacataatcatgatgtgcctgctgctagaaacagcagccacaacacagctagtagcaattcaatgccattaaaaccacataatgtggtgccggagaaacatcctttgctcaaggatatggattttggaagtactgaccaaagacctgtacatttgcgtttgaaagaagagcaaatcatagtataaaagtctggtgccaagctcacttattccacgtcctagtacagaatgaagttgtctagaagatgaaatggataatataatatgaaggtgtagtcactagtcatagttggcaatgtctattgttttctagtttcttttgtatgtaacaccttctttttgtacatctaaattatggaattggttgtataagatgttgtttacaggtatgaatatcatttcaactaatgtacgaacattattatataatataatttataaatactccttgtaagttgtaagggcaattctagattacaaataaaattgaagagctggcatcctacgattgaactccttttgtatgttatggaattttaaagaatgactttggtaatattaatcaattatggatttatct

SEQ ID NO: 29235 - DNA, 1991 bp, Glycine max
  Clone ID: TF_GmC1824_1
gcgaccagcgtagtggttatccccgtggtgggttctccgtatcatcctttgcggccaagcgtgcaacagattcaggctctttttatcatggtgctggaagaaaaatgataaatcctactacacttcctcaacagtcccttcctggtattgaggtttcggctcagtctgaaaattcttttcaatctcaaagtgttgatgctgtcaaagctcaaactgagaacaaaagtggttttcgtcttcaggccgactttgctgaatcacctcctcaaaaagataatggaattaagatgttctcagctgatcaaagggcttttgatgttgttggcggtggcaatgaacattctacaccaattgaagagcaagcagatgaaggagatcaaagaggcaatggagactcaatggctagtggtgttggtggtgcaccatctgaagatggatataactggagaaaatatggccaaaagcaagtgaagggcagcgagtacccacgaagttactacaagtgtacgcatccaaactgtcaagtgaagaagaaagtagaaagatctcatgagggccacataactgagatcatctacaagggaacacacaaccatgcaaaacctcctccaaatcgccggtcaaggtataggttcggttaaccttcatactgacatgcaagtggaccaccctgaacatgttgaaccacacaacggtggtgatggtgacttgggctgggctaatgtacaaaagggaaatatagctggagctgctaattggaagcatgaaaacattgaagccacatcatcagcatctgttggccctgaatactgcaaccagtcccccaatttgcaggctcaaaatggtactcacttagattcaggagaggcggtggatgcctcatctactttttctaatgaagaagacgatcaagtcactcatggtagtgtatcattaggttatgatggggaaggagatgaatctgagtctaagagaaggaaactggaatcatatgcagagttgagtggagctactagagccattcgcgagcctagagttgttgtacagactaccagcgaagtagatatcctcgatgatggttatcggtggcggaaatatgggcaaaaagttgtcaaaggaaatcccaacccaaggagttactacaagtgcacgaatgcagggtgcacggtcaggaagcatgtggagagagcatcacatgaccttaaatctgtaatcacaacatacgagggaaaacataaccatgatgttcctgctgctcgtgccagcagtcacgtcaacgctaatgcttccaatgccgttcctggccaagcttctcttcagactcatgttcatagacccgaaccatctcaagttcacaatggcattggaaggcttgagaggccttctcttggctcattcaacctacccgggaggcagcaactaggaccatcccatggcttctcctttggtatgaaccaatccatgctatcaaatctggtgatgtcagggttaggccacgcgcaagcaaagcttcctgtcatgcctgttcatccgttcttggcagcgcaacaacaacatcaacagcgacaacaacatcaacagcagcagcaacatcaacagcagcagcaacaacatcaacagcaacagcaacatcaacaacaacaatgcgctgcaaatgatttgggtttcatgttgccaaagggagagccaaatgtggaggctattcctgaacatggtggccttaacctgtcaaatggctcatcagtgtaccaagaaatgatgagtcgcatgcctcttggacctcatatgtaaaattttattccctgattctttaaagaaaaaactaatgtttacatctgataacatacatatatagatttatacatatatgtaatgccaaggcatacataggcggacttttcattattagactcattgtaatgtttgacattcttcatcacatgtcaaaggtatatgttattttgctcatttattgcatagatcctagccga

SEQ ID NO: 29236 - DNA, 1793 bp, Glycine max
  Clone ID: TF_GmC42427_1
gggtccacgcacgcgtccgtacggctgcgagaagaaaaaaacaggagaccaaaaaacgagacaccaaagtttcagtttctctctaacgttgttgttaaatgacagtagatctggtaggtgctgccaagatggggatggaggagaatatagcgatacaagaagctgcttccgctgggttgaagagtatggagcatctgattcgtgtgctttcttctcaaatcccttcttctgcttcgtcttcttctaacgcacaccaccaccgtcttaatctcaaccaccttgactgcaccgaaatcaccgacttcactgtctccaagttcaaacaagtcatcaacttgttgaatcgcacgggacacgctcgctttcgtagcgcaccttctcatccttctccttctacttctcttccttctcaacctcaacctcaaccacaaccacaaccatatgcactgactcttgatttcgcaaaacctgttatgcttaagtcaaatcccaaccctaacccttcttctaccgatttgtcggtttctcaatattctaagaccaaggacaccaccacctttagtatatctcctcccgtgtccaccaccacctcctcattcatgtcctccatcaccgccgacggaagtgtctccgacggaaagatcggccccgccatcatcgctgccggcaagcctcctctctcctcatcccaccggaaaaggtgtcacgacgccaccctctctgccggaaaagcctcttcctccgctcactgccattgctccaagagaagaaaatctcgtgtgaaacgaatgatacgtgtgccggcgataagttcgaagattgccgatatcccagtggacgagtactcatggcgaaagtatggtcaaaaaccaatcaaaggttcaccttacccgcgagggtattacaagtgcagtagcgtgagagggtgtccggcgaggaagcacgttgagcgagcccaggatgaccccaacatgctcatcgttacctacgagggagagcaccgtcatccgcaaccgcgtctgccggaaactgctgccggcgccggcgggacttttgccgctcatcctgtttaagcgacggtggatatcgggaaagtatggcaccgacagagatgagtgataaccgccgtttgcaattaacgggggggaagttgtaaccgtatattgtaacagtgggaggaaaagaaaaaaaaaaaaaaagaagggaacttattgcaagcgagggaaagaaaagaaaaagaagcaaagtcaacttttgctatgtttggtttggctgggacctttgtggaccaaaagaatcgtctactagatggatagggaccttttctgtaaatttgacacaaaaaaaaaaaactatgaaatagtagtactatacttactttttttttattcttgtttttccaacttaatttactagacattcatttactctcagcaatcaaaaaataatttaaatttttataaaattggataaatggcatgaaattggttggactttaggccacccacctatttatttgagtgtataggggagatctgatccaagtataggattccatgggcacaacagcaacacaagggttgaaaagaaaggatggggtgaaggaaaagtcaaaggtgaagttcaaaatggagaatctgagtagcttgtcaatggacgtggtgcgagtgggacaggtaccgcgggtcccgcgccagctcattccaatctttgcggttctatcataatcttctgcttttgtacattccaagatattttaatttaggaaaaataaaataaaacatttatcctcc

SEQ ID NO: 29237 - DNA, 958 bp, Glycine max
  unsure (1)..(958): unsure at all n locations
  Clone ID: TF_GmC42742_1
gtagctcggaancggctcgaggagaaaaactcaaagtcatcatcatctaccatggcaaattctgtggcattttccgacgagattcctaacatgagcatgagcttccctttctcccctgctttctctagtagcatctttgacatgatgccaccaccaccaccttcctcatctcacgatcctaaagctcccaactttgctaatagcttcatggacttgctcgctgtccctgctgattattataccccttctttattcgactggtcccaaaacaccgcccccacgtcagcaccaccaccttccaccacccaaatcaaccaccctcttccgtcgccagccagctccaatgtccccgacggctccgaggttctcaacactccggcgtctcccaattcttcgtctatttcatcatcgtccaacgaagcagcagccgccaccaccgccaacaaaacaacgggaaatgataatgaagaggaggaagatgaaacagcaatagatgcaacagcaggcagagaagaagaagatcatcaagaccaagacaagactaagaaacagctcaagccaaaaaagaagaaccaaaaaaagcaaagagagccgagatttgcgttcatgacaaagagtgaagtggatcacctcgacgatggctatagatggcgcaagtacggtcaaaaagccgtcaaaaacagccctcatccaaggagctattatcgttgcaccaccgcgacatgcggcgtgaagaagcgcgtggagcgttcctcggaggatcctacggtggtggtgacaacctacgaggggcaacacactcacccgtgtcctgccacgtcacgggctagcttcgggttcatgcactccgaagcaagtgggttcggacccaccagtggactaggttcggcacactttatgctgcaacaacaacaacagtttcgggaccaagcacaagcacaagcagcaatgttgtata

SEQ ID NO: 29238 - DNA, 953 bp, Glycine max
  Clone ID: TF_GmC182872_1
actgcaaagatcaagatatcttatacacgatattaaagtccatgacatccctacacatggtcatcttatctagctaaaaaataataatctatatattgacaacaaaaaaagcttccaaatatatggacaagataaaatatttttttgtggggtaatgtggttccctccaaataggaaaaatatggagaaagaaatctagggaaatgttttaacaagcatatcgatactgagagttctgaataatgacatgactgagttcatctttgaagcacactgaactctgtggcaaagtacatggcaatctatcaataatatcatagtgccttaattgagttcataattaaatacatgctgatcatcattataagcaaatgacattgaccttactagaaagaggtaaagcattcattctcggatgaatttgagtcgtcgcaaggggagtgattgtgtctaccttcataggtggttatcaccatacgacaatcctctgatagtcgttcaaccctcttcttcaccctacagttgttgtgggtgcaccggtaataacttctgcgatgtcccctcttatgacatcgtcctcgccgtatctcctccgtgtgtatccatcacaaactccaaagatatattttttaatctttaaattgacatcatactagttcattaatttactcaaatggagccaacatatggtgcatgtgctatgtttaacaaataactatgtcgcgcacttaagtatatcgtcaggatttgatccttagattcatttgcatgaaaaaaataatctgttaaagaagattaatttcttaaatgaatttcaatactttgaataattaatttctgatttcggctgcaggaactgggatcaccaaaaaaaatatactagatgggggactataaattgatgtgcatgacagatactgcgtagaagttattttggttatatttcaaaggat

SEQ ID NO: 29239 - DNA, 918 bp, Glycine max
  unsure (1)..(918): unsure at all n locations
  Clone ID: TF_GmC373_2
ccctcttcttcttttttttattttttatcttctcttatcttaaacttattcttctgctacaccaatcccatccttggtccatgtcctgttcaagccatctttggcatgtgccacttggcctctgacacaaaaacttttcttttcggaaccaatcatttttcatcaaacttcaacatttacataactcttaattttaatcacttttgttcgtagctacatcaacatggaccacatgggagacccgaagagcatcatacatgagctgctacaaggtttggagttggcaaggcaactccaagtgtatctccacatgccaacttcgtcccaagaaacacgtgacctattgatccagaagatcatatcaacatttgaaaaagcacttgaaatggtaaattgtaaagggccagtgccagcgggtgagtcatcacatcatcccctaggggctgcattaatccgagtgtcagattcacctttgagcagtagtccccgcagtgaagactctgatagagatttcaaggaccaggaccccaatgctttcaaaaagagaaacactttgccaagatggacaaaacatattcgagttaccccaggaatgggagtggaaggacctcttgatgatggatatagttggagaaaatatggccagaaagatatccttggagccttgtacccgaggggctattacagatgtacccacagaaatgttcaaggctgtatggcaacaaagcaagtgcaaagatccgatgaagaccccaccattttcgaaatcacttaccgaggaaaacacacctgcacagtggccaacaacgtgggttcttcatcaccaattccactagaaaaccaggaaccaagtttgaacaacacanatatttctcagcatcagcatcagcagaatatcctgcaaagccatgaacaaca

SEQ ID NO: 29240 - DNA, 1265 bp, Glycine max
  Clone ID: TF_GmC43050_1
ggctgggactgttgtcctcgcatccctggtggcgcctcctcagcatccgcgcccgccagcagccctgtccatggcgagcgcaacgtcgcctgcactgaattgctgcctgtccggctcaacccccaggtcactcggacgcacgcactcttctgcactgtcgaaccgtccattaaaaatactctccgctcccttcttcccagctgcagcctcatcatctccgaccctccccaaaatcatgagcaacagaacctgaatcaattgggcttgctgcaaattgagttagaggaggtgaagaaggagaatcagaatttaaggtcaatgctaaatgagatctctgaacactacgctgctcttcagaatcagttattgttggcgatgcagcagaagaaactatcttcatcacctcgaaataatgaggacatgcagaaggacagccagcagaataacatggagaaaccagcgttaccctcctgcaggcagttcttaaatactggtaaaatcaataacagggtaatattacaagaagcaaaaatcgtagaagagcaagcatttgaggcttcttgcaagaaagctagagtgtccgtaagagcgcgatcagaatcatctttgatgggtgatgggtgtcaatggagaaaatatggacaaaagatatcaaagggcaatccttgtcctcgggcctattatcgctgcaacatgggaactgcatgtccagttcgcaagcaggttcaaaggtgtgctgaagatgagagtgttgtcatcacaacctatgaggggaatcataatcattcactcccaccagcagccaggtccatggcgtgcacaacatcagcagcactgaaaatgttcctttctggctcaaccactagttcacatggaagcacttattcttattcaaattcagacctcttctctccactatgcacttctacctactatccatctgcagcaccatcatgtccaactataactttggacttaacccaaacctctaagaacaacatgaaattcccaagtgctatttcttcaaaccatttgcaaccttttccactttcattgcatggtcaacctcaacaatctgagggaatattaccttcagagaaaaaccttgccttggtggatgttgtcagtgctgccataaccaacgatccttctcttaaggcagcattagaagcagctgtttcctcaatcattggagactctcagaaatcactgccaactttgtaggagtgataatgacccctcttctaagatgtctgcagtatcac

SEQ ID NO: 29241 - DNA, 433 bp, Glycine max
  Clone ID: TF_LIB3167-037-P1-K1-E7
aatccacaacattactttgaactgttattctataggaactattacagatgcagtagctgcaaaggctgcgtcgcgagaaagcaagtagaacgaagcaccaccgaacccaacacgttcatcgtgacctacaccggcgaccacaaacacgcgaaacctgttcaccggaactccctcgcgggaagcaccagaaccaagccatccacgacccgtttatccgaacccaatgaatccgtgtcttgcccaaaaaaagaaaacgcatgttcttcaaattccgagctttctccaatgttgtcagtttctgacacgctggaaaacgaggaaacggtctcggccagcgaacccgattgccctgacatggaaattgagccctctgataacgacgacgttttgatacctaacacgggtgccatgttcgacgctgttctcttgggct

SEQ ID NO: 29242 - DNA, 1075 bp, Glycine max
  Clone ID: TF_GmC855_2
aattgagtatttgctcgcacgtccacaataaactacactgctgccatctgtcaccatggcggctcttattaaacacctaccccttctcctctctcactctcactctcaccatttttctctcctcaacccattgcccactcatctattcactatttctatcatattatagttatataattaaacatagcaatagcaaattatatatatatatacatcatccaccacccagatttaatttcactccaacccatcatgcatcaccgcagattcagcaaattaatacatgtggctgacccagatgagcccgagtcagggcccgagcccgcctcagaagctgggcctgcttctccttcttccggtgaagacactaaaactgaagcaccgtcacccaagaaaaggagggagatgaagaagagggtggtgacgataccgatcggtgacgtggatggatctaagagcaaaggagagaattatccaccgtctgattcatgggcctggaggaagtacggccaaaagcccatcaaaggctccccttacccaaggggatactaccgatgcagcagttcaaaggggtgtcccgcaaggaagcaagttgagcgaagccgtgtggaccccacaaagctcatagtcacctacgcttatgaacacaaccactcccttccttttccaaaatcaaattcttccgccgcttccgccgccgtaagcgacggcgcagccgtctcgccgatagagtccgccgccaggttcccgccggaggaggagatgacggtgttcgcgacagactccgacctcgaactcgccggcgacgcggcggttctgctcagccaccaccaccaccacttcggctggttcgatgacgtagcgtccaccggcgtcctagagagcccgatctgcggcgaggtggatgacgtggcggtgccgatgagagaagaggacgagtcgctcttcgccgatctcggcgagttgccggagtgctcggcagttttccggcggaggaatattccggcgaccagcgcgatccggtgcggcggcatcacaggataacgcgggtggaccctttttttgtagtcccgcg

SEQ ID NO: 29243 - DNA, 620 bp, Glycine max
  Clone ID: TF_LIB4281-007-R1-K1-B11
ccacgcgtccgaaatttctctttccaaacccgatcaggacctcctgcttcatccacagcaacataccagtcttcaaatgtcacagttcaaacagtatgtgaccaatttcaatgcatagactcattttcattgaagcaaagcctttgtttttctctgtgtgtttttttacatgacaagttctctttttctaaatttttaaaactgacgccttgtattttcaacagccatggagttttcaggaggccacgaaacaggataatttttcctcaggaaagggtatgatgaaaactgaaaactcttcttccatgcagagtttttcccctgagattgctagtgtccaaactaaccatagcaatgggtttcaatccgattatggcaattaccccccacaatctcagactttaagtagaaggtcagatgatgggtacaattggaggaaatatggccaaaaacaagtgaagggaagtgaaaatccaagaagttattacaaatgcacataccccaattgccctacaaagaagaaggttgagaggactttagatggacaaattactgagatagtttataagggtactcataacccatcctaggctgataatactaggagaaacttatcgaac

SEQ ID NO: 29244 - DNA, 1834 bp, Glycine max
  Clone ID: TF_GmC397_2
ctccagttgcaacatactaagtgggttggctggtttagatctgagcaacagcttttaattttctacttgcttgaattttattggaagtttccttcttcaacttgtgctccttctaagtgctactccctccctatatatatatgcttctctcacttcacaaacttaatttgaacctctcatcttgctcatcatctggaatttatttggcagtcatggattattcatcatggattaacacttccttggatctcaacattaatctccatagggttcacgaagaacttcccaaaaagcaggtggaaaacaattttttctcattggatttggaggtgaagaaatcttctgtaaaacaagagtcagcaggtgccttggcggaggaactgaagcgggtgagtgcagaaaacaagaagttaaccgaaatgctcacagagatgtgtgagaactacaacactttgcgaagcaatttgatggaatacatgaggaagaatcctgataaggagctcagctcatcaaggaaaaggaagtctgcaagcagcaacaacaatagtactattccaatgggagtcaacggaacctctgaaagcagctcaaccgatgaggaatcctgcaagaatccaaaggaagacatgaagacaaaaatttcaagagtttatatgaggacagaagcatctgatacaagccttattgttaaagatggataccaatggaggaaatatgggcaaaaggtgaccagagataacccttgtcctagagcatatttcaagtgctcttttgctcctagctgccctgtcaaaaagaaggtaaatatatataatcaaccaagtgctaactagtaactaggaaatggtttggtttggttactcacatgttagtagggaaatggatctcaagctaagtttgttttgtttttggtttggttattcaggtgcaaagaagtgtggatgatcaatctgttctggttgctacttatgaaggggagcacaatcatcctcagttttcttcccagatggaagcaacatcaggttctggccgtagtgtgacccttggttcagtgccctgtaccgcatctctcagcacttcaacaccaacacttgttacccttgacttgacaaaatctcagggaagcaacgattccaagagcacaaagcctaaaggagattcacctaaagtacctcaggttttggtggaacagatggctacttctttgaccacggatcctaattttagagcagcacttgttgctgccatctcaggaagattgttgcacaataattaaatggaattttggtgaagtgttgctaatttagtgtcaattgtttaagtattccataaaatagagatcattctttagagcaaggggtctctctatgtaaatacaacatggaaggctgggacatatttgatcctttaaagtggaaataaagttccactaaggatgacatgttgagctgattaaacaacagaaaatcaagctctgcaccaccctctgcctcatcatgatggtaaagatttagcaagtcttttttggctaatatatctaggatacctcaaattaaatttcatagtaggttgtagcacacattctcggaaagatctttcataaagtgcatctctacggcaatttaatttctcccttttcttctctcactactctctctggcaagccaactctatatctagtcctagttttagaatttcatttcagaaattatattatacattgatcaagtattataagtgatggaatgtaactcaaaacatggaaaaatgaaaaaagggggtccgcatgattacgatttgctaaaataataaagattttgtgccctagggcccc

SEQ ID NO: 29245 - DNA, 717 bp, Glycine max
  Clone ID: TF_LIB4392-029-R1-N1-B6
gagtctcaatatgttactattatacttgttttcacacacgcatttgaaaaaaacataaagatccctacctatatatagcaacatagttatcaactttaacctggctcctcctacttgacggtatctctatactggtggtacctgtacctgtttatctgttcttgacttaaatgactcattacagagtcagtgattaacatgatccgcagaaaaactgaacaaacaaatcaatcgaaattagaggatcatatcatctcacggtcacttcaatttcagatccaattgagacagatagaaaacactaaataaagcagattatccaagccaatcagtatactagaaatcaaactgaagaaagtcaagtcagatctaatattaataatgtttcaacatgatttgaactttagaaatcaattgcaacgctaattcgattggaaaaagaagaaagcatgtgtggctgaccttgttcactgggcagcttggggcatatgaacacttgaagtaagccctaggagaagggttatctctggtgacttttttaccatattttctccactgatatctgtccctcacatacagcaaaaatatccttgctcagattgatgccacaagatgccttgctaattcctcctcgagttatgtgcaaaattctatcaaatacatctggatgaccatagtggaatcgcaccctgtattgcccaagaaggcaagaaccat

SEQ ID NO: 29246 - DNA, 798 bp, Glycine max
  Clone ID: TF_GmC142606_1
gtttaagactcaatggaaagcaaagacccaccaaacccaccaccccaaaacaaccctttcatattcactcctaattcgatgttgcaaaaccctaattgggaccctcaagagcaatcagggctatgtgacattgattggggtaaccttttctctgcccaaaacggcttattgcttaatggggatgctaaagatgaaattgaatgtgcttcttctttttcttttgtggctcaaaataagggagtttgtgaagaggaaaagggaaacaaggagaaaaggaaaggtgggaggatgaagaaaacaacacgagtgccaaggtttgcgtttcaaacgagaagtgcagatgatattttggatgatggttatcgctggaggaaatatggtcagaaagctgtgaagaataacacatatccaagaagctactaccgctgcacgcatcacacgtgcaatgtgaagaaacaagtgcaaaggctatccaaagacacaagcattgtggtgacgacttacgagggaattcacaaccacccgtgcgagaagttgatggaaactctaacccctctcctcaagcaaatacagtttcttgccagcttgtaacgtggaactggtttctctcctacaactacatgcatatcaagcacatttcgtttatgtttaaatatcattagttaatcacgcacatgtagatcaattgctgtaagattattttaacctaacaataggtgttgagttcgagtactgaatctattaattccttggagagtattgaatctattaaatattaaataaaaaaaaaaaaaaaaa

SEQ ID NO: 29247 - DNA, 2118 bp, Glycine max
  Clone ID: TF_GmC1278_1
aaaattttcacctatctcatcaatttccatattcatgaccacttctttctctgaccttctttcttctcccaccacccaccacaacctcggagttttcgaaagacctcatcataagtcctcctcgtcggatcaaacaggttcttcaggcggtgtgccgaaattcaagtccacaccccctccttctctccctcttagccatcatcttccaccaatattttctccttcttcttactttaacttatcatccctcatgggttaagccttgctgaactacttgactccccagttctccttaactcttccaacgttttgccatctccaacaactggatcatttgctggtcaaggcttcaactggaagagcagttatggggaaagccagcagcatgtcaaagaagaagacaagagcttctcaagtttctcctttcaaacacaaacacaccctcctcttccatcttcaaatggatttcaatcttcaaccggcgtagttcaaaccggatggagttttccagaaattgctaaacaagatggttttgcctcaagaatgagtatgagcatggtgaaaactgaaaccacttctgcgatgcagagtttcaactctgagaataataaccacaggaatggttttcaatcagatcataaaaattaccaaccacaacaagttcagaccttaagcagaagatcagatgatgggtacaattggaggaaatatgggcaaaagcaagtgaaaggaagtgaaaatccaagaagctactacaagtgcacataccccatcaaatggattcagttgccttagatggacaaattactgagatagtttacaaaggcactcataaccatcccaagcctcaagctgcgaagaggaactcattgtctgcctcatcacttgcaattcctcattcaaatcatggcggcattaatgaactaccacatcaaatggattcggttgccactcctgaaaactcatcaatatcaatggaagatgatgattttgatcatactaaatcaggaggagatgagtttgataatgatgaacctgatgccaaaagatggagaatagaaggtgaaaatgagggtatgccagctatagaaagtagaacagtgagagaacccagagttgtgtttcagacaaccagtgacatcgatattctagatgatggatacaggtggaggaaatacgggcagaaagtggtcaagggaaatccaaatccaaggagttactacaagtgcacattccctggatgtccagtgaggaaccacgtagagagagcctcacaagacctaagggcagtgatcacaacctatgagggaaaacacaaccatgacgtgcctgcagcacgtggaagtggcaacaactctatgaatagatcattgccaataaccaataccacaaacaacactagtgcagcaacttctctatacactaataacaattctcttcagagtcttagaccaccagcagcaccagaaaggacatcatcacatttcaaccccaacatgcagcagagttcatcaggaagttttggattctcagggtttggaaatccattaatggggtcttacacgaatcaacaatctgacaatgttttcatcactagagccaaaaaggagcctggagatgactcgtttcttgactctttcctatgctaaaagaatattttcttatgcatagttttggatggttggaattcttggaaggggttggtttaggattttacttgactaataagatacccggttcattccatttatttataacttaggtattttaatttctgtttgtaagttttagtacttaattgacgttgtttatttatgtaacaaaaatttgcattagaattcaacatgagttattaaggtgaaactctaattataacagaagaataacactaaaaatactttaaaaaattacatttaagtttcatccactttttttaattttgtattgttattgtaaaaattgcatgcaagtttttggtatatggtaattttgtattattattgtttgttgtaacaaacacacagattggtatgctattttctatatattttttagtaatcgtgtgacttcagttgggagctagaaactctttttatcattattttagtaatcatgtgg

SEQ ID NO: 29248 - DNA, 1073 bp, Glycine max
  Clone ID: TF_GmC351_3
aaatttagagtcgtaaaaatctaaatatcgaatttttaaagattacatgtaattaattttgattttgcttgtaacatgttctttttaaaaataaataaaggtgatttattttagcaattttgttctctgatatctatatatattttcgcgtgactctgtaggaaaatgaggttgaagagggtagtgagggtaccagctataagcttgaagatggctgatattccaccagatgattattcttggaggaaatatggacagaaaccaattaaaggatcgcctcatccaaggtacatcaaatactatgttactactatataactaatttaatttaaattatttttctttttgcaaagtttattcgtcttggactatcgttagtttatttggtataattggtaattgctagtttgtttatatagataaatattaaatttattagtagagtggatcgaatcccgtaacattttttttctttaaaatcatccaatttaccttatatgtctctcacttgatttcaaaatttaaagtggacccaattaatttgtttcttttatgctgtttctgagtacctattgaatctgaggagtggtcatgggtgttaattttttggttttgggaatgataattgcaggggttactacaagtgcagtagtgtgagagggtgtccagcgcgaaaacatgtggaaagagctttggatgatccagctatgctggtggtaacatacgagggagagcacaatcacactgtctctgctgccgatgctactaatctcattctagaatcgtcttgaaattcgtagccaaaatcatcttttttccgtgacaaggtttagaaacgcaagccatcatttaatcaacgttacaagttttcaacggggtgcaattatggcgtgttgaattgaattgcaactttactactctagtcagtcaggggggcattaaaatctccaaagaaattagtagtgggtgttgttccctttccctgtacactattggattcttttttatctttatttttttttttctcgttctcttcaaggctaaatggaacattgtgaatccgttgcatcatt

SEQ ID NO: 29249 - DNA, 463 bp, Glycine max
  Clone ID: TF_jC-gmro02910003h07a1
tgagctcggaattcggctcgagctacaaagctgtctgatttttcatctgagaggactgcttcttagtctgtatacccgtcaatccagaacttgtcctcagaaatggctgccggtaaaaccagatttacaatgtgagccaggtccagggtcttggtattccgactatactagtgcatctgtgtctgttccagatcaaaagatagcagaacatgggttcaactgtagaaattatggacagaatctcgtgaaagggagtgaaaatcctcataggtattacaagtgcactcatgctaattgctcagtgaacaagacagtggagaagactttggaaggacaaatgactgaagtagtatataagggccatcataaccaccctaaactgcagtctactagaagaacaaactctcaatcaatgaataaaccttcttcatcgtgcacaaattcatggatatctgatcaatca

SEQ ID NO: 29250 - DNA, 500 bp, Glycine max
  Clone ID: TF_jC-gmst024160g10a1
ggctcgagggcctctgtgttttcttgtaccactgcctgcttcgataccaatactgttgatgacagaaaatcaagtttctttgagttcaaaccactcagcagatctaatatggttcctgcagacttcaacaaccatgtaagtaaacaatctactcaagtagaaggtccaggaaaaactcaatcatttgcttcctcaccattagtggaaagtgagatagcagttccttctaatgaattaagcctatcatcacctgtacaaaaggttagttctagtgctagtgctcctgttgatgttgacttggatgacattaaccacataggcaacacagctactgggcttcaagcatcacatgttgaggttagaggcaagtggactttcagttgcagctgagaaaacatctgatgatggatacaattggcgaaaatacgggcaaaagcttgctaaggaagttgattttcttgcagttatacaaatgtacacatcccactgtgagtgaaaaa

SEQ ID NO: 29251 - DNA, 2066 bp, Glycine max
  unsure (1)..(2066): unsure at all n locations
  Clone ID: TF_GmC581_1
aagctgaagcgtttttttttttttttgttggtttcttttgttggatctagagaacccactcgtgcttgtgagtcccaggagatcgaggttaaactcagtttttatatatacagctgggaaatgaaaattcactgaagccactttttagcatgttgccacttctcagatttctgaatcacatgtaaagtgagcagcacactttacaaaacagacatattgaagatgcatatcaaggaagcagaaagggtggtcattgccaaaccagttgcatcaaggccaacttgttctactttcaaatctttctcagagctcctagcaggtgcaatcaatgcttctcccgctattccatcttctcaaacaacagtttctgccattagaccaaagacagtgaggttcaagccagcaatgaatcaacccccttctgggtttgttttttctcaggctgatacttttggagctgcacttgataattcctctgagatgagtcctaaacttgacaccaaacagtccctcatatacaagccaacggcaaaactcgtatcaaagacaactgtgtctcttttggcaaatatgggaaattgcagtactagtcggcaacaaacacagcaaccaatggaggccaattttcaacattccatccatgaaaaatttagaacccaaccgagctcaaatcttgatcagagtattaccccgcaaacagaaataaattatcagagcagtgaacctagtaagatggtgcagcagaacatagaggaggaccaaaaagttttaacatcctcagtcaattgtgatcgaccttcttatgatggatacaattggaggaaatatggtcagaagcaagtgaaagggagcgagtacccgcgaagttattacaagtgcacacatcctaattgtccagtgaaaaagaaggttgaaagatcatttgatgggaatattgcagaaattgtttataaaggtgaacacaaccattcgaagccacagcttcataagcgaaactcagcagcagggacacaaggatcaggggttatgtctgatggaatggttcaagatatgtggagtaatagtcacagtgagaggaacgaaggcaatgaagttagaattgagaacacaggattgtctatgcattcagattattatgtcaaagttccacagcctaatgattcttcattaaatattggtgcaactaatgctggtggaggaagcatggaaaactcttgtggtctaagtggggaatatgaggaaggaagcaagggatttgaggcacaggaagatgaacacagaagtaaaagaaggaaaaatgagaatcaatccaatgaagcagcattatcagaggaaggtttagtagagccgcggattgtgatgcaaagttttacggattctgaagttcttggagatggctttcgctggaggaaatatgggcagaaggtggtgaaaggcaatccataccccagaagttactttagatgtactaatatcatgtgtaacgttcgcaaacacgtggagagagcaatagatgacccgagatcatttgtgactacatatgagggaaagcacaatcatgagatgccactcaagaacacaggaactgtagcatctgaaagagattcacaggcttctcttagtaaagataaaccatgattgacacttcaattagttaacaagtatgattcaatagcattggcagacatctgaaataattcagaggatgcattccttttatatcctatagtatgctcagaataattgaagttgatcagaaagatcaagacattgacaatttcaaatgcagtacctacttagactaggatatttgttgataataaccgtattggtgctgataaattgtattatatatggaatcaagggcactggcttagaggactgcccttcaataactttccatctctgctagctgcctttgtataccaaaccggtatattctattctctatcatcatatataaattaatctggagtactatatatcatatgctaaaaaaaaaaaaaaaaaaaaaaaaaaaacgccacaagcccccccattagccccggctaccgggaatnnnnatg

SEQ ID NO: 29252 - DNA, 2251 bp, Glycine max
  Clone ID: TF_GmC4714_1
ggaatgaatgagttgtgtaagaaagagatccatccaatgttgcaagtcaactgagtagtcctgctatgctctgctctgctctcccaaacatctctgacacaacacacaccaaaatgcataattgaaatgacccttttgcccttccttccttccctacttctcctttgactctccgcaacgccaccgcccacaatggacggcaccaccaactccggcgaaccccgctccagttcggtgctccaaaatactggggcatccgaggatccgaatcgaagcgggtcgggtcagaattcgatggcgaggtacaagctgatgtcaccggcgaagcttccgatctcgaggtcgccgtgcatcacgattcctccggggctcagtccgacgtcgtttctggaatccccggttcttctttccaacatgaaggtggaggcttcaccaactacagggtccctccgcaagctccaacaaacagtgcatggttctatggcttctgctgcctctgctacatttccagtaaccactgcctgcttcgataccaatactgttgatgccagaaaatcaagtttctttgagttcaaaccactcagcagatcgaataaggttcctgcagaaactcatactagcatatccaacttcaagtttgttcataaaagctcagcaccagtataatttggtgcttcaaataacagctttgaaagtgagatatcagttccttctagggatgaaggtccatctttaaacctatcatcatatccatgcagtcagagcatgggaagaatactaatgggtcatgaaagttgattacaccacaacacagaaatagagaattaagcgtcacattttgctttcttttttcttatttttggcgggtatagcttcaaaggtgtaacatctcattttctgtaagaaaatgcagatagttcttttatgtttatatcactattccatagttgctgtttagtaaagttggtagcagctccagtgaggtgaaaaaactttttgaacgctctcatgatggtcaaatcactgagatagtttacaagggaacacatgatcatcctaaacctcaatcaagctgccgatactctactggtactgttatgtatattcaaggagagagatctgataaggcttctttggctggccgagatgacaaagcatccactatgtatggtcaggtgtctcatgctgctgagcccaacagtactccagagtcatcacctgtagccacaaatgatgatggtttagagggtgctgggtttgtgtcaaacaggaataatgaagaggttgatgatgacgatcccttctcaaagcgaagaaaaatggaacttggaaatgttgacatcactccagtagttaagcctatccgggaaccacgtgttgttgtacaaactttgagtgaggttgacatattggatgatgggtaccgctggcgtaagtatggccaaaaggtggtgagaggcaatcctaacccaaggagctattacaaatgcacaaatgctggttgaccctgtccgaaaacatgtggagagagcatctcatgatccgaaagcagtgataaccacatacgagggtaaacacaatcatgatgtacctgctgcaaggaatagcagccatgacatggcagtaccagcagctacagcaggtggacagacaagaattaagttagaagaaagtgataccattagccttgaccttggaatgggaattagctcagctgctgaacatagatcaaatgggcaagggaaaatgctgcattcagagttgggggagacacaaactcacgccagcaattccaacttcaagtttgttcatactacctcagctccagtatactttggtgttctaaataacagctcaaatccctatggttctagagacaataggagtgatggtccatctttaaaccattcctcatatccatgcccacagagcatgggaagaatactattgggtccatgaagttgattacacaacagatattaaaataaaaactgagtaacaatttgcttttttcttcttatttttggcgggtatagcttcaaaggcgtaacatctcattttctgtaagaaaatgcagatagttcttttatgcttatagcactattcgagagctgctgtttagtagaattggtagcagctccatcttgacttttaaatctaattgccgtttgtaattgtataattatatccaaattcttctgtataaatatgaagccgatatcaaagttacctccacaaaaccttagtcctc

SEQ ID NO: 29253 - DNA, 1135 bp, Glycine max
  Clone ID: TF_GmC373_1
aactcggcttcttcaggaatgggagtggaaggacctcttgatgatggatatagttggagaaaatatggccagaaagatatccttggagccttgtacccgaggtaattaaaaccaaatttaaccctcacaaactattatgtttacattctaatttctaagtctcatggattgaactagatttatataattatatactttgtctgtatgcaggggctattacagatgtacccacagaaatgttcaaggctgtatggcaacaaagcaagtgcaaagatccgatgaagaccccaccattttcgaaatcacttaccgaggaaaacacacctgcacagtggccaacaacgtgggttcttcatcaccaattccactagaaaaccaggaaccaagtttgaacaacacaaatattcctcagcatcagcatcagcagaatatcctgcaaagccatgaacaacaacaaaacgaactacttctgagcctgcggaaagggttgagagtccaaacagaaaacctagattcccccgaacaaccattagttccattccgtttccctttgtccacaaacataaaaaacgaaagccatgtttttccttcccctgtgcttgaaaacttcacttctccttcttatgtttcccctgctgcatcaggaataggccacttttctgtgtctccaagtggagtagtgaacagctttgaagggaacccaaatttggcaaattctgagtctcagatcaatgatatgatccctgccactactacaacttcagcagctccaaactcatcaaccgttggcttagagtttccctttgaccagtttgaatttgatggccagaacttcacattcgataacccacggtttttctcttgaatatgctcaattcagagaagaagccaaataaatcataaaaactaattaattttttttaaaaatgaactagaagcatatggtgaaagtttgtggtaacattctagaataatatgaccctttagaaaaagaggcaaaaacatttcaatgtatgtcttagtcagctacttgtgtcgtaggaagaatgtgcaattctaaaattgcttagtcaataagaattttcctttatcattaaaaacatgtcaagttaatatctggtaggtttttctttta

SEQ ID NO: 29254 - DNA, 317 bp, Glycine max
  Clone ID: TF_LIB3050-015-Q1-E1-F6
aagcgatacgacaacagaaagggggcaaaaaccgctcaatggatccccgtactcgagggggtattacacatgcaatagcgtcaaaaggtctccgacgcggacacacatggaccgtactccggacgatccggcaatgtcgactgtgacatatgaatgagagcaccgtcactcgattccagagaacatttccggtcgagtgtgtttgagattcaatcacagtcaaggtagctgcaagcttaatctgacattagtacatcagtagattaaatcacaagggaaacatagtcggctctcaccaagatcatcgtaatcaacat

SEQ ID NO: 29255 - DNA, 650 bp, Glycine max
  Clone ID: TF_700874291_FLI
attaattaatactgtagtaccatctcttcaatgtgaataaaatcaatttaattaactatgttgactcttgataaagatttatatatgcatcaaggctcaagaccgccaagttaactttaattgatttctattttgtaaataatcaagaccatatatattttaattaatgattaggtgcaaagaagtgtagaagatccaagtgtgttggtaacaacttacgaaggggagcacaaccatgggcaacaacatcaaactgcagaaatatcaattaattcatcaagcaaaagtgaaacacctaggcctgcagtttcaccctcagccatgaatattcggagtagtgcagcagcaggtccaattgtaacacttgacttggtcaagtcaaaagttgttgacattaatgcgcaaaagtcatctctccagcagtttttagttcaccaaatggctacttctttgacaagagatcctaatttcacagccgcacttgcttctgccatctctggaagaattctagatgatacttctgtgggaaaacgttgaattattaagagatatatatgtattaatttcactgatgaacatatatgaattttgtcacttttcttcgttttaatatttaataacagctagtcacgaggagtagtgttctatgc

SEQ ID NO: 29256 - DNA, 726 bp, Glycine max
  Clone ID: TF_GmC26844_1
ggtctatttcacacgcaccttcacttccacatttgtagcttatatctcctcacttaagcaccctcttatttggcacatcagtagctcactttggcttgttgagagcaattcagcaaccaaaggccttagctacaactaaaactaggagagcaattccattgccgttgctgttattagttcattttcacaaaatggaagagagcaccaagaggaaacacactaatctgatccatgaactaatccaaggaaaggaactaacaaagcagctcagtgaccatctggtttcatcttctccaacgtcccatgaaaccaatgaattgttggttgagaaaatacttttgtcctatgagaaagcactcaccatgctgaactgggggtctattatgggagaggccaaaaccaccagtggcaacatcatggattcccattgttcttttacaaatggtgaaagccccagaagtgaggtcgtggaccgtgaatttgagcacaaagctgtcttcaagaaaagaaagaccatgcccagatggaccgagcaattgtgaagatttgctcaagaacaggacttgaagggtctttggatgatggatatagctggagaaaatatggccaaaaggatattctcggagctacatttccaagaagatattacagatgcacacagagaaatgtacaacggtgtctagcatcataacaagctcaaaggtcagatgaagacactacaacaat

SEQ ID NO: 29257 - DNA, 415 bp, Glycine max
  Clone ID: TF_uC-gmroLIB3259P236f07a1
tcgcgatctagaactgagactctgaaacacgtttgcgagaactatgttgctttgcagaaacatttaaatgaattcagccaactgaggaacgcaaattttgataaagaagcaggaacagtaccgtcactgaagagaaaggccgagagtgtgaatctgtttggtattaacaactatactgagtgcagcaccatcactgaggaagaaacattcaaaaggcccaagcatagcaccgagccaaaggtttccaaagttcttacacgaacagatgcatctgataccggcttatatgtgagggacggatatcagtggagaaaatatggtcaaaaagtcaccagagataacccttctcctagggcttacttcaagtgttcatatgccccaagctgcccagtgaagaagaaggtgcaaagaagtg

SEQ ID NO: 29258 - DNA, 900 bp, Glycine max
  unsure (1)..(900): unsure at all n locations
  Clone ID: TF_GmC94_2
atagttcagttgagtgggtgtggtgagtaaaaaagaacatgaaaccttgtgaccacaaggttcaacttgtgagggggatcaaaacattcctagattggaatatggcaaaacttggttgttctagtcgtaggaaagcaattgaggagctccttagagggcgtgattgtgccaaacaacttaggagtgtcatcaatgggagttgtgaagatggatcatcaacaaccccatcatttgctgaacaacttgtgaaggaggtgctcatgtccttcaccaactccctctcgttcttgaagaacaaccccacttctgaatcccatgatgtttccaatgttcaagtttgtgaatctcccaagtctgaggactcccaagagagcaattgcaagagctccatcattaaggaacgtagagggtgctacaagagaagaagaactgaacaaacatgggagaaggaatctgaagctccaattgatgacggccatcagtggagaaagtatggccaaaaggagatcctgagtgccaaattcccaaggaactactatagatgcactcacaaatttgaccaaggttgccaagcaacaaaacaggtgcaaagagttcaagaggaaccaatcctatacaagaccacctactatggcctccacacttgcaagaacttggcaaaccctgagatcatacttgaccctatgtccccttcatcctcatccaagttccttagctttgacaactccttcccaaccccatcaaagcaagagtgcccctttctctcatcttctaatttgccatcatcagtgaaagggggagtgcagggaggaggtcccctccctcaacttncctcccatcatatctcatctcttctgacctcacttttgatagtcaccaggcatcatgtactctatcatc

SEQ ID NO: 29259 - DNA, 224 bp, Glycine max
  Clone ID: TF_700832484H1
atcatcgcgtgatacagtaggtacatgacgctgcagagggtagtgacggtaccgcatataatcttggagatggctgatattccaccagatgattactcttggagaaagtattgacataaacccattaaaggagcacctcatccaatgggtcactacgagtgcagtcgtgtgacagggtgtccagcgcgcaaacatgtggaacgagctttgggtgatcccgctat

SEQ ID NO: 29260 - DNA, 269 bp, Glycine max
  Clone ID: TF_701123986H1
gtgttgtcccctatttcatcttcatcatctacttctccatctgactttaaacttggtgatcacaattctaatgctcatgtcaaataggcaggtttattaaaaactcaaaggccaagcctgaaaggtggcaaagaaatcaagcagcacagatatgcatttcaaacaaggagtcatgttgatatactggatgatgggtaccggtggagaaagtatggggagaagtccgtgaaaaacaataaatttcctaggtttgtcttacttcattaatt

SEQ ID NO: 29261 - DNA, 440 bp, Glycine max
  Clone ID: TF_8283852
acgagtatcgttcaaacaacgcggaggcttgtcctgatgctgcagaagatgttcttgaccggtcctcttcacagagttggggatcatccaagttagaggaacaacccaaaactgcagaacaacttcctgcagaacagattcctctcagaaaagccagggtttccgtccgtgctagatcagaagctcccatgataagcgatggatgtcagtggaggaaatatggacaaaaaatggccaagggtaacccttgccctcgtgcttactatcgctgcactatggctgtaggatgcccggtccgaaaacaggttcaaagatgtgcagatgacaaagcagtgttgattaccacctacgaagggcattacaaccaccctttggcggccggccgcaccggcatggcgaatactacgtcaacagccgcaaccatgctgctttcaggttcg

SEQ ID NO: 29262 - DNA, 1507 bp, Glycine max
  Clone ID: TF_GmC667_1
tcgaggcggccgggccggaatttgctctcacgtcccctaataaacaaagacatagccaatctgtcaacacaggaagctctagaaaggggcaccccaccttctctctcctcctccccctttaatttccttttccttaattgtcttaatttccttgtattctggtataatctagctaaccctttttttccattagccatggtcatcaccatcgccaccttctaggtgggatccagggctcaatatataatatcacactcaacacagttaccagctccaaatctcaacaaatggatagcaagttcagaaaaaagaaccgcaacgttaactcatataccagtgaacaagatcaagacactgatatagctcaagaaaaccttgccgagtcccctccttcttccactgtgttcaacatcgatggcttagtcccctcccccacttcctcatcaaagagaaggagggcaatacagaaaagggtggtgcaaatcccaatgaaggagacagaagggtgtaggctaaaaggagagagcaacaccccaccctcggattcatgggcatggagaaagtacggccagaaacccatcaagggttccccttatcccagagggtactacaggtgtagcagttcgaaggggtgtccggcacggaaacaagtggaaaggagctgcgtggaccccacgatgctagtcgtcacttactcctccgaccacaaccatccctggccaccttctagaaaccacgccaggcccaccaaaaaacctgaaccggttccggacccggtcgaaccggaggagaagttcgcggacgagtccatgataacaaccgcggaagaattggggtggctgggggagatggaagcgacgtcgtccacggttctcgaaagcccgtttatggctacgacgtaccatgctgacgtggcgctgattccgatgagggaggaggacgagtcgctcttcgccgacctcggagagctgccggagtgctcggtagtgttccggcaggggctgctggcggagcggcggcggtacacggcgccgtggtgtgggaccacaagttgagggcaaaaaagtcaacacgaaaagaaaaaaagtagaaaaactagaggtgcctgttagacgcgttcttcgtgcgccacaagagaaaaagataccagcatttttttcctttttagtattgagatattttttattttttttgttttaccgttgttaagacattaattaaaaattaaaagttattgtaaaaattataaaaatattcaaaagaagttataaacaatattattttatgtattttaataaaaaaaatatttttttaatttttttgactaatatcctaaatagcggtagactttacctatattttactttattgagagtagaaaatggaaaagaaaaaaaggaaaataggagaagtagggttgaagaataaaagggcagttagggaagtggttgtaattagcgtaactttccgcgtccatttcaacaacttgcattgcacaatgtttgac

SEQ ID NO: 29263 - DNA, 1510 bp, Glycine max
  Clone ID: TF_GmC351_2
atttactcaatatgcacaccttctttctttgtttaattctcctctctctctctctttctctcttacacccttccattttctccttctcttcctcccatggtgtaattgctccaactatggccgtggacctcatgacgacgggttgcagccgaaacgacaacatcaatagtttcacaaccaaagccgaggaaaatgccgtccaagaagctgcttccggcttagagagcatcgagaagctcatcagactcctctcgcaaacccaaacccaaacccgccatcaaatcaacaacaatagctctaatgaaatcgccatcgccatggactgcaaggtcgtcgctgacgtggcagtctccaagttcaagaaggtcatatccctcctcggccgaacccgtaccggccacgccaggttccgacgcgcccctctccccaaccaaaaccaacacactcaacctccctccgaaccacccgtgttccacgctacgccgctgcaccagatcccaccaccctcccttcaccaaattcccaaaactgaaaggaaccttaacgattcctcctcttctaaaaccattcatttctcatacccctccgccgctacctccttcatctcctccctcaccggcgacggcgccgccgacaacaaacaaccttcctcgtcgccgcccgcggcggcggcgacgacgacgccctttcagatcacgagcctctcgcacgtgtcgtccgcggggaagcctccgctttcgacttcctctttcaagagaaagtgcagctctgagaatttaggctctggaaaatgcggtagctcctccagccgctgtcattgttccaaaaagagtaggaaaatgaggttgaagagggtagtgagggtaccggctataagcttgaagatggctgatattccaccagatgattattcttggagaaagtatggacagaaaccaattaaaggatcacctcatccaaggggttactacaagtgcagtagtgtgagagggtgtccagcgcgaaaacatgtggaacgagctttggatgatccagctatgctggtggtaacctacgagggagagcacaatcacactctctctgctgctgatgctactaatctcattctagaatcgtcttgaaagtcgtaaccaaatcatcttttttccgtgacaaggttttaattaagtagtagaagaaacgcaaaccattattaatcaacgttacaagttttcaacgggagcaattatggcgtgttgaattgaattgcaactttactctagtcagtcaggggcattaatcttgaaagatattattagtgggtgctgttccctttccctgtacaatattggattctttttcttctttttttaaatcttttatttcctatttctcgttctcttcaaggctgaatgaaacattgtgaatccgttgcatcattagaaaaaaaattgtcaagggtggtggttgatttggtaacggatttgaatctcggaattaaaaaaaaaaaaagcaagtgggttttggtttt

SEQ ID NO: 29264 - DNA, 219 bp, Glycine max
  Clone ID: TF_jC-gmXLIB3563P059ch12a1
gaaatatggacagaagatggctatggggaatccatgccctactgcatactacagatgcactatgggcgtaggttgtcctattggtaaaccagatcaaccgggtgctgatgatagaacaatcttggtgacaacatatgaaggcgcacataaccatccactgccgccagctggagtggtagatgccgtggacatcccatcaagagggtgcggttggatatg

SEQ ID NO: 29265 - DNA, 1841 bp, Glycine max
  unsure (1)..(1841): unsure at all n locations
  Clone ID: TF_GmC3118_4
aacccaaatccattcatccaagttccaagatgaagatgattcactttcttttcctctttgctcttgtctcgttcacttcccatgcttctgtcaatgatttctgtgtagcagacctaaaaggtccagatagcccttcaggctatcagtgcaagccacctaacacagtcacagtggatgactttgtgttctctggctttgtagctggaaacaccacaaacactttcaatgctgcattaacctccgcatttgttactgattttccaggtgtgaatggtcttggtgtatctgcggcacggttagacatagccaaaggtggatcaatcccaatgcacacacaccctgctgccactgaacttctaataatggtggaaggtcaaatcactgctggttttatgaccccaactgcactttataccaagacactgaaacctggagatattatggtttttccacaaggacagttgcattttcaggttaattctggaaacggaaaagccactgcttttctggcattcagtagtgcaaaccctggagcacaactacttgaccttctgttatttggcaacaccttgccttctgacttggttgcacaaactaccttccttgatgttgcacaagtcaagaaacttaaggctcgtttcggtggcagaggctaggaatattattgctcatgaatttattcctatctaatgtttgttgctatttatagtccataataatgcctgtgtatgcccttgccttttccatttcgatgtttggatcattcccttaaaaatgattcctctattgatttatctcattttcaagaaacttttgtttcttgccatgttttactgctgaatccaaatcaccattgttcaatcttctttttggctctcggtcattgacatgcttttccttcaaaataattttaccattctcaacattagatgagttttctagattcttatcaccattgcagggtgcttcttgcaaaggttctttcggagaagatgatggatcagaattattcagaactttggtagactgctttggaacactgctttcttctttaggttcactggaaggcaggagcttactttccttggtggtatcaattttatgcggaggatcatgattatgttgacttttataaacaatctctatcacatgtcctgaatggtcacaaatttaattcttcttagcacaacnatttgaatgggtacacttgtaatagcttcgagaacccataggattcttcacttgcttctggccgtacttccgccagttgtatccatcagatgcagatgcccttacagcagaaacagaagataaggttgtaccatcagaaggtgttcctttgtctcctttcgacacttgtacactattagccttgggaggagatggtctctgttgtgatacagtgggactaagggcagatgataaagaatgtgaaacagaagttggtgatagttcagataatgaagttgaacaaacagactgaagttgattttctgtctgtttttgaggtgcctcaactgcatctttttcaatagtttcctcatcaggaggctgagctgacaccttactctcagcttttccacctttatgtgcggtagagctgccctgcatatgagtggcaaggtcatgcggaagcgaggagcggtgaactagggtttccgagttgggtggcgctccatcagaaggagtggaagtgcgtgactcggtggagagggacgagtcagtgactcgttgctgcgtctcttcatcctcttccatgacagtgcactgcacaacgacaacttttctcttcagtctatgattattccaccacgaattttcattttctcgctggctttttg

SEQ ID NO: 29266 - DNA, 1340 bp, Glycine max
  Clone ID: TF_GmC667_2
tcggtcccctaataaacaaagaccaagccaaccctttttatttgaaagcttgtaaaggggcacacccctttctctctcctccttccccctttaatttccttttccttcttaattgtcttaatttcccttgtattctggtaatctagctaaccctttttatttccattagccacgatatcatcaccatcgccaccttctaggtgggatccagggtcaacaatatcacactcagcacagttaccaactccaaatctcaagaaatggatagtaagttcagaaaaaacaaccgcaactcatataccagtgaacaagatcaagacactgatcatgatgtagctcaagaaaacattgccgagtcccctccttcttccactgtgttcaacatcgatggcttagtcccatcccccactccttcatcaaagagaaggagggcaatacagaaaagggtggtgcaaatcccaatgaaggagacagaagggtgtaggctaaaaggagagagcaacaccccaccctcggattcatgggcttggagaaagtatggacagaaacccatcaagggttccccttatcccagagggtactacaggtgtagcagtaccaagggctgtccggcacggaaacaagtggaaaggagctgcgtggaccccacaatgctagtcgtcacttactcctccgaccacaaccatccatggccaccttctagaaaccacgccaggcccaccaagaagcctgaaccggttccggacccggtccaacccgaaccggaggagaagttcgcggacctgggcggggacgactccatgataaccaccgcggaggaattgggctggctgggggagatggaaacgacgtcatccacggtgctcgaaagccccattatggccacgggctaccacgctgacgtggcgctgattccgatgagggaggaggacgagtcgctcttcgccgacctcggggagctgccggagtgctcggtggtattccggcaggggctgctgacggagcggcggcggtacaccgcgccgtggtgtgggaccacaagttgagggcaaaaaagtcaacaaaaaaaaaaagaaagaagaaaaactagaggtgcctgtttgacacgttcttcgtgcggcacaagagaaaaagatagcagcattattttttaaaattaaaaatattaatttatgttattttagtttgttgagagtagaaaatggaaaagagaaaataggaaaagtagggttggggatgaagaagaataaatggaagtttggggggaggagtgagagaatatgtgtatgttgagaagtggttgtaattagcgtaactttgaacagcttgcccaacaagat

SEQ ID NO: 29267 - DNA, 625 bp, Glycine max
  Clone ID: TF_GmC1123_4
cactctggcaaattattgaaccatacgacggatccatccactagtccggaagccgctatgagaaaagctcgtgtctcagttcgtgcccgatcagaagcacccatgatcagtgatgggtgccaatggcgaaaatatggacaaaagatggctaagggaaacccttgtcctcgagcatactacagatgcaccatggcagttggttgcccagttcgcaaacaagttcaacgttgtgcggaggacagaacaattttgacaacaacgtacgaggggacccataaccatccactgccaccagctgcaatggctatggcatcgaccactgcagctgctgctagcatgttgttgtctgggtcaatgaccagtgctgacggaataatgaaccccaatttgctaactagagctattcttccatgttctagcatggcaacactttcagcttcagcaccattccccacagtgacattggacctcacacacaaccaaaacgcgtttcagaattaccaaagacctcaaaccccattgttcccatcacagccccaggactttatcgctggatccacgccaccacaactgccgcaactgattgcacaagcgctctatatcaatccaaattctcaggccttca

SEQ ID NO: 29268 - DNA, 3006 bp, Glycine max
  Clone ID: TF_GmC652_2
tcgacccacgcgtccgcccacgtgttcgtacggctgcgagaagacgacgagggggaaattaaggatgactgaaaaacagaatatgaaaggataagtgatgcagcaaatcacagccaaggttttttgtcaagataacactataactttgaagtgttttcttttcttattctcttcacaatatgaattataaagcatgtaatgtagggccaatttggaataacacaccagcagatgctagcacagatctcatctcaagctgtgcaaacccactctgaacatccattctctatatcagccgtatctgctacctcatcatgtgctgcacaacagctgattccaccctcaatgccagattctaaggtgaaagaatcccttgattattctcactctgaacaaaaattgcagtcttctgtgaatgttgataataagcctaataatgatggttacaactggaggaagtatgggcaaaaacatgtgaaaggtagtgacttctcaagaagttattataagtgcacacgtccaaattgtcctgtgaagaaaaaacttgagcgttctcttgagggtcatgtgactgcaattatttataaaggagaacacaatcatcaacgtcctcatcgcagtaagattgtgaaagaaacacaaacttcaaatgaaaattcagtgtctaagatggatctagggtctagtcaggccacaggtgaacatggatcaggaacacgtgatagtgaggaagtacatgaccatgaaactgaagcagttggaaagttttatgattctgcagaaacacagaagtcaggctccaggatccagcctctttacatagaactgtagcagagactagaatcattgtgcaaacaacaagtgaagtggatctcttagatgatggatatcgatggcgcaaatatgggcagaaagttgtcaaaggcaacccatatccaaggtgatattggttttctccctacactttgattgcttatatttaagtaataattatggatgagcaatatcattgctaaaagtaacaagtatgagagaagaagacacgattgagtacgaataaacaagttgaacaacatacaagtgagatgacctcatactttaatgttttaaggcattaagttagatatgatgaaagttcatttaaattgttagattgtgaatcgttaatgaaggtatctcccacctttttaatcagcttgtatttcctaacattgtccataacagctttcaagaaatttgattcccataatgcttaattattcaccatactcagattatgatactccatatattatggtgtacatttccacgaattttcccactattctgcttttttattgtttgacttgtctaggaaaagaaggtgatgcatgtttttatgatatgtaggagctattacaaatgtgcaacccaaggttgcaatgttcggaagcatgttgagagggcttcaatggatcctaaagctgtcctaacaacatacgaaggaaaacacaatcatgatgtgccggtagctaagactaatagccacacacttgccaacaatagtgcatcacagctaaaagcacaaaatattgccatacccgacgacaagcatagtttcagcagtaggggtgttcgggggaatgaacagcgacctttgggaagtctaagattgaaggaagagcagataacatagttttcttagttcatagtctaatctatctttttctcataattcgacatatatacaataggcaagattgtaaaattggtcccccactttatctccaattacggatttggtccccctataatttaattcacaaatttggtctctcaattttataaatttctgcaaaattggtcctggaagtccgatttggacattgaccgttaatctcagacgttgactgtcacatgtcaatgccacgtgtcaacgtctaagtggtttccggtaaaggtttcattttttgtaggtaaaattacatttttggtccctcagttttactccaattttaattttggtcctctttaatttaattcacacatttggtccccccaattttataaatccctttataaattgttcctacaaaattggtcttttgaatggtttagccactggtactagagacatgatagaccttgataaattttgcactccttttttatcgcaagtttttcactcacttggaacccagagaaaaatcactctttatctctctcccaatttcggggttattcaacttgagaaagtggcgtatgaatcccagcctaggtccgaaattttcaaatctcttgctttaacaggttttgtaataaccccccccccccctttttttttcgttttttgctcccccatgtggtattatgtgtatacgacttaagtggtctatgtatgacaatgatatttttgtttgaaatttgaaatacgacttctccagtaatgaaatttggttgaatttataaaggaatttacaaaactgagggaccaaatgtgtgaattaaattataaggggatcaaaatcgaaattgtagcaaaactgggggaccaaaagtacaattttacctacaaaaaatgaagcatttacagagaaccactcagacgttgacacgtggcagtcaacgtctgaggttaacagtcaacgtttaaatcgggcttctaggaccaattgtacagggatttataagactgggaaaccaaatttgtgaattaaattataggaagaccaaatccaaaattagagataaactaggggaccaaaagtgaaattttgcctatacaatattatgttcaactcaccgcattactatacaacacaacaaacttgttctatacaactcagaaatttgatgtcaaagtaacaaaatgaaatgaagcacaaaacgaattgaatggtaaatagccaaattcgtctttgaaagtgtgatgggttgacaaattagtccttaaaagatgaaaattttaaatttaatttttgaatgtacaaaaaaaagtgtgctaaattaatgggccaatttaatgat

SEQ ID NO: 29269 - DNA, 521 bp, Glycine max
  Clone ID: TF_GmC1323_1
attgaggttgaagagggtgatcagagtgccggctattagttccaagaatgctgatatcccacccgatgagtattcgtggagaaaatatggacagaaacctatcaaaggctctccacaccctagaggttattacaagtgcaccagcgtgagaggctgccctgcacgtaaacacgtggagcgtgctgtggacgattccaacatgctcgttgtcacctacgaaggagaacataatcactcgcaaatcacttctgaggtggcaaatgttatccttgaatcttcttagcctaccttaattaagactagcgccaatgcttttagttcattcatatataggattttttaattgttatggtctttgtctcttaaaaaaataaatccccctcctctttccttgaagtagttactttaaaattcgttgaaatactttattaaaaacaggagtactattggttggtctttgtaagacttattatatagaaaatgtaaagaaattaaacagcactaaagtgttgagttgaaaa

SEQ ID NO: 29270 - DNA, 733 bp, Glycine max
  Clone ID: TF_GmC127755_2
cggtcgcgtgggcggacgcgtgggctctgtgtctctttctctttctctttctctctcttggaattcatggttagaggtggtggactccaatccatggattcagatccaattgggagcttcttcctccacaagccaattgttctcaactctttcccagctgaagacacaaacaacaagtggaaaaaacttagtctccaccacaacatggatgccacagctagcaataccaaagataacaccatcccctttcaagtcagccttagatgttctccaaacaatcatggtgatgggatattagttccaaggcagtttatggatcttgggttggctgctaataatggtactagcactggtattgaaccctcttcttcatcaggaggaagaagccaagatcgatcaagatcacccaacgtagaagtggcttccaaggaattagggacaaatgatgaagaagagaagaaagagtatggtagagggatagagagagaggatgatagtccctcagggcatgctcataaagttccaaggttcagtcctccaaaggataataatagtgttgaggctgaggctactatgaggaaggcaagagtttctgttagagctcgatcagagacacccatgattgctgatgggtgtcaatggagaaagtatgggcagaaaatggccaaaggaaacccatgtcctagagcttattataggtgtagcatggcatcggcttgcccagttagaaaac

SEQ ID NO: 29271 - DNA, 365 bp, Glycine max
  Clone ID: TF_LIB3051-037-Q1-K1-F6
gactgaacaagtgatcaaagcatcagaagagaaagtagctctacaaggattgaaagtcacgcgcagcacctaaatgtaaaaaaagcaagaagagccagaacaagagtgtggtgaagcaggtgacaacagcagaaggtcttgatgatgcatgggcatggcgaaaatatggacagaaaccaataaagggttcaccctatcctcgaagctattatagatgcagcagttccaaagggtgtttggcgaggaaacaggttgaaaggagccacttagatcctgcggtttttctggtaacctacactgctgaacacagccatccccacccaactcgaagaaactctcttgctgggaccactaggaagaacaat

SEQ ID NO: 29272 - DNA, 613 bp, Glycine max
  Clone ID: TF_GmC1330_4
ttcctccgcccaccggaaaaagtgccgcgacgctgcgccggcactctccaccaaaccctcctgccactgctccaagaaaaggaaatcacgcgtgaaacgaacgattcgtgtgccggcggtaagctccaagatcgccgatatcccatcggacgagtactcgtggagaaaatacggtcaaaaaccgatcaagggttcaccttaccctcgagggtactacaagtgcagcaccgtgagagggtgtccggcgaggaagcacgtggagcgagcgcaagataaccccaagatgctaatagtgacttacgagggtgagcaccgtcacgttcttccgttaactgccgctgccggcgttagtttcggccattaatagagttgagtaatcgacgtcgtcgtttcggaaacctgacgggggacgttagatgaccgtcggatcgtgacggtaacggcggatgcgaacgaggttcggttcgtggacggaaaaaagagggaatgaaactatgaaagccaacatttgcgttgtggtctttgacggagtctcttatgttgacgaggacttttgtgtaaatttgacccaaagtaaagttagtacaggtctcgaaaaaatgaaattatagtg

SEQ ID NO: 29273 - DNA, 685 bp, Glycine max
  unsure (1)..(685): unsure at all n locations
  Clone ID: TF_LIB4390-038-R1-K1-B9
ggctgatgaggacattatagacttgggatgattgaaattgtccttgaattttcatgtgatgtctgcaacaatctcaacatcttctagcacaaatcttgcatccacagttctatgtagtactttgctgtagattaactacaaaaaaaatttcgtggctcttctattttctgtcctggaagcatgtttgagaaattattcttgcatttcgtagtcttggcatatactccttcctgataactcatataactgtaaggttcatgctcttctattatttgcaccttattggtaatcaggtgaaaggtgaaggtgaaacacatgttttatgtttgagaaaaccgaccataattccccctttttattttcaggggatattataagtgcagcagcatgagagggtgtcctgcaaggaagcatgttgagaggtgcttggaagagcctaccatgctaattgttacctatgaaggcgaacataaccaccccaagttaccaacacaatctgcaaatgcatgaactatgtggagagcttaaccagatcaagcccatcattcaatttgtcaaaacctctctgtgattggcttgagatgctgctgtacatattntaagtgatgcaaacaagcagggatgatggatattgttggcgcagattttgtcttttggatagtttggctaaccagccgttttattt

SEQ ID NO: 29274 - DNA, 1338 bp, Glycine max
  Clone ID: TF_GmC855_1
ctcactctcaccatttttctctcctcaacccattgcccactcacctattcactatttctatcatattatagttatagttatagttataacatagcaatagcaaattatatatatacatcgaccacccagatttaatttcactccaacccatcatgcatcaccgtagattcagcaaattaatacatgtggctgacccagatgagcctgagtcggggcccgagcccgcctccgaagctgggcctgcttctccttctgcccgtgaagacacaaaaactgaagcaccgttacccaagaaccggtgattattcaaattttcaattttagtttgcctagatgagaatggggaagttaaagagtgagggggtgaatctgtgttcatgaaaccatacgtaggagggagatgaagaagagggtggtgacgataccgatcggtgacgtggatggatctaagagcaaaggagaaaattatccaccgtcggattcatgggcctggaggaagtacggccaaaagcccatcaaaggctccccttacccaaggggatattaccgatgcagcagttcaaaggggtgtcccgcaaggaagcaagttgagcgaagccgtgtggaccccacaaagctaatagtcacctacgcatatgaacacaaccactccctccctctcccaaaatcaaattcctccgcggcttccgccgctgtaagcgacggcgccacctcctcctcaccggcagattccgccgccaggtacccgccggaggaggagatgaaggtgttcgcgacggactcagacctcgaactcgccggcgacgcggcggttctgctcagccaccaccaccaccaccacttcgggtggttcgatgacgtgacgtccaccggcgtcctcgaaagcccgatctgcggcgaggtggatgacgtggcggtgccgatgagggaggaggacgagtcgctcttcgccgatctcggcgagttgccggagtgctcggcggttttccggcggaggaatattccggcgaccagcgcgatccggtgcggcggcatcacaggataacgcgggtggacccgtttttcttttgtgtcgcgttgttgcgtagtgatttatattatattagccgcctgaaagtcgtgcgctattaaaaaaaaagttggaaaagtaaagaaataattaattaaataaattaatttataattcatggatttttttttctttttcttgcgttgtacatttgaataaacaattgattacagcaagctaccttcttttgcagaaaaatttttaacaaacaaaaaaaaaaaaaaaaaaaaaaaaaaaaaaaaaaagaaaaaaaaaaaaaaaaaaaaaaa

SEQ ID NO: 29275 - DNA, 1178 bp, Glycine max
  Clone ID: TF_GmC1329_1
tctcaatcaattcggcgaacgtcttcgcccgccaccccctcgcggctgccgggtctagctctgggaggggaccttctggtgcagtcctcaccgcctgggtattcggcaggcggggtggtggaccttggtggcggggccatgggctcgaacggggtgactggcaatcctggcccttcctattcccctcctgggggttgtactggtagggttcctctgggtggggctcttgccccaggtgaaattgacatacttgatgatggatataggtggaggaaatatggacagaaagtagttaaaggaaacccaaacccaaggagttactacaaatgcgtagccccgggttgtccagtgagaaaacatgttgagagagcttcacatgacatgaaagctgtgattacgacttatgaagggaaacatatccatgatgtaccattaggacgaggaaactcaagctatagcatgaacagaaattctctaaacaacacctccaacaacaccaacaccagcaatgtaacagctcctgctcctataaggccctcagcactgactaactattctaactcagcaagtttcacaaactcacttcatgacacaaagcaaccaacatctgcaggtcaagaaccttttccaatggacttgctgctgagccctggaagcatcggattttcggctaatgactcattccttcagtcttttttgtcaaagaacttttaaatttggaagcagaagaacactagaacgttacacataaaaatatcactgatatgtttatgtatagcataggggaatagaataagaaaatcatgagcatctactaattttagtgcactaagattagagactagaactacagcattctaaagcttgacaagagttagtccttgtttcaactttcaatttagaacaccagaacgttacaataaaaatatcactgatatgtttatgtatagcatataggaatagaataagaaaatcatgagcatctactaattttagtgtactaagattagagactagaactacagcattctaaagcttcacaagagttgggcattgtttcaactttcaatttagtaataggagagacagaaaacatgttgaccttgaattctattattcttttgttgcttttgttcaattgttttctaagatttatactagttgttgccaatgtctac

SEQ ID NO: 29276 - DNA, 469 bp, Glycine max
  Clone ID: TF_uC-gmroLIB3259P207a09a1
aacagaatgcttttttttttttcattgttcctaacagaaagcactaattgggattcatttgtaaatggctgacatggtcttttggataagtttacaaattgcaaatcattttaaaacactggggggactatccccattaaaacaggcaaagcgaacgcatcgtacatgcatatttatttcccttattaaccatcattagctaattggccagtggttgttcatttagcatatacctaaggccactggaacaaactaaactatgttctcatgcttctaatcaaatgctaattaaacttgtttaatttattacaagaaaaagtttaatgggaaaagagcttcaatctaaccttggaaacttagctatgagaatattcttttggccatattttgtccaggtatatacatcatccaatgacccttcaaggcctcttcttgagcaaatatttacttgctcggctcatttgggcat

SEQ ID NO: 29277 - DNA, 1423 bp, Glycine max
  Clone ID: TF_GmC362_1
ccagtgaagccgcacacacaaatatacatcttggctcaatttgagagttcaagttttctttttccccaaacccaaagattttaggttacagaaaatggcatcttgtcctcctttcctttcttatcttcccatgacactttgagagttcaagtttccttttctttcctacaaatccaaaataatagttttagtttacaaaatggctgtggaactcatggggttcccaaaactagacgaacaaaaggccattcaagaagccgcatcagaaggcctcaagggcatgaaacacctgatccgaaccctttccaaccaaccctctcacttaaacaccgaacttaccgacgttaccgtttcaaagttcaagaaacttatttcactcttaaatcgaaccggccacgcccggttcagacgcgccccggttcagtactcatctccacacgcacccgttcacaacactaacgcttccacctcatcaattcaactccctcctccgccgcaaaaccctaatattcccgcgctggcgcagtttcctactccggcgccggtggccgtgcaccacacgccggtgacgctcgatttcacgaagccgcacaacgcgcttctgagctccaacgccaaatccgtcgagctcgagttctcgaaggaaaccttcagcgtttcctctaactcctctttcatgtcctccgcgatcaccggcgacggcagcgtctccaatgggaagattttcctcgcgccaccggcgacctccgccggaaaacgtccggcgttcaagaagcggtgccacgaacaccgcgaacactccgacgatgtctccggcaacagcaagtgccactgcgttaagcgaaggaaaaatagggtgaagagcactgtgagagtgccggcgattagttcaaaagtcgccgatattccaccggacgagtactcgtggaggaagtacggtcagaaaccgatcaagggttccccatacccaaggggttactacaagtgcagcacgattagagggtgcccagcgaggaagcacgtggagcgcgcaccagacgatcctgcaatgctgatagtgacgtacgagggggagcacaggcacgcggttcaggctgcgatgcaggagaacgcagccggggtggtggggttggtgttcgagtcaacgtagagaatgagaaagaaggtccaataaaaaaataataataaatttggaagtggaggacttttttaaaaaatatatatatataatttttggaaagtgtagtgggaagaaccaagaagtaaggacaatggctgccttgtaaatttgttttatttttatctttattattattgttatattttagttgtcatagactcgtagagaggtgaaaaatggaatctcaagttgtttatttatttctatctcctttgcctcaaaaaaaaaaaaaaaaaaaaaaaa

SEQ ID NO: 29278 - DNA, 2657 bp, Glycine max
  Clone ID: TF_GmC421_1
tttggctcttacttttgtccaactttttgaaagtttttatactttgaagttccattaagaaatatgtaaattgagaatcccattaaggaattcctcactctcttgctaataataatataaagtgtttaatgtaaaaagcatgttaaagagttttccattctcgatcaatcagaatttataataggtaagaattgtaaggtactagtagttcttattcttataggaagttaacaacttaccatatatgacaattgtaaatgcatatactattttctctaatgtaaatgtggtaaaaacattatagctgcatgatggcttctatttctttgtctacatcttttcaaaccttacaatgactttttttttttgttgaaattctacagtacactaaacttgtacctgtttcccttttccttgtctaaaaattccttggtcaaatttggcaactttcgtttttccaatgtgtccatgtgatttagaagaataatagcactcctagatgggcttgtctgatactgtgctaaactttgacatgtgatctctccacacccctctcatggcatcttcttctggtagtttagacacctctgcaagtgcaaactccttcaccaacttcaccttctccacacaccctttcatgaccacttctttctctgaccttcttgcttctcccacagacaacaacaaaccaccacatggtggtggtggtggtttgtctgagagaactggctctggtgtccccaaattcaagtccacaccaccaccttctctgcctctctctccccctcccatttctccttcttcctacttttctattcctcctggtttgagccctgctgagcttcttgactcacctgttctccttaactcttccaacattctgccatctccaacaactggagcatttgttgctcggagcttcaattggaagagcagttccggggggaaccagcgaattgtcaaagaagaagacaaaggcttctcaaatttctcttttcaaacccaataaggacctcctgcttcatccacagcaacatatcagtcttcaaatgtcacagttcaaacacaacagccatggagttatcaggagaccacaaagcaggataatttttcttcaggaaagagcatgatgaaaactgaaaaatcttcatccatgcaaagtttttcccctgagattgctagtgtccaaaataatcatagcaatgggtttcaatcggattatggcaattaccccccacaatctcagaccttaagcagaaggtcagatgatgggtacaattggaggaaatatggccaaaaacaagtgaagggaagtgaaaatccaagaagttattacaaatgcacataccccaaatgccctacaaagaagaaggtggagatctttagatggacaacatactgctatcgtttgtaaggttactcataaccatcctaaacctcaaaatactaggaaaaactcatcaaattcctcttctcttgcaatccctcaatcaaatcccattatagctgaaatccctgctcatccctaggccacacacaagtgcacacaaatggattctgccagcgagccagcaaactcatcaatatcaataggagatgatgattttgagcagagttctcaaaagtgtaaatcaggaggggatgaatatgatgaagatgaacctgatgccaaaagatggaaaattgaaggtgaaaatgagggtatgtctgcccctggaagtagaacagtaagagaacctagagttgtagttcagacaaccagtgacattgatatcctagatgatgggtataggtggagaaaatacgggcagaaagtagtgaagggcaatccaaatccaaggagttactacaagtgtacacacccaggatgtccagtgaggaagcatgtggaaagagcttcacatgacctaagggctgtgatcacaacctatgaggggaagcacaaccatgatgttcctgcagctcgtggcagtggcagccattctgttaacagaccaatgccaaacaatgcttcaaaccctaccaacactgcagccactgccataagtcccttgcaagtgatccaacacagtgacaattcccatcagaaccaaagatctcaagcaccaccagaggggcaatcacccttcaccctagagatgctacaaagtccaggaagttttggattctcagggtttgggaatccaatgcaatcttacatgaatcagcagcaacaacaactatctgacaatgttttctcttccagagccaaggaggagcctagagatgacatgttccttgagtctctactatgctgaaggaatttctttttggtagctatggaaggttggaaattttggaagggggggactaggatttattggacaaataaggttcattccatttattgcattttttggtttgtttttgttgtaaattttatacagccacacaggattggtatagtatatatttcataactgttgtatgtttttacacatggtgttggtgaaattttttgattactttggggtttctcttttagttgggaggagaaccttatgttaatcttttgtaagattctgttaattttttcctgtcttcacaattgttcactatcaaaatagtaaagtttcacaagaaatgtgaattatttttgctaaaaatgataaaaaaaa

SEQ ID NO: 29279 - DNA, 384 bp, Glycine max
  Clone ID: TF_GmC362_5
aagtgcagcccggtgagagggtgcccagcgaggaagcacgtggagcgcgcaccagacgatccggcgatgctgatagtgacgtacgagggggagcacaggcaccccgttcaggccccgatgcaggagaacccagccggggtggtggggttggtgttcgagtcaacgtagagagaaaaagagagagggtccaataaaaaaattggaagtggaggactttttctaaaaatatattataatttttggagagtgtagtgggaacaaaagcaatagctgctttgtaaatttgttttttattttttattgttatattttagttgtcatatgactcccagagaggtgaaaaatggaatctcaagttgtttatttctatttatctcctttgcc

SEQ ID NO: 29280 - DNA, 1760 bp, Glycine max
  Clone ID: TF_GmC351_1
aaagtaaaaaaataaaattatattcggacataaggaggaacttactgataaaaaaattaaaaaagccttcttgattaaaatttgtttgccttaataggaataatcgttttttctatggcctgagagcgtgtgagcattcacatttgacggaaacagggtagcgtgagagtcgagtcacctgccgaaatcctatagcaccattttgaccaaggcgatatagctaacagctattcgcccccccatactttctttaattttctccttctcccatggtgtaattgctccaactatggccgtggacctcatgacgaccggttacacccgaaacgacaacatcagtagtttcacaaccaaagccgaggaaaatgccgtccaagaagccgcttctggtctagagagcgtcgagaagctcatcagactcctctcccaaacccaagcccaagcccaagcccaccatcaattcaacaacaacaatagctctagtaatgaaatcgccatcgccatggactgcaaagccgtcgctgacgtggcagtctccaagttccagaaggtcatttccctcctcggccgaacccgtaccggccacgccaggttccgacgcgcccctctccccaaccaacaccaacacacccaacctccctccgaaccgcccgttctccacgctaccccgctgcaccagatcccacctccctcccttcaccaaatccccaaaaccgagaaacacctcaacgattcatcgtctaagacgcttcatttctcatacccctccgccgttacttccttcgtctcctccctcaccggcgacgccgccgacaacaaacaaccatccccggcggccacgaccacgacctcccactttcagatcacgagcctctctcacgtgtcgtccgcggggaagcctccgctttcgtcttcctctttcaagagaaagtgcagctctgagaatttaggttctggaaagtgcggtagctcctctagccgctgtcattgttccaaaaagaggaaaatgaggttgaagagggtagtgagggtaccagctataagcttgaagatggctgatattccaccagatgattattcttggaggaaatatggacagaaaccaattaaaggatcgcctcatccaaggggttactacaagtgcagtagtgtgagagggtgtccagcgcgaaaacatgtggaaagagctttggatgatccagctatgctggtggtaacatacgagggagagcacaatcacactgtctctgctgccgatgctactaatctcattctagaatcgtcttgaaattcgtagccaaaatcatcttttttccgtgacaaggtttagaaacgcaagccatcatttaatcaacgttacaagttttcaacggggtgcaattatggcgtgttgaattgaattgcaactttactactctagtcagtcaggggggcattaaaatctccaaagaaattagtagtgggtgttgttccctttccctgtacactattggattcttttttatctttattttttttttctcgttctcttcaaggctaaatggaacattgtgaatccgttgcatcattaaaaaaaatattgtcaaggatgattgtgatggtggatttggtaagggatttgaatctcgatttttttttattttttttttataaaaaaagcaagtgggtgttggttttaaaaaatcccaaacctctgaacacacctcagcgaatctcaacttcaagcacaccatcgccccctttgtaaccgtcacaacctc

SEQ ID NO: 29281 - DNA, 702 bp, Glycine max
  unsure (1)..(702): unsure at all n locations
  Clone ID: TF_LIB4390-010-R1-K1-C1
cgacccatncgtccgctaaatttagagtcgtaaaaatctaaatatcgactttttaaagattacatgtaattaattttgattttgcttgtaacatgttctttttaaaaataaataaaggtgatttattttagcaattttgttctcttgatatctatatatattttcgcgtgactctgtaggaaaatgaggttgaagagggtagtgagggtaccagctattatcttgaagatggctgatattccaccagatgattattcttggaggaaatatggacagaaaccaattaaaggatcgcctcatccaaggggttactacaagtgcagtagtgtgagagggtgtccagcgcgaaaacatgtggaaagagctttggatgatccagctatgctggtggtaacatacgagggagagcacaatcacactgtctctgctgccgatgctactaatctcattctagaatcgtcttgaaattcgtagccaaaatcatcttttttccgtgacaaggtttagaaacgcaagccatcatttaatcaacgttacaagttttcaacggggtgcaattatggcgtgttgaattgaattgcaactttactactctagtcagtcaggggggcattaaaatctccaaagaaattagtagtggggtgttggttcccttttcctgtacactattggatncttttttaatcttattttttttttctc

SEQ ID NO: 29282 - DNA, 443 bp, Glycine max
  Clone ID: TF_jC-gmXLIB3563P026cd04a1
aggacatgtgatagagattgtttataaaagtcaacataatcatgatcctccgcataaaattgataccaccaaggaaagtaagctcctgccttccagtgaacctaaagaagaaagcagtgttccaaagcagtctaccaaagttctgaataattctgatccatcatcttctccgaaagaacctttgcaagaagcaccctgcaatggtgataagaatctagaaaactcatctaatgttgagaatggtaaaattattttgaaggaaaagcatgtcaatgaccgagagccaaaaagaagattgaacaatggtgatttggattcagcagtaaaacatggcaagaaaccaaagtttgttgtacatgcgacagaggatgtggggatatcaggtgatggataccggtggcgcaagtatggacaaaagttggtgaagggaaatccacatttca

SEQ ID NO: 29283 - DNA, 1492 bp, Glycine max
  Clone ID: TF_GmC5708_2
ttctatttgattcacaccttcacactgtctctatcaccaatcccttatatcccccctccacttagcataccataattcaccgtcaatttccccattgatgatccatttggcatttcatcatatttcaccacttgtcctactccacttggataatttcctaacgtatagttttcaaaaatccttgttcttcatgagcttatagtttatgagtcctacgatttttggcaattcagcaacactatagatatattattgcagaggatattacagatgcacatatagaaatgtacaaggatgtctggccacaaagcaggtgcaaaagtcagatgaagacccaatgatatgtgaaataacctacaaaggaagacacacatgcacccaagcaagtcacttaaacaaaacagtgatacccccatcaaagacaaaggtgaacttgttgggagaaaataagcaccaaacccatcaaattaagaatcaaccacggcaagagaaaatagaacaacaaccaccagagacatttttcacatttggatcatcatcaggtcttgaagttaaaatagaggacatcgaccacaaggagggcatattcccatcattttgcttttcttctccatcaatagtagggtcagaaaatggggacgacaacaacagcagcatattctcatacaccatgattgagaacaacttaatggaaagcttctctcctgccttcatatctccaacaacttcagatatagaatcaaacactttctgccactgggggagcactggactaggccaaagtgtgcaaagctcagggtctgatatcactgatatagtttcagcaccaacttcagtcaccaattcaccaataatggaccttgatttctttttcgataagatcgatttcgacacagatttccctttgagcaccatggaactttgcacttaataaattgtccccacttctaagtttacagcatatgtgatttctatgcggattaactgtgagttttgtagatcctgactagcaccataaccgagggaaggaagtctataataatcaccatagatcatgtccataaatgaagacaatgaaaaacttccctcttgtgctaattaagagagttttcatgtacctaggctgcaatgtgaaaataatttgtaggttgtagcttaatttggtgcatgtttggtttgcaatggaaattgttgtaatgcgcgttccaatgtagatcttatggataaaagtaaaatgaaatcaaaagagttctaatcttttagcataatggagaacaacttaatggaaaacttctctcctacattcatatctccaacaagttcagatatagaatcaaacattttctaccactgggggagcactggaataggccaaagtgtgcaaagctcagagtctgatatcactgatatagtttcagcaccaacttcagtcaccaattctccaataatggaccttgatttcttcgataagatcgatttcgacacagatttc

SEQ ID NO: 29284 - DNA, 464 bp, Glycine max
  unsure (1)..(464): unsure at all n locations
  Clone ID: TF_GmC652_6
ctaggagctattacaaatgtacaacccaaggttgcaatgtgcggaagcacgtggagagggcttcaacagatcctaaagctgtcataacaacatatgaaggaaaacacaatcatgatgtgccagcagctaagaataacagccacactatggccagcaatactgcatcacagttaaaatcgcataataccaatcctgagaagcataattttggcagcagaggtatgggaggaaatgaacaacagccggttgcacggcttcggttgaaggaagagcagatcacctagttttctggaagaaacatccagtgaggaagaatttttctcacctcacttgtcatctttattttgatgttatcgtattcttttttagtctaaggcctaagttttgatcagggcctatcagtgcanatcctaataaacaaaatagtcaacactgatgcaagagggcaggggcaaaggttaaac

SEQ ID NO: 29285 - DNA, 1446 bp, Glycine max
  Clone ID: TF_GmC1067_1
atccaaatagtatttaataaaatttcgcgcctaactcaaggaggaattaacaaggcttcttttgacatcaatttaagcaagaaaatttttcctgtattcgttttggcctcaaccaacaataattctagtttctctcattccttctgtcccttaattgcgaagcaaatctttcttcttcccatggaaatggaaccgacgtgcgtcgacacttccctcaaccttaacgttattccttccccacacatcgaccacctcgcgggagaagttttgtttgaagagttgcggcgtctaagcagtgagaacaagaggctaactgagacgctgaaccacttgtgcgagagctatgttgccttgcagaaacatttgagtgaattcagccaacttaggaacgcaaattttgataaagaaggaacttgtgcagttccgtcgctaaagagaaagcccgagagtgagaattgtgtgaatctgtttggtactgagtgcaacaccatcacagaggaagaaacattcaaaaggcccaagcatagcaccgagccaaaggtttccaaagttcttacacggacagatgcatctgatactggcttatatgtgagggacggatatcagtggagaaaatacggtcagaaagtcactagagataacccttctcctagggcttacttcaagtgttcatatgcccctagctgtccagtaaaaaagaaggtgcaaagaagtgtagaagatccaagtgtgttggtaacaacttacgaaggggagcacaaccatgggcaacaacatcaaactgcagaaatatcaattaattcatcaagcaaaagtgaaacacctaggcctgcagtttcaccctcagccatgaatattcggagtagtgcagcagcaggtccaattgtaacacttgacttggtcaagtcaaaagttgttgacattaatgcgcaaaagtcatctctccagcagtttttagttcaccaaatggctacttctttgacaagagatcctaatttcacagccgcacttgcttctgccatctctggaagaattctagatgatacttctgtgggaaaacgttgaattattaagagatatatatgtattaatttcactgatgaacatatatgaattttgtcacttttcttcgttttaatatttaataacagctagtcacgaggagtagtgttctatgcaagtttttctgcggatcatgttaatcactgactctgtaatgagtcatttaagtcaagtgcagtagcaggtacaggtaccaccagtatagagataccgtcaagtaggaggagccaggttaaagttgataactatgttgctatatataggtagggatctttatgtttttttcaaatgcgtgtgtgaaaacaagtataatagtaacatattgagactctatccattgttaatactataataccctacccaaatttactcattgtcattcct

SEQ ID NO: 29286 - DNA, 727 bp, Glycine max
  Clone ID: TF_LIB4204-001-Q1-K1-F2
cccacgcgtccgtacggctgcgaggaagacgacagaagggtacggctgcgagaagacgacagaaggggatgttttgtttgctctctcctctcccttaacagtaactcaacaatcaagaggatcagatccataggaagttttatctgtccatcaccaaaaccgcgactgatcagtcaatcccatcaatcaaatcaaatcaaatcatcagaaagaaaagaaaagaaaagaaaagaaaaaaggaaatcaacaaaaagaggaacaacatgtcctcctcatccacttccttttcaccggaccaacacctctctccctccgaccagctctgctatgtccattgcaacttctgtgacactgtcctcgcggtgagtgttccttgcaccagcttgttcaagactgtcactgtgagatgtggtcattgcaccaatcttctctcagtcaatatgcgtggactgcttctccctagtgccaatcagcttcaccttggccacagcttcttcactcctcaaaatcttctggaggagattcgtaatgcaccttcaacaaacatgatgatgaatcaactgccgaaccctaatgatttggtcatgagcaccatgagaggcggacctgaagaaacccctaagcctccatcagctaatagacctccagagaagagacagcgagttccatctgcttacaaccgcttcatcaaggatgagatccaacgtatcaaagctgggaatcctga

SEQ ID NO: 29287 - DNA, 446 bp, Glycine max
  Clone ID: TF_10847320
gctccactctccagccaaaagaaagtagttcagaacaagatgctaacaagactttgaagagacataatgcatccatgatgacctattctgattgtgaggaagaggatgccattccaatgagtaatgttgtcaataaacccccagagaagagacagagaacaccatcagcttataactgcttcatcaaagaagagattaaaaggctaaaggctgagaaccctgacatggcccacagggaagcttttagtacagcagcaaaaaactgggccaatttccccccaactcagtgcaaagaagatgaagagagctgtagcagccagacagatcaacatgtggatcttgactcccaagtggaccctaatgctgtggtcaatgaagaagaaggtcaagggttacgtggaagaaaggtcccaaagaaatccatattggaaaggacaccgtttgaa

SEQ ID NO: 29288 - DNA, 735 bp, Glycine max
  Clone ID: TF_jC-gmXLIB3563P040dh04d2
ccacgcgtccgcggctgcgagaagacgacagaaggatacggctgcgagaagacgacagaaggatacggctgcgagaagacgacagaaggggaaacttatttactttatctcttaattagtatcatgtttttacttcttcttcttcttcttcttgttttaatttcgaacatttaggtgagtgttccttgcaccagcttgttcaagactgtcactgtgagatgtggtcattgcaccaatcttctctcagtcaatatgcgtggactgcttctccctagtgccaatcagcttcaccttggccacagcttcttcactcctcaaaatcttctggaggagattcgtaatgcaccttcaacaaacatgatgatgaatcaactgccgaaccctaatgatttggtcatgagcaccatgagagggggacctgaagaaacccctaagcctccatcagctaatagacctccagagaagagacagcgagttccatctgcttacaaccgcttcatcaaggatgagatccaacgtatcaaagctgggaatcctgatataagccacagagaggcctttagtgcagctgcaaagaattgggcccattttcccacattcatttcggacttatgcctgataatcaacccgtgaagaaagctaatgttcgtcaggagcagaggacgtgcctatgaaaggatgggtgtttcgcaccggctaatggaggcgtctctccctactagaggtgttttaata

SEQ ID NO: 29289 - DNA, 1332 bp, Glycine max
  Clone ID: TF_GmC4246_1
gtcttataggcttcggggtcttctgtaaatccttgatctagcttgtttcactttgcttcagtcaagaaactctcctctctataaatctactacgcaaacacaagggacagtcacaattatatttttttttatatgtctaaccacgcatccgaaaaaaaataaaaaagaaaaccaaaaaataatgtcaatggaaatgatggcaacggaacgtgtttgttatgttcactgcaacttctgcaacaccattctagcggttagtgttccatacagcagtttgctaaccatagtgacggttagatgtggacattgtgccaatttgttatcagttaacatgggagcttcacttcaagcatttccccctcaagaccctcagtcacagaaacagcacctaagctttcaagaaccaagcagcaaggaactgggatcatcttcaaaatgtagcaaaatagcgccatttgaggcagtagagcatgaactacctaggattcctcccattcgtcctacagagaagagacatcgtgttccttctgcttataatcgcttcattaaggaggaaattcaaaggattaaggctagtaatccagatatcagccacagggaggctttcagctcagcagccaaaaactgggcacatttccctcacattcactttgggttaaagaacttaaagctggatggcaacaagcaagaaaagttggaccagggggaaggagctgaaaagtctaatggattctactgataatggaagcctgtgagtatgaacttgtttttttcatgcttgacctaaatcagtgaaaaaatgaggttgatcaaatttcccaatatatcgtacaactggatgggagactcctgcaaattaacctcagcctctcacaccaatgtttaatagtactacatatatgtattgcccttttctatatatcgttgttatgaaatgattgctattcttgtgattgaatttattgtgttgaatttcttaagtatatattattattattttatgtatgcatgtgttgcgcgccctattttagatgttataaaatgattgctattcttgtgattgcattaaattactatgttgaacttagtttcttaagtaattaaacattattgtaagtttccttctctttataaaaatgtgtctttctatttagtaacgttgagagtccttcaagttaacctcagccttttacaccaatgtttaatagtactacatatatatgtattgcccttttctatatatcgttgttatgaaatgattgctattcttgtgattgcatttattgtgttgaatttgagcacttaagtaaacaacacgttcctctatatatc

SEQ ID NO: 29290 - DNA, 1638 bp, Glycine max
  Clone ID: TF_GmC47784_1
ccacgcgtccggtgtattcgatcctctaatacttaagtggcatatctcttccccctggtacggctgcgagaagacgacagaaggggctcttttccctttctttcattgtttgttttgtttgcactctcctctccccttaacagtaactcaacaatcaagaggatcagatccataggagaagttttatctgtccatcaccaaaaccgcgactactgatcagtcaatcccatcaatcaaatcaaatcatcagaaagaaaagaaaggaaagaaaagaagaaaaaaaaaagggaatcaacaaaaagaggaacaacagcaatatcaaacatgtcctcctcatccacttccttttcaccggaccaacaacacctctctccctccgaccagctctgctatgtccattgcaacttctgtgacactgtcctcgcggtgagtgttccttgcaccagcttgttcaagaatgtcactgtgagatgtggtcattgcaccaaccttctctcagtcaacatgcgtggactgcttcttcctagtgccaatcagcttcaccttggccacactttcttcactcctcaaaatcttatggaggagattcgtaatgcaccttcaacaaacatgatgatgaatcagctgccgaaccctaatgatttggtcatgagcaccatgagaggagggcctgaagaaacccctaagcctccatcagctaatagacctccagagaagagacagcgagttccgtctgcttacaaccgcttcatcaaggatgagatccaacgtatcaaagctgggaatcctgatataagccacagagaggcctttagtgcagctgcaaagaattgggcccattttccacacattcatttcggactcatgcctgataatcaacccgtgaagaaagctaatgttcgtcaggaagcagaggacgtgcttatgaaagatgggtttttcgcaccggctaatgtaggcgtctctccctactagaggtgtttttaatattgtagggctttgatgagtgttgttacccatgcatgtctctaatattaagtaattgtgtactaggactttgtcttatgcatattaatgttgtgcacttgtattagtacttgttagtgttaaaagttgttagtatatgtttaaaatcaatggtggaagggagttctgacgaagctagattagttcttctgaaaatgaagatggcttattttctcttgaactggtcccggaatgaatgaatgaatggtttcggaatgtagaaagctcaagttacaatatttaagctgaaaaaaaaaaaaaaaaaaaaaaaaaaaagcggccgctctagaggatcgctcgtgagaattttctctaattttcttaacctaatcactgttgaataagccgcaatatatttcatataaagcatttttcttctacttttttttcttctttgcataaaaacctaaaaaatcaaacctccccctgattttcatgtttgtttttcatttctttttctcgactatcctttttctacttcttgggggtggtgatcagagatccttctgatacccccaaagaaaagctagaggaaaagaaaaggggaactcttttgataccattcagtccatttcccttttctttttagctgatagtggagtgtcccttacc

SEQ ID NO: 29291 - DNA, 1161 bp, Glycine max
  unsure (1)..(1161): unsure at all n locations
  Clone ID: TF_GmC4246_3
ccggccggaatccggtcgaccacgcgtccgacggctgcgagaagacgacagaaggggaatgaaacaaaatattactacttcccttacctttctctctctctcaaaacctcatttgtcgtcctcttcatcaacctctttcttctgcctcaccaaccaatttgttttctttttgcaatgctggtgcttggaagcatctctccattgaatgtgatagcttcaattctccaacatttgtataaatactttaacatcgacaagtgtgaagctctgatattaatttggtcatggcgatggtccagacagttatgttagtgttccatgcagcagtttgctcaccatagttacggttagatgtggacactgtgccaatttgctgacagttaacatgggagcatcacttcaaacttttccttctcaagacactactcagttacagagacagcatctaagtgttcaagaagcatgcagcaaggaactaggatcatcatcaaagtgcaaatcatttgagactgtagaccatgagcagcaacctaggattcctcccattcgtcctcctgagaagagacaacgtgttccttctgcttataaccggttcattaaggaagaaatacaaagaattaaggctagtaatccagatatcagccacagggaagcatttagcacagcagccaaaaactgggcacatttccctcacattcactttgggttaaagctagacggcaataagcaagcaaagttggaccagggtgatggtactcaaaagtctaacggattttactgattacatatatataaacggaagtttatcattatcaactggttttttctgtgcttgacctaaatcagtgaaaaatgaggttgatcaaatttcctaatcataccaactggatgggaagactctcctgaaaattgacctcagcatctcacccatctttaatatatattattattattatatgtatgcatgtgttgcgcgccctattctagatgttatgaaatgattgctattcttgtgattgcattaaattactatgttgaacttagtctcttaagtaattaaacattattgtaagtttccttctctttataataatgtgtctttctatttagtaacgaaaaaaaaaaaaaaaaaaaaaaaaaaaaaagcggccgcntagagga

SEQ ID NO: 29292 - DNA, 226 bp, Glycine max
  unsure (1)..(226): unsure at all n locations
  Clone ID: TF_LIB3107-069-Q1-K1-E1
gaagcacgcagcaaggaacnaggancancancaaagngcaaaacagncgagaccgaacaccacgagcagcaaccaaggagaccncccaaacgaccaccggagaagagacaacgngnnccnncngcnnanaaccggancaacaaggaggaaacacaaagaagaaaggcnagnaanccagagancagccacagggaagcagnnagcacagcagccaaaaaccgggcac

SEQ ID NO: 29293 - DNA, 1035 bp, Glycine max
  unsure (1)..(1035): unsure at all n locations
  Clone ID: TF_GmC39846_1
acgagggttttaagagagagagagaataattaaaaggcccttgccttcacctttggtgtccaagatattgctagagagaagaactagttgttcaattagcttcatccatctttctacctccttaattctctttcccttcttcttcttccacccttcttgtgtttgagtacagaagcttgagatcagacatgtcgagctgcagcatcgatgttgcgcctgagcaactctgctacatcccctgcaacttttgcaatattgttcttgcggtgagtgttccatgcagtagcctgtttgacattgtgaccgttcgatgtgggcactgcaccaatctatggtccgtgaacatggccgccgcgtttcagtcactgtcatggcaagatgttcagggacctgggcagtgcaatccagagtacaggattgacactggctccacgtcgaaatgcaacaataggattgcaatgcgtgcacccaccactcatgtaactgaggaaagggttgtgaacaggcctcccgagaagaggcagcgcgtaccttctgcttataaccaggttataaaggaggagattcagaagatcactgctatcagtcctggtgtcgctttcagtacagctgcaaagacctgggcacattttccccatattcatttcgggctgatgttggagagcaacaaccaagttaagatggagaatgtttctgagaagcatttaatgtcaagggctgcgctattgaataaatgaatgctatcttcatcatatcacaggacttgggtttcatttgaatctgtcaagtaaacaatgtcctgacctaaaaggagttttaaggacaatcatctctttttcttcgttagtgtacttgtcactacttactacttgttcaatggatgcttttcacttaatttgaagcaagaatgctagttttcccttgtcatctttcaataagttctatcttctagctgattcagatgaaagatgaaatatgtatgctactgttttaagctcgatggcgagaacnnntatcatcatatttttnngnnat

SEQ ID NO: 29294 - DNA, 673 bp, Glycine max
  unsure (1)..(673): unsure at all n locations
  Clone ID: TF_LIB4280-022-R1-K1-E5
ccacgcgtccgtaaaaaataaatattgcaactgaaagtcaaaggaaatgattttgatatatgactggttgccattgtccagctcctgagaagagacagagagtcccctcagcgtacaatcgctttatcaaggacgagatccaacgcatcaagtctgtcaatcccgatataactcacagggaagccttcagtgcagctgcaaagaattgggcccacttcccacacatccactttggtctcatgcctgatcagactgtgaagaagacaaatgtgtgccagcaggatggagaagaggttctcatgaaagatgggttttatgcttcggctaatgtntggtgtctcaccctactaattcaccccagtctgttttctctttcgaagaaattatgcaaagaggaaaaattttccaagttccaccaacctatgaagctcaggaactctgattccttaacttataaatgcatctatttgtggctcaagagcgattatgttgatataactaaggactactactacactaggactagctttgggggggtgtgcattgcatgcatgtagttctcttcttatgagtagactntaattattaacttttcatggttcttcaattcccccagtactactgcagctgattgcttatctaatcaataattaattagccatacctttcagtt

SEQ ID NO: 29295 - DNA, 783 bp, Glycine max
  Clone ID: TF_GmC47784_4
gtgctgaatccattgggagagtgattgttaaagataatgatgaggtaatgatagaatagagagagagagagagagagagaaggggagagagagagagtgatttaggcaaaaggctcagcgaagttatttaatgttcctgtctgtttgcctgtgcaatgtccgtgtgttgtatgtccagctccagagaagagacagcgagttccgtctgcttacaaccgcttcatcaaggatgagatccaacgtatcaaagctgggaatcctgatataagccacagagaggcctttagtgcagctgcaaagaattgggcccattttccacacattcatttcggactcatgcctgataatcaacccgtgaagaaagctaatgttcgtcaggaagcagaggacgtgcttatgaaagatgggtttttcgcaccggctaatgtaggcgtctctccctactagaggtgtttaagaattttagggctttgagtattgttacccatgcatgtctctcattaagtaattgtgtactaggagtttgtcttatgcatatgaatgttgtgcacttgtattagtacttgttggtgttaaaagttgttagtttatgtttacaatcaatggtggaagggaattctgacgaagctagattagttcttctgaaaatgaagatggtttattttctgttgaactggtcctggaatgtagaaagctcaagttacgatatttaatttgaagtttttctttattcctaaaaaaaaaaaaaaaaaaaaaaaaaaagcggccgctctacaggatcca

SEQ ID NO: 29296 - DNA, 1307 bp, Glycine max
  unsure (1)..(1307): unsure at all n locations
  Clone ID: TF_GmC51271_1
ccacgcgtccgcccacgcgtccgtacggctgcgagaagacgacagaaggggagatcagcctctttctttctttctctctctctctctctctctgcacctttctttcacaactcaatcaaaaaaagcatatccaaggtgtggtggttaagctgtccatctatcaatcaatccaatcaatcaagagaccaatcatcaaccgaatataagagaacgaaaaaagggggctacccacaacgtcatcctctttcaccacattatcactggagttgtattctctggttatttctccgtcgccacctccctccttccgaacagctatgttatgttcactgcaacatttgtgacaccgtcctcgctgtaagtgttccttgcacaagcttgttcaagaccgtcacagtccgatgcggccattgcactaacctcctcccagtgaacatgcgagggttgcttatgccatctcccactcaatttcatttgggtcactctttcttctccccatctcataaccttctggaggagataccaaatccctctccaaattttctgatgaaccaaacaaatttaagtgcatcaaatgagttctctatgcctgctaggattgcagctgatgagcttccacggccaccgatcatgaatagacctcctgagaagagacagagagtcccctcagcgtacaatcgctttatcaaggacgagatccaacgcatcaagtctgtcaatcccgatataactcacagggaagccttcagtgcagctgcaaagaattgggctcacttcccacacatccactttggtctcatgcctgatcagactgtgaagaagacaaatgtgtgccagcaggatggagaagaggttctcatgaaagatgggttttatgcttcggctaatgttggtgtctcaccctactaattcaccccagtctattttctctttcgaagaaattatgcaaagaggaaaaattttccaagttccaccaacctatgaagctcaggaacgatctgattccttaatacttataaatgcatctatttgtggctcaagagcgattatgttgatataactaaggactactactactactacactatgatgattagctcttggggttgtgcatgcatgcatgtagttctcttcttatgattagactttaattattaactttcatgttcttcaattcccccagtactactgcagctgattgcttatctaatcaataattaattagccatactttcagtttaaaaaaaaaaaaaaaagggggggaggnngagaggggaaaagaaaaaaaaaaaaaaaaaaaaaaaaaa

SEQ ID NO: 29297 - DNA, 495 bp, Glycine max
  Clone ID: TF_GmC4246_5
acggctgcgagaagacgacagaaggggacaatttttttttttgtttaaaaaaatgtcaatggacatgatggcaaccgaacgtgtttgttatgttcactgcaacttctgcaacaccactctagcggttagtgttccatgcagcagtttgctcaccatagttacggttagatgtggacattgtgccaatttgctgacagttaacatgggagcatcacttcaaacttttccttctcaagacactactcagcgattttctaccgttggtaagttacagagacagcatctcagtgttcaagaagcatgcagcaaggaactaggatcatcatcaaagtgcaaaacatttgagaccgtagaccatgatcagcaacctacgattcctcctattcgtccttctgagaagagacaacgtgttccttctgcttataaccggttcattaaggaggaaatacaaagaattaaggctagtaatccagatatcagccacagggaagcatt

SEQ ID NO: 29298 - DNA, 1316 bp, Glycine max
  Clone ID: TF_GmC211_1
acggctgcgagaagacaacagaaggggacctcgtgttttcttctctctctcacactttctctcagcgttgaaacttgaaattcttcttctccgaaacctctttgaaccgggtcaagaaataaacctcgctgggaaccgttgattgggtttgtacgaataatttgaaatgaagattcagtgcaacgtgtgcgaggccgcggaggccaaggttctgtgctgcgcggacgaggcagcactgtgctgggaatgcgacgagaaggttcacgcagcaaacaagctcgccagcaagcaccagagggtccctctctctctctccgcctctcacatgcccaagtgtgacatatgccaggaaatggttggttatttcttctgtttagaggatcgagctttgctatgtaggaattgtgatgtatctatacatacagcaaatgcctgtgtctctgatcatcaaaggtttttgcttactggtgtgagagtaggccttgaagctactgagcgcggtgcttcctcgtcttctgtgaagtcacagtctggggagaaaatgtctgatgctaaatcttcatccatctccagaaatgtttcctcactgccccagccatcaaatgccaatgaagtgttacccctccaaatgcaaggagttgaggagtttccaccaagcaatttctcaggttatacttctggaaacgtctcacaatggcccattgaagaatttctcggattaaatgaactcagtcagtattataattacatggatggatcatctaaggctgacagtggtaaacttggggattctgattcttctgttttgaggtctggtgaagaggatatggatgatgacggcttcttgggacgtgttccagattcatcctggacagttcctcagatcccttcccctcctacagcttcgggtttatattggccgaaagtccctcaatatacatctgacagtgccatgtctgttcctgacatatgcttttctcatgtgcgacagccccaccatgcccagcataattctaatgtttccaaaaggcgtaggcaactataatttgttctctgatcactagctcaatatgttaaaaagattgttttttatctgttagagatggagcgaacttttgaagttctacccttctttagatcatttgaagttcagtttgctacatgtttcttctattcacggcagtcttcatttctttttgggagcaaatcccttaactctccatttgttattgggaatttgacaaagaaaatagctggaacaacaatgtaataggcttctcatttcaatttgatcttgtgcattttaacttaaaaaa

SEQ ID NO: 29299 - DNA, 1106 bp, Glycine max
  Clone ID: TF_700980420_FLI
ctttcttttccctctctcaattccaaacagtagatttagacacccttttggaaaaggaagtgttttttgagggaaaggagggaattttttgtgtgggagggtggaacccggaattcggtttggttggggtagagaggatgaagattcagtgtaacgtgtgtgaggctgcggaggccaaggttctttgttgtgctgatgaggctgggctgtgttgggagtgtgatgagaaggttcatgcggctaacaagcttgccagcaagcaccagagagtgcctctttctacctcttcctctcatatgcctaaatgtgacatttgtcaggaagcattaggctattttttctgtctagaagatcgggctctgctctgcagaaaatgtgatgtggcaatacacactgcaaatgcttatgtctctggtcatcagaggtttcttctaactggtgtaagagtaggccttgaagctacagaccctggtgcttcctcaacttctttgaagtcagattctggggagaaagtttcagattcttctgtctctagaaaggtttccacagcgccccagccatcaaattataatgaagtgttacccgctgaagttggaggagttggggagtttccatcagccaaggtgtcctttggtggtggttccacagctggaaatatctcacagtggactattgatgaatttattggcttaaacgagttcagtcagaattatgattacatggaaggatcatcaaggtattgcagagttcagattcatcttttgtcatagattgtgtatactagtgccccttcagacacactaacacacgcgcgcgcgtgcagggagtaaaaggacagggatggggctgatccggtcttctgagggaatatgccctgttaacatggtcacatgactaaacaactggccaatgtagtataagttttataaatatgttgaatatttgtggtcagaaaaggtgtgagtagacttcaaacagtggaatctgacagattggttggttgaagtgcttgtgcttggtttcattctttcccttatttgtaagcccgttttaaatttggaaaacttgaccttttagaagtgcaatactcagttggctttcacctg

SEQ ID NO: 29300 - DNA, 2413 bp, Glycine max
  Clone ID: TF_GmC1848_2
ctttcttttccctctctcaattccaagtgggttttatcttcttctttttttctttctccaaaagtgttaaaattttaactttgttttgccttaatttgattgttttatgcagagtagacagtagatttagacacccttttggaaaaggaagtgttttttgagggaaaggagggaattttttgtgtgggagggtggaacccggaattcggtttggttggggtagagaggatgaagattcagtgtaacgtgtgtgaggctgcggaggccaaggttctttgttgtgctgatgaggctgggctgtgttgggagtgtgatgagaaggttcatgcggctaacaagcttgccagcaagcaccagagagtgcctctttctacctcttcctctcatatgcctaaatgtgacatttgtcaggaagcattaggctattttttctgtctagaagatcgggctctgctctgcagaaaatgtgatgtggcaatacacactgcaaatgcttatgtctctggtcatcagaggtttcttctaactggtgtaagagtaggccttgaagctacagaccctggtgcttcctcaacttctttgaagtcagattctggggagaaagtttcagattcttctgtctctagaaaggtttccacagcgccccagccatcaaattataatgaagtgttacccgctgaagttggaggagttggggagtttccatcagccaaggtgtcctttggtggtggttccacagctggaaatatctcacagtggactattgatgaatttattggcttaaacgagttcagtcagaattatgattacatggaaggatcatcaagggtatgttcatagttgttgaaatataccctcttagcctagtatcccctgatcattggttttgtagagtttctatcatttaatgctttgtttttttgactgggttagtattgcagagttcagattcatcttttgtcatagattgtgtatactagtgccccttcagacacactaacacacgcgcgcgcgtgcagggagtaaaaggacagggatggggctgatccggtcttctgagggaatatgccctgttaacatggtcacatgactaaacaactggccaatgtagtataagttttataaatatgttgaatatttgtggtcagaaaaggtgtgagtagacttcaaacagtggaatctgacagattggttggttgaagtgcttgtgcttggtttcattctttcccttatttgtaagcccgttttaaatttggaaaacttgaccttttagaagtgcaatactcagttggctttcacctgaaactaattgctttctgaattaaatattgccaatcgtgaagataaaaaattataatcttaatgatgatgagccgggaatgatcatcctcaatggtgatccataatctagataccctagtcctcttgcatttgagtgcttaaaaacatgatattatttggatgagaatgtggattggaattattgtgcataatttactgatagacacatgtaagacaaattttcgacattcaaattacttcaatcaaacaaagatttgaattatatctatattcgtattttgagaaaatcaagagaatcaaatagaataggaaattgattaatgactttttttttcctttgtgactattctcattcaattgattattttcacatttattgtgtatttgtgtgcttaccatgtacagatagttaggcaaaataccatagatgtcttgtctgtatggttgtatggttctgtaactttttttttcacccttcctttcctgatgagtctgtgcaggctgacggtggtaagcttggggattctgattctcctgttttaagatctggtgaagaggaaatggaggaggaggatgactatttggaacgcgttccagattcgtcgtggacagtcccgcagatcccttccccacctacttcttctgggttatgctggccaaaagaccatactaatctgtatggttcatctgatagtgttctgtttgttcctgacataagcttctctctcattcaacaatctcagattagtagtatttgtttgagacgctggaggcagctttaatttgtttactctttgctaataacttagaggcattgattattccttttatttttggtatgattataagttctctcatgttgcagtggaagtttcatttgattagttacattttctattcttggctgtctcagtttcttctagggagtaatcaaactctctacatgtcattggaaattttcctagcaaagcagcaacaaataatgggagtttagaaggcttttactattaagtttggttttgtaacattatcatttccgctctaggatcctatgtagatgcatcatctattggattataatagtgatatgattcatattggtttgtttgtg

SEQ ID NO: 29301 - DNA, 857 bp, Glycine max
  Clone ID: TF_GmC1581_1
agggagtgtgagcaaaagcaaaagatgaagatccagtgtgatgtgtgtgacaaagtggaagcctccgtcttctgtcctgcagatgaagctgctctttgccatagctgtgatcgcaccattcaccgcgccaacaagcttgcaaccaaacacgcccgtttctctctccactaccccacctccaaagacttccctctttgtgatatatgccaagagaggcgtgcatatctattttgccaagaagacagggcgttgttatgcagggaatgcgacgttcctatccacagagccaatgagcatacccaaaagcataacaggtttcttctcacgggtgtgaagctctctggtacttgtttagatcctgcttcgtcctccaccaattacaccaataataatagagtcactggctctgaaggaagaaacgacgctcgatctagaatgaacagacccagatcatcagtttccaatgaagaaaatgcaagtaattcttcttgcaaggttgaagacaacgtggctagtgacactggttcgatttcaactagcagcatttctgagtacttgattgaaacaatacccggttactgttttgaagacctccttgatgcttcgtttgcacctaatggtttctgtaagaagcagaactttgatcatccctgggcgtttcaggaccaaaagcgaacaagtggagacactatggccgtgccgttcctgaaactagtcatccattgatcaaaatatctaaaccctcgcggtcataaactgtttgtaaaaatctgttggaaaatatcttctttatttttgttatttgtaaaaatctgaaactttatgattttattttttattctctattcccaaccaca

SEQ ID NO: 29302 - DNA, 923 bp, Glycine max
  Clone ID: TF_GmC59541_1
ctcggaattcggctcgtgctcgagccgaatcggctcgaggtttttttttccccttcttatttctctctccctctgccaaattttccacctaagagcgagaaagcaaaaatctgtgatgaaagacaaagcaagagagaatttcaataacttgcaacttgcctacaccatatttttttttgttcacaatttaatatatggtatctagcctgtggtgtggccataacaagaagggagagaaaacaaaataatttaaggttgagatgaggaagtgtgagctctgtaacagtcccgcgaagttgttctgcgaatcagatcaagccagcctctgttggaaatgcgatgctaaggttcacagtgcaaacttcctcgtcaccaaacatcccaggattcttctctgccatgtttgtcaatcactaacagcgtggcacggcacaggacccaagtttgtacccaccatgtcagtttgcaacacttgtgtcaacaacaatagtactgagacctgcagccaacagaatcatgaagacgatgatgatgatggtacgggagaggatcatgcagaaaacgacgatggtggtgtggctgaagatgatgatgatgatgatgatgaagaaaatcaagtggttccatggacatctacaccaccacccccagcttccacttcttcaaatagtgttacaactagttctaccaggttctctgatgttgaagaaggtggctccgattaataattccaatatcgtgatggataaaacttcgatacagttttttaggtgttgttcctgctgttttctaatcagaattagagttttatttcgagaatttatgtaataaaagtttgccttaaagaattatataaaacttaaattctcgactaagaacagtgtaaacaacacataggaaataatatataagttctattgtac

SEQ ID NO: 29303 - DNA, 1083 bp, Glycine max
  Clone ID: TF_GmC763_2
ttcaaatcctcctttctattaatctgaaacaagttattagtcatgaagatccagtgcgacgtgtgtaacaaacagcaggcatcgttgttctgcaccgccgacgaagccgccctatgcgacggctgcgaccaccgcgtccaccacgccaacaagctcgcctccaaacaccaacgcttctccctcagccacccctctgcaaaacattttcctctctgcgatgtttgccaggagagaagagcctttgtgttttgtcagcaagatagagcgattctgtgcaaagagtgtgacgtgcccgttcattctgccaacgacctcaccaagaaccataacaggtttcttctcactgggattaagttttctgccctcgattctccttcaacacctcctaagcctgcaggtggaaactccctaacaaatcaacaaccacaacaacaaactggtttcacaggtagcagcatatcagaatacttgataaacactatcccaggcatggagttcgaagatttcctcgattcacattctcttccctttgcttgctccaagaatagtgatgacatgatgttgtcgatgtttggtgagggaaacatggtttcgttctcagccggagggatctgggttcctcaagcaccatcttcagtacaaatggatcagcagagtgggtacaaagacacatgggaaactagcattagatcaagttttggggatgatagtttattagttccacagatgactcctcccagcaatgtgtttaataataagagatccaggcttctatggtaaaacagttacagctagctatcaagctaaccaccttatgtggcttttaatttcactctattcttaatttggttttctttgtttttttgtccctctcctccttcctgagtactacactactcttctagctacttaattccctcttgcgttctcgataagttgatgtatctcttccaaattgtaaatgtctatgttttaagagctctctgggttcagattaattgtttctgctacatgttaaaagatgactcaagtcttaattaacattgcataaatgaaccggaagaagacttaggcgatatcttc

SEQ ID NO: 29304 - DNA, 696 bp, Glycine max
  Clone ID: TF_LIB4167-008-Q1-K1-H10
ggtccggattcccgcgtcgacccacgcgtccgccaaaacaaaagaaaaattcatagctatgagtggtgctgaagcgcgaccttgtgactactgtggcaactccacagcacttctctattgcagagccgattcagcaaaactctgtttctcgtgcgatcgcgaagttcactccaccaaccagctcttctccaagcacacgcgcacgctgctctgcgacgcatgcgatgattcccctgcgaccatactctgttcaaccgacacctctgttctgtgccagaactgcgactgggagaaccacaaccctgcgctctccgattcccttcacgagcgaaggcccctcgaaggcttcactgggtgcccttccgtctccgaactcttgtccatcgtggggttttcggatatcagcaaaaaatctctgcttttttcgcctcagggaagtgtcgctgatgggttcttcggcgccagcgagattgaagggctttcggatatgttcgtgtgggatgcgccttcttttgttacgcttgatgatttgatttcttcctctccttcttctcatagctttcaggccatgaaggttcctcctctgcccaagaatcgaaaggctgcttgtgggcaacacaaagaagagattcttagtcagcttcgggaattgccaagtctgagcctttggaccttgaaccatatgtgcaatcgggt

SEQ ID NO: 29305 - DNA, 1292 bp, Glycine max
  Clone ID: TF_GmC763_1
ggacactgcgagtgggtagtttatctggggcggatgcctcctaaagagtaacggctgcgagaagacgacagaaggggaatctttttgtaagaacgtgaaacatgacaccctaactcgcgttgcttgcttgagtgatttgactcgtgtcgagtgtattgtatttagtttaagcgtggctgatcgagtgagtatcagaatcaattcaattttgagctagtcatgaagatccactgcgacgtgtgtaacaagcaccaggcctctttcttctgcaccgccgacgaagctgccctatgcgacggctgcgaccaccgcgtccaccacgccaacaagctcgcctccaaacaccaacgcttctccctcacccacccctctgcgaaacattttcccctctgcgatgtttgccaggagagaagagccttcgtgttttgtcagcaagatagagcgattctgtgcaaagagtgtgacgtgcccattcattctgccaacgacctcaccaagaaccatagcaggtttcttctcactgggattaagttctctgcttctgccacgccttatgattattcatcaccaccaccaccaccaccaccaccacccaagagaaaccctgttctcgattctccttcaacaccgtcaccgcctaagcctgggggaaactcgctaacaaacgaagaagaacctggtttcacaggtagcagcatttcagagtacttgataaactctatcccaggcatgaagttcgaagatttcctcgattcacattctcttccctttgcttgctccaagaatagtgatgacatgttgtcgctgtttggtgagggaaacatggtttctttctcacccggtgggttctgggttcctcaagcaccaccatcttcagtacaaatggatcggcagagtgggtacagagagacaagggaaggtagcattagatcaagttttggagatgataatttcatagttccacagatgagtcctcccagcaatgtgtctaataagagatccaggcttctctggtaaaacagatatagctagttacaactagctaaccaccttatgtggctttgtgtgacttaaatttcactctcccctcttattttgtattttttatgtggtattgttttaatttttgtttgttcgtttgtttttggtccctctcccttcctgaactacactactcttctagctactttctctcttgataagttggtgtatctcttccaaattgtaaatatgaacgttttaagagctctctgggttgagataaaaaaaaaaaaaaaaaaaaaagcggccaa

SEQ ID NO: 29306 - DNA, 1474 bp, Glycine max
  Clone ID: TF_GmC830_1
caaatgcccttgacaattcttctctaaactcggaagcaaaacaaaaagccatagctatgagtggtgaagcgcgatcctgtgactactgtggccactccacagcacttctttactgcagagccgattcagcaaaactctgtttctcgtgcgatcgcgaggttcactccaccaaccagctcttctcgaaacacacgcgcacgctgctctgcgacgcatgcgatcattcccctgccaccatactctgttccaccgacacctctgttctgtgccagaactgcgactgggagaagcacaaccctgcgctctccgattcccttcacgaacgaaggcccctcgaaggcttcactgggtgcccttccgtctccgaactcttatccatcgtggggttttcggatatcagcaaaaaatctcttcttttttcgcctcagggaagtgtcgctgatgggttcttcggtggcgaaattgaagggctttcggatttgttcgtgtgggatgcgccttctttcgttacgcttgatgatttgatttcttcttctccttcttctcatagctttcaggccatggaggttcctcctctgcccaagaatcggaaggctgcttgtgggcaacacaaagaagagattcttagtcagcttcgggaattggccaagtctgagccattggaccttgaaccatatgtgtcatcggggaacttgtcctcgggttttgaacgtgaaccagaggctgatatctttccttctcatgagtggcatagagaaagcagcgagcctatgtatcaggttgttcctcctgacccattaatgagaacttatacagaagaaattccatttaaacattctacttctgctgttggggaaactcaaacctacggtgacaatggaggaaaaccatccatttctcttaaatctgaaaccctatcaactactcccaaagctgcagcatgtgagttaacaagccaagaaagagattctgcattattacggtacaagcagaagaagaaaactaggagatttgacaaacacataaggtatgaatcacgaaaagttcgggcagaaagcagggtaagagtcaagggtcgatttgccaagatggaacatgaacattgaaatcatggtaggctgctatgacatcataactataattcccagctcaaatcacatgcactatgtagcatatcccttgtatagtgaacttaacaaaattttccaagtgatgtattctaggattcagagctaggatataaggcagacatattcttgcagtacagtagtgtttttatcatcctttttgcttcataattgactgcacctgaggtagacaaatatgtgcagtattctgtaaatcagaatcaaatttactggggtctttggccttggattgtgtttggagagtatcttgtggacgactgagaattttttcttcttgattatcaaataataataataataattaaaaaaaaaactcaacttgagat

SEQ ID NO: 29307 - DNA, 725 bp, Glycine max
  Clone ID: TF_GmC1095_2
cgggcggaaaactaggaatttcttcttctttataaatttcgccgacgattaaacgttctttttttctctgcttttcctttctttcctcagtgagtagtactcatcaacggagagagaaaataaaaattaaaagtaaaatcccagagtgagagagaaaagaaaagaagagaataaaacaccaaacaagcttcgaaacgatcgtgagtgagatgaagaagtgcgaactgtgtaaagttccggcgaggatcttctgcgagtcggaccaggctagcttatgctgggactgcgacgctaaggttcacagcgccaacttcttggtcgcgaggcacgtgcgaaccctactctgccgcacgtgtcgttctcccacgccctggaaggcctccggcgcctcactcgcccacgccgcctccgtctgcgaccgctgcgccgccgcggaagagacggaagagagcgaagccggcaatgacgacgaaccagacaccgaggacgacgacgatgtcgacaaccaggtcgtgccgtggtcctccacgccgccgccgccgccgccgtcgagctcctccggcagcgaatgctcggagtgcaaaaacaacgttgcttctttttccgcctcggaacaggaaacgacaacatcctcgttgaaacgacagcgcgaggacgacgacgatgcttcttccgatcctgatccccaggtgttgagaagggttgggcgtctcacggaagttgcg

SEQ ID NO: 29308 - DNA, 1032 bp, Glycine max
  Clone ID: TF_GmC998_2
gtcaagggaagaataacgcaatacaacacaacgcactcactctacctctgatcccagacagaagagggtggagtttttgtcatactccctcaatttttagcaagtcaaaacatcagaagaatcattttctttttttaatttttgaaattaacgttcaggcgaagatgaagggtaagacttgcgagctttgtgatcaacaagcttctctctattgtccctccgattccgcatttctctgctccgactgcgacgccgccgtgcacgccgccaactttctcgtagctcgtcacctccgtcgcctcctctgctccaaatgcaaccgtttcgccggatttcacatctcctccggcgctatatcccgccacctctcgtccacctgcagctcttgctccccggagaatccttccgctgactactccgattctctcccttcctcttctacctgcgtctccagttccgagtcttgctccacgaagcagattaaggcggagaagaagaggagttggtcgggttcctccgtgaccgacgacgcatctccggcggcgaagaagcggcagaggagtggaggatcggaggaggtgtttgagaaatggagcagagagatagggttagggttagggttaggggtaaacggaaatcgcgtggcgtcgaacgctctgagtgtgtgcctgggaaagtggaggtggcttccgttcagggtggctgctgcgacgtcgttttggttggggctgagattttgtggggacagagggctggcctcgtgtcagaatctggcgaggttggaggcaatatccggagtgccagttaagctgattctggccgcacatggcgacctggcacgtgtcttcacgcaccgccgcgaattgcaggaaggatggggcgagtcctagctagctccaatgtgtaatcgtctcattagccaaaccaaatgcctggatttcaaattttacttttgtttcctttgcttttcgcttctaccaatccttgttcattaatgtgtttaccaattggatcaacatattcgaataaaaa

SEQ ID NO: 29309 - DNA, 2371 bp, Glycine max
  Clone ID: TF_GmC1833_1
cccacgcgtccgcccacgcgtccagcattgcgtccggccacgtacggctgcgagaagacgttctttcggcacaccccattctcccaaactaacaaacaaatcccagggagccaccaaccatggcttccaagctctgcgactcatgcaaatcagccactgctaccttgtactgccgccccgacgcggccttcctctgcggcgcctgtgactctaaggttcatgccgccaacaagctcgcatcgcgccacccgcgcgtcgtgctctgcgaggtgtgcgagcaggcgcccgcgcatgtgacctgtaaagccgacgccgccgcgctctgccttgcctgcgatcgcgatatccactccgccaaccccctcgccagccgccacgagcgcatccccgtcacgccgttcttcgagtccgtacattcagtcaaggcctcctcgccgatcaacttccaccaccgcttcttctccgacgccgacgctgatgctgacgtcagcaccgaggaggccgaggccgcgtcatggctgctacctaatccaaagacagatctaaattcgtctcagtacttgttctccgaaaccgaaccggttccttacatagatctggattacgcggccatggatccgaagacggagcagaaaagttccgccaccgccgacggcgtcgttccggtgcagagcaacttcgagccgttcacctacggttacaagtacaacactactctctcacagtcacagtctcatatgagccagagtgtatcttctccgtcgtcgatggaagttggagttgtgccggacgggaacacgatgtcggagatatcgaactgcagctacagcaaagtggcaccggtgacggtgacggcgcagttctcggcggcggatagggaggctagagtgttgaggtacagggagaagaggaagaaccgaaagttcgagaagaccattcgttacgcatcgagaaaagcgtatgccgaaacgaggccaagaatcaaaggaaggttcgcgaaacgcactgatgcggaccctctggctggatacggcgtcgttccgtcgtgttgatgattatcatatatatcatatatgaatatgaatgcttacttttttgttttcttatgtttgcttttgctgctgtatatatggactacgccttcttttgtttgaattatgcaatgtaaagttgcataaaagctcgtgttgtggatcgattttgtagtttgttgattgtttttggatgaattttgacagctttttggtaaaggaggattctttggtggttttggtggaagtggaggctcaacctttggtggttttggtggatgtggaggcttaacctttggtgggcttggtggtttctttggtggttgtggtggatgaggaggcttaacctttggtggttttggtggatgaggaggctcaacctttggtgggcatggtggcttaactggtggttttggtggaggcttaaccggtggtggttttggtggaggcacaacctttggagggcatggtggaggtttctcaggtacaggtggagggggtttcttctcaggtacaggtggaggagtataaacaggtacaggtggaggagtatagacaggaggaggtggtttatggaaaatcagtggtggaagtggtggaaatgttataggagggatggtgataggtggatgagggggaaagagagggtgcttccagaagaaggctgaagcacatgtttgtgatgaaaacttgagtttcccagcaggaccaagggtgtgtttctcattattagtttttgactttatcactattttgtggctcaatgggccatcatgggtaggacaaggtgcagctgatgcactaagtagctgagcatagcattcttctatcagtttatcgtcttttacagtgtcatgaggaagggaaactttgaagtttccatattcatcaagctcaccgacccctctcctttcaaagtttccacttgctgccttgcagtctactgtcacacgtaaacctgagaaagcctggctagtttgaatgtttttctccttgcaatctgcgcattctcccaaccctactacctcgactgtactatggtcaccatagcaaaagtctactaccacaaaaagcacagacaaccagaagcacaaaaatgctccttggcgccgcgttaaaatctgcattaggaactgcaatcacagttcctaatgagtagtatatatatatataagcaaatactatatatataacgggagagaaaagaataaaagcagacttagcttagaactcagaagctgtggacgcgacggcgggggacgggagggcctgcgatcgcgatatacactccggcaaccccctcgtcaggcgccacgagcgcatacccgtcacgccgtttt

SEQ ID NO: 29310 - DNA, 1054 bp, Glycine max
  Clone ID: TF_GmC1095_1
acgaggagtttggtagaaaagcagcagaggggcagtttggggctccgacgggaaactaggaatttcttctttataaatttcgccgacaattaaacgctctttctcctttcttttccttttcaatgctcagagaagagagaaaagaaaaagaaaaatcccagtgagagagagaaaagaaaagaacgaaaaaccaagaagcttcgaaacgatcgtgtgagatgaacaagtgcgaactgtgcaaagttccggcgaggatcttctgcgagtcggaccaggcgagcttatgctgggactgcgacgctaaggttcacagcgccaacttcttggtcgcgagacacgcgcgaaccttactctgccgcacgtgccgctctcccacgccgtggaaggcctccggcgcctcactcgccagcgccgtctccgtctgcgaccgctgcgccgcctccgaagaaccggaagagagtgaagccggcaatgacgacgaaccagacacggaggacgacgacaacgacgacgaggacggcgacaatcaggtcgtgccgtggtcctcctccccgccgccgcctccgccgtcgagctcctccggcagcgaatggtcggagtgcaaaaacgacgacgcttctatttccgcctcggaacaggaaacgacaacatgctcgttgaaacgacagcgcgaggacgatgatgatgcttcttccgatcgtgatcccagggtgttgagaagggttgggcgtctcaacggaggttgcgtgtgacggagaatcgtcgttgaaaggaaggagggagtggtctggcacacgacgtcgtttcctgattggggaaagtaagattttcacagccgtacgatcgaccaagatattttttaagctctttcatcattaacttctaatctaaccgcttagaagttacaatggtttttgacatataggtttagtgttgtgtattaactattaatgtggaattttctgttttcctttatcggttttttaagataaacattgcgatgtcatcttgatgtaacctttttttttatatataaaagaatctctattttttt

SEQ ID NO: 29311 - DNA, 2921 bp, Glycine max
  Clone ID: TF_GmC115_1
gagacatagtgaagaattgtactcccacaccgcattgtagtataaatgcttcctttgtacatgatcaagtactaaattctatatctagaaaagatccaccaaggaagaggctagttcttttaatttaataattagcaggtaggttagtttctatgcagtacattctggctcttgattctggtttgtgtgactttcaatgtttatagacaatattttgtatcgtatttgcaccatattttgttgagggccatggtaaggagatttttatccttgaacttgtgaattgttaaccagtcacttaattatgatgttcctcatgtgccatattaaaatgtctggaactgtttcttttcttcatcttcagaagcaatccctggaatttggagaacttgaatggctagcagatgcaggccttttcagtgaacagtttcctcatgaagctttagtcgcagctgaagttcctcagcttccagtgccacacactagcagtgttgcctcacataaagcccccaaatccttggtgtcttacaaaaagcctaggattgaagtcctggatgaagatgatgatgaacactgcactgtcccggatctcggataaagtacattctcatgtaaacatttgcctgaatcaaattatgtgtcagattttgagctgtatatgcatactgggccctaggcaattgtaacctcaaaatacgcacatgtgtaatccattccagctctccagtctgcgtagatcctcgtcaaaaccatccctcagacacttccttttctgtgttcaacagtcttcccacattaaataccaactgtgtagtatagtactacttcaatgttaactatgttcttctttttttgttctcatctccacaccatgtcctaatctttctgcaccatcgttctccatttttggctttacaaaaccactgtgtctgattaagggttctttaatatttccaatatttcttgtagtgaaaaagttgttagctaaaagaagaccaagtttttggtgttgtagaaggaagagaagaattaacatgaaaattcagtgtgacgtgtgtgagagagctccagcaacagtgatttgttgcgcggatgaggctgctttgtgtgccaaatgtgacgttgaagttcatgctgcaaacaagcttgcaagcaagcaccaaagacttcttcttcaatgtctatcaagcaagcttcccacatgtgacatttgccaagacaagccagcattcatattttgtgttgaagacagagcactcttctgtcaggattgtgatgaaccaattcattcagccggaagcctttctgcgaaccaccagcgcttccttgctactggtatccggagtggcctcgagttctaattgcaccaaagacaatgaaaaaagtcacttggagcctcctaataggagtgcacaacaagtttctgcgaaaattcctcctcagcaagtgcctagcttcacatcctcttgggctgttgatgacttattggaactaacacggctttgaatcaccctgagaaaaaggaatctctgtagtttgcaagaggtggaatggcttacaggatgtgggtatttttggctgaacgaattttgctcactgaagccttggctgcagctgaagtacctcagcttcccgaaactcataacagtagcagtgttgcttcatacaaaacttccaaatcctacatgtcccacaaaaagcctaggattgaagtcctaaatgatgatgatgatgattagtattttactgtgcccgatctcggctaagtacgtggcttgccatatgggatggtgcatgcatgattggaaaagattaattatgggaaaataattgtttttttttaagctatattagtaaattgtcaaaaaagaatattattttcccaaaaaaatctattccattcagacatgttgatatgttgtatattcaattattatgagaacaataattttcacaagttgtgtggagttgattaagtattgtacttaaggtgtttttttgctggatagcatagaatccatgcctttggggaataaattttcccttgtccttatgctacactagcagtgttgcctcacataaagcccccaaatccttgttgtcttacaaaaagcctaggattgaagtcctggatgaagatgatgatgaacacttcactgtaccagatctcggataaagcacatggtcatgtaaacaattgcctgaatcagtaggttgacgagttgtatatgcatactaggtgcagatgttaatgaactcttcaatgtgcctggtctagctgaagctcaggaccatgaggactattgcatgaatctgtagattgatgagctgtatatgcatacttcttaggacagtaagtaatgaagtatgttaactagcttgtggagttgataaatatctcattttaggagctatgaatggtttgatttttagaatatagcataaattaaaccttaggggattaaattttccttgctctttgtgatcatcactgtttacatcctataggtgctcacaccacacaacaatccacgtgaacttgaatggttaattatgtatgcttgtgttgaagatcattttggcctaatagctacgatgaagacatgcggcatactacttgtagttattatgtaatttcagaacctaacagcaattcctttgggccagcggaagtcatgcattgccagcagattaatccctctgatcctgagttggaaaacacccatgatttgttatctatgacaaagaaatagaacctaacagcaattaacttcacgaacaatcaattctcgtgttccattcccgaggaacatggatcaaaagcaatgagatattgattattccccagtttccttttggctttgatattaatattatgctacaaaaagctggaaaaaaaatcatcaccaaggtttctcaat

SEQ ID NO: 29312 - DNA, 1602 bp, Glycine max
  unsure (1)..(1602): unsure at all n locations
  Clone ID: TF_GmC115_2
tcgagccccgaaancctcatcaacagcccaagtagtgattgtgaagctaggcaccttngtctgaggaggagagttttcgctagaaacccttgttgtgcactttcctattaggaggctttccgagtgacttttttcattgtcttcgattaccagtcacttccttttccatggcccaaacactttctccctccatttattacctaccactgtcactatgaatgctctcttttgtttttcaccttcttttttttttttgtgtgttcatcttcaacttcatcctaaccttttacacatcatattttcggcttagaacaaccaaaagcaagttcacattgtcttgtcttttcgggtagtggctgtagaggaaacactcctgttttgtgcgcatattgatattggaatagtctttctctgaaccccatttttgcaaaaaggaagaaagagaaagagagagagagagagagagaagagatatacactgccaagaagaagaacatgaaaattcagtgcgatgtgtgtgagaaagccccggcaaccgtgatttgctgcgcagatgaggcagctttgtgtgccaaatgtgacgttgaagttcatgctgcaaacaagcttgcaagcaagcaccagaggcttctccttcaatctttatctaacaagcttcccagatgtgacatatgtcaagataagccagctttcatattttgtgttgaggacagagcactcttctgtaaagactgtgatgaacctattcatttagccagtagcctttctgcaaaccaccagcgcttccttgctactggtatccgggtggctttgggttctaattgcaccaaaggcaatgaaaaaggtcacgtggaaccatctaaaccaaaagcacaagaagttcctgcgaaaattccttctcagcaagtgcctagcttcacatcctcttgggcagttgatgacttgttggaattaacagactttgaatcaccagacaaagttcagaagcaatcccttgagtttggagaacttgaatggctagcagatgtaggcctttttggtgaacagtttcctcatgaagctttagcggcggctgaagttcctcagcttccaatgactagcagtgttggctcacacaaagcccccaaatccttgttgtcttacaaaaagcctaggattgaagtcctagatgaagatgatgatgagcacttcaccgtaccagatctcggataaagcacatggtcatgtaaacaattgcctgaatcagtaggcagtaggttgacgagttgtatatgcatactaggtgcagatgttaatgaactcttcaatgtgcctggtctagctgaagctcaggaccatgaggactattgcatgaatctgtagattgatgagctgtatatgcatacttctcttaggacagtaagtaatgaagtatgttaactagcttgtggagttgataaatatctcattttaggagctatgaatggtttgatttttagaatatagcataaattaaaccttaggggattaaattttccttgctctttgtgatcatcactgtgaacatcctactagtgctcacaccacacaacaatccacgtgaacttgaatggttaattatgt

SEQ ID NO: 29313 - DNA, 1778 bp, Glycine max
  Clone ID: TF_GmC115_3
atctcacaccatgtcctaatctttctacaccacatcgttcttatttttggctttacaaaactaccgtgtctggtaaagggttcgttaacatttccagtgaaaaaagttgttagctaaaagaagaccaagtttttagtgttgtagaaggaagagaagagttaacatgaaaattcagtgtggtgggtgtgagagagctccggcaacagtgatttgttgtgcggatgaggcagctttgtgtgccatatgatacgctgtagattttgcttatctgctggttgcgctgttggccttctgcttgactacgttttgacactagactcgtggtgggactagggactattataggtatggtgcatggacgcaactgcacccctcctccagtcacttccttttccatggcccaaacactttctccctgcatttattacctaccactgtcactatgaatgctgtcttttgtttttcatcttcaacttcatctaaacctttcacacatatcttcggcttagaacaaccaacaacaagttcacattgtaggaacctttgtcttgtcgtgtcgggtagtggctcatattgatattggtatggtctttctttgaaccccatttgcaaaaaggaagaagaagaacatgaagattcagtgtgatgtgtgtgagaaagcccctgcaaccgtgatttgttgcgcagatgaggcagctttgtgtgccaaatgtgacgttgaagttcatgctgcaaacaagcttgcaagcaagcaccagaggcttctccttcaatgtctatcaaacaagcttcccagatgtgacatatgccaagataagccagctttcatattttgtgttgaggacagagcactcttctgtaaagactgtgatgagccaattcatttagccagtagcctttctgcaaaccaccagcgcttcctcgctactggtatcagggtggctttgggttctaattgcaccaaaggccatgaaaaaggtaacatggaaccatctaatccaaatgcacaagaagttcctgtgaaaactccttctcagcaagtgcctagcttcacatcctcttgggcagttgatgacttgttggaattaacagactttgaatcgccagacaaaaagcaatccctggaatttggagaacttgaatggctagcagatgcaggccttttcagtgaacagtttcctcatgaagctttagtcgcagctgaagttcctcagcttccagtgccacacactagcagtgttgcctcacataaagcccccaaatccttggtgtcttacaaaaagcctaggattgaagtcctggatgaagatgatgatgaacactgcactgtcccggatctcggataaagtacattctcatgtaaacaattgcctgaatcagtaggttgatgagttgtatatgcatactaggtgcagatgttaatgaactcttcagtgtgcctgatctagctgaagctcaggaccatgaggactattgcatgaacctgtagattgatgagttgtatatgcatacttcttaggacagtaagtaatgaagtatgttaactagctgtgtggagttgataaatatctcattttaggagagctttgaatggtttgatttttagaaaatagcataaattaaaactttaggggatttaattttccttgatgctctttttgatcattgtttacactctagatgggtaatttcatatgtatgcttgtgttggagaccaaaacaaaaaagcaagtaaaaaaggttaataaaaaacaaaaaggaaatgataaaaaagaaac

SEQ ID NO: 29314 - DNA, 1228 bp, Glycine max
  Clone ID: TF_GmC1732_1
aaattcggctcgaggtgtctatgcaaagttctggaatcaacccctaaggtccccccactccttcaaaaatcctctcttttatcctacaacactctaatcatcgtcatcaaccacctcctccatcctcccccagtaacaacacaacataacattcagagaaaaacaaaactatcatacccacatggatttgcaatgaaagtgagagagtccaattatgcgaacgctttgtgatgcttgtgagagcgccgcggctatagttttctgcgccgctgatgaggctgcactttgtcgtgcctgtgatgagaaggttcacatgtgcaacaagctagctagtaggcatgtgagggttggtcttgctagtccaagtgatgtaccacggtgtgacatatgtgagaatgcacctgctttcttctattgcgagacagatggaagttccctttgtttgcagtgtgatatgattgttcatgttggaggtaaaagaacgcatggaagatatcttctgttcaggcaaagagttgagtttccaggagataaatctagtcatgctgaaaatccggcttcacaaccattggaaccaggtgaggctaaaagaggacaaaatccacttcccaaactaaaaatgggagagaagcaacaaaatcacaagatgcctatggttccaacgccaggacctgatgctgatgggcatgccaagatggaaagtaaaatgattgatttgaacatgaagcctaatagaatacatgaacaagcatcaaataatcagaaacacccataaatggcgcaactaggcaatgcagttctgacaggatcctaaaccaaaaatctaccaatggcaaaagcttcgttttgttctcgtgcatgctagtcacaaggatgacatactctattaatatcctatatattctggcaaatgaggcaccagaatcctttgaggagtttgttcgcctacgtaggaacttaatttggtagttcaacacatcatattctgttctgcaaagcattgttaactgtatatctatgacccctttcaatgaattgtgtgttgacttttatttctggtttcagttttgtatgccattacgtcccctagaaaattctgggggaaaataggtttttgatttcttaaaaataaaatgcgacaattagcgagccaaaaaaaaaaaaaaaaccagttaagatattgttgttgaacaatcagcatttgggtatggtggttcagtgggaggaa

SEQ ID NO: 29315 - DNA, 1071 bp, Glycine max
  Clone ID: TF_GmC272_1
cgaatcaggcccgagccaagaaactaccaagtagcaagcttgattattattatcatcacatagagcttctgaaaatgtgcaaaggtgcagaaggagaaaagcaacatggtttctgcagcagctttctacataaagagagtgcaaccagaagtgctatatgttgtgagctatgtgggttacaggcttcattgtattgccaagctgatgatgcctaatttgttcaagaaactaccaagtagcaagcttgattattattattattattatcattatcccattgagcttctaaaaatgtgcaaaggtgcagaaggagaaaagcaacatggtttctgcagcagctatctacataaagaatgtgcaaccagaagtgctacatgttgtgagctatgtgggttacaggcttcattgtattgtcaagctgatgatgcatacttgtgtagaaaatgtgataaaagggttcatgaagctaattttttggcccttaggcacattaggtgctttctgtgcaacacatgtcaaaaccttacgcgaagatatctcattggagcatcaatagaggtggttcttccagccaacattaactggaccattggaaatctccctagcaacagaggaatccacagaaagtgctcaagaatgcataacaacctttccctcttgttataacttccatctttctttttttctccttagaatatcttttgtaatagaaaaggttagtgagtaccatctcaggtacatagggaagtgctaaatgtttttattgtcatgatttttaaaaaaaaatggttggtaatagaaccgtgttcaatagaaggagggaatgtccaatgttttttttttctttaatttctggtagatgtagttaattgaaatttgacttctatggttatttttattttaagccaattccaaagcaggagaacgaatttctggcagaagttatactatgttagcagatatacaatatgtcttacaagtgtatgtcatggtaattcctggcatctcatattataacctatatcaataacaattataatggctgatacttactttttgtctccaaaaacc

SEQ ID NO: 29316 - DNA, 1322 bp, Glycine max
  Clone ID: TF_GmC1358_1
ggatggctcatttatcatagtagtgcttcctcctttaccatttgaccatatttatccatctcaatcacttcccactttttatgagcattggccaacccccacgcttcctttattctccctctcaagcttcaagctactcacaccaatgaagatccagtgcgacgtttgcaacaaacacgaggcctccgtcttctgcaccgccgatgaagccgccctctgcgacggctgcgaccaccgtgtccaccatgccaacaaactcgcctccaaacaccaacgcttctctcttctccgcccttctcctaaacaacaccctctctgcgatatttgccaggagagaagagcctttacattctgtcagcaagacagagcgattctctgcaaagagtgtgacgtgtcaattcactctgccaacgaacacacccttaagcacgataggttccttctcaccggtgttaaactttctgcttctgctatgcttcgttcgtcagaaactacctctgattcaaactcaaacccttctcttcttaacttttcacaccaaacaacattactacctccatcttccaccaccaccaccaccaccagcaacaacaacaacaacaaggttgctgttgaaggaactggttcaactagtgctagcagcatatcggagtatttgatagagactcttcctgggtggcaagttgaagactttcttgattcatattctgttccctttggtttctgtaagaatgatgaagtgttgccacggtttgatggtgaaatggaggggcatctgagttctttctcaaccgagaacatggggatctgggttcctcaagcgccaccaactcttatgtgttcttcacaaatggatcgggtgatagttcacggtgagaccaatatcaaaggtagcagcagatcaaggttgaaggatgataatttcactgttccacagattagtcctccttccaattccaagagagccagatttctgtggtagaaacaaataaacaaacaaacaagcctcagtttccattctcttgaggcagaattaacaaccctctttgttttgttttgtcccttttctctttttcttaccctggcttgtagtttactctgcccatgttttcaatttggttcagtttgacttttttttttccctttttcttgtttctcctccctctttccctactgggctgtgttttgataaatttgtgcacctttctactagtgattgtaaatataaaccttttcaaatgcatgttgttttttgacacatgtttagaagagaaacaacagagtatgagcttaatagatatgttgagtaaaattcccccccc

SEQ ID NO: 29317 - DNA, 1146 bp, Glycine max
  Clone ID: TF_GmC1358_2
ccttcctttattctctcctcttaaacctttcacttcaagcttcaagttttcaagctacccacccactgctcatactcacacccaatgaagatccagtgcgacgtgtgcaacaaacacgaggcctccgtcttctgcacagccgacgaagccgccctctgcgacggctgcgaccaccgtgtccaccatgccaacaaactcgcctccaaacaccaacgcttctctcttctccgcccttctcataaacaacaccctctctgcgatatttgccaggagagaagagccttcacgttctgtcagcaagacagagcgattctctgcaaagagtgtgacgtgtcaattcactctgccaacgaacacacccttaagcacgataggttccttctcactggtgttaaactcgcagcttctgccatgcttcgttcatcacaaactacctctgattcaaactcaaccccttctcttcttaacgtttcacatcaaactactccacttcatcttcaccaccaccaccaccaccaacaacaacaacaacaaggttgctgttgaaggaactggttcaacgagtgctagcagcatatcagagtatttgatagagactcttcctgggtggcaagttgaggactttctcgattcatattttgttccctttggtttctgtaagaatgatgaagtgttgccacggttggatgctgacgtggaggggcatatgggttcgttttcaaccgagaacatggggatctgggttcctcaagcgccaccacctcttgtgtgttcttcacaaatggatcgggtgatagttcaaagtgagaccaacatcaaaggtagcagcatatcgaggttgaaggatgatactttcactgttccacagattagtcctccctccaattccaagagagccagatttctatggtagaaacaatcctctttgttttgttttgttttgtgccttctctctttttgttaccctggtttgtagcttactcttgcccttgttttcgatttggttctgtttgactttttttcttcttctttttcttggttctcctccctctttccctaccgggctgtgctttgaagtattgataaatttgtgcacctactagtgattgtaaatataaaccttttcaaatacatgttttttttgac

SEQ ID NO: 29318 - DNA, 1306 bp, Glycine max
  Clone ID: TF_GmC1848_3
cttttggaagaggaggtggcttttgagggaaaggagggaacttttagtgtgggagggtggaaactggaattgggtttggttgggggtaaagagaatgaagattcagtgtaacgtgtgtgaggctgcggaggccaaggttctgtgttgtgctgacgaggctgcgctgtgttgggagtgtgatgagaaggttcatgcggctaacaagcttgccagcaagcaccagagagtgcctctttctacctcttcctctcatatgcccaaatgtgacatttgtcaggaagcattaggctattttttctgtctagaagatcgggctctgctctgcagaaaatgtgatgtggcaatacacactgcaaatgcttatgtctctggtcatcagaggtttcttctcactggtgtaagagtaggccttgaagctatagaccctggtgcttccttaacttctttgaagtcagattctggggagaaagtttcagatacaaagtcttcttctgtctctagaaaggtttccacagtgccccagccatcaaattacaatgaagtgctacccattgaagttggaggagttggggagtttccaccagccaaggtgtcttttggtggtggttctacagatggaaatatctcacagtggactattgatgaatttattggcttaaacgagttcagtcagcattatgattacatggaaggatcatcaagggccgatggtggtaagcttggggattctgattctcctgttttaaagtctggtgaagaggatatggaggaggaggatgactatttggaacgtgttccagattcgtcgtggacagttcctcagatcccttccccacctactgcttctgggttatgctggccaaaagaccctcaatattcatctgatagtgttctgtttgttcctgacataagcttctctctcattcaacaatctcagattagtagtatttgtttgagacgctggaggcagctttaatttgtttactctttgctaataacttagaggcattgattattccttttatttttggtatgattataagttctctcatgttgcagtggaagtttcatttgattagttacattttctattcttggctgtctcagtttcttctagggagtaatcaaactctctacatgtcattggaaattttcctagcaaagcagcaacaaataatgggagtttagaaggcttttactattaagtttggttttgtaacattatcatttccgctctaggatcctatgtagatgcatcatctattggattataatagtgatatgattcaatattggattgtttgtg

SEQ ID NO: 29319 - DNA, 1238 bp, Glycine max
  Clone ID: TF_GmC127847_1
tatatctcttgtgtctataataacctaatcctttctacgcgatcatatatccccttccttccttttcccaccctctcatcatgacccattcctacagctccaatgactttaatgcttggtttgacctcaattctccatgccttttttccacttcttcatcaccttgctccaataacccaccattttactttcctactagtaatactaattaccttaataactgcacaaatagacatatcttttagcagcatactcaatcttcttccaaccctctcctcctcaaagaaaagcacttcccctccttaatctaagacatgcaggagatgaagatcttgaatcttcattcagtgccatgaaagtcaacaaagagaaagagaaagaactaagctcgtcatctaataataactctttggatgatgaaactgctgtgactgtggctttacacttagggcttccaagcacgactattgcatcttctgaatcagctgatttagcttcaagcctatactcagacaaagaagaagaagaagaaaaagtagcactgatgcttcggggcattcttctgtcaaatagaattaacagaggacaatattggatccctacttcttctcagattctgattggtccaacacagttcccatgccccctttgtttcaagacgttcaacagatacaacaacatgcagatgcatatgtgggggcatggatctcaatataggaaggggccagagtctctaaggggaacacaacccacggcaatgcttagactcccttgctattgctgtgcaccgggatgcaagaacaacatcgaccatccaagagcaaagccactcaaagactttaggaccctccaaacccattacaagagaaagcatggaatcaagcctttcatgtgtagaaaatgttgcaaagcatttgctgtgaggggtgattggaggactcacgagaagaactgtgggaagctatggtattgctcttgtgggtccgattttaagcacaaaagatctctcaaagatcatatcaaggcatttgggaatggacataaagcttatggaatcgactcgtgtcttgatcaagatgatgaagcgggctctgaaattgagcaggaaaataatgaatctttttaatttccagtcgtagttgatgtgtttaatttcaactatgaagacaagacaattgaggattctcttgttttgaactaattaaattgttgactatgactaccatctctaattaacg

SEQ ID NO: 29320 - DNA, 1813 bp, Glycine max
  Clone ID: TF_GmC4128_1
ctgcgaaatatgcaacaaagggttccagagagaccagaaccttcagcttcaccgaaggggtcacaaccttccgtggaagctaaggcaaaggtccaacaaagaggtaaggaagaaggtttatatctgccccgaacaaacctgcgtccaccacgaccctgcaagagcactcggcgacctcactggcatcaaaaagcacttcagcagaaagcacggtgagaagaagtggaagtgtgaaaagtgctccaagaaatacgcagtccaatcagattggaaagcccacaccaaaacctgtggcactagagaatacaaatgcgactgtggcaccctcttctccaggaaagacagcttcattactcatagagcattctgcgatgcattggctgaagagagtgctaggctcacatcagttacaacaacaaatctaaatttcaagagtgaagagggtggtaataatgtgatgaactcgcagcagcatggtttgggaggacatggactaattggagcacaaagtcttcaaaatgtttctggcattccacaatttggttcacatggttttcgtttggatttcaatggaatggaacaacaaattaggccaagtttgtcactatggttgaaccaggggaatcaccagatgaatagtaataataataacattaatagcaacaacaatagtgcttccgatgcgggacccaattacatgtcatcatcaggtttgcctgagattgtgcaaatggctcatgctaatgctttgatgggttgttcttcatcgatggtgtctaattttggaggagttcatgcgggttctaattcgagcagtgcaaatctttcactagggaaaagaggggaagcatgtggaagtactgtagtggacttggcttctatttataataactctgagggtcaaaacaagaattcaaagcctgcttcacccatgtcagcaactgcgcttcttcagaaagcagcgcaaatgggttccaccagaagcaccaacccttctattttcagtggtagttttggagtgattaactcaccttcctcacaaactaccagtctcaacaacaacaacaacggaggtgcagccatgatgctggcaagtaacacttctactgctgctgcaaatgcaaatgactttagctcattgaggcattcatcaaacagttttgaccagcttgtgatgcaaaccaatgcgcagttgcaaagtgagcctgtgaagttgaagcttcattcaaatggtgtggagaacaatttgacaagggattttcttggtgtcagcggtggaggaggaggtggtggtggacctcagtttcttccccaagaacttgcaaagtttgcttccatgggctcaccaatggggttgagccaattcacaagtaaccaatgaacgaactcgttttgtttatgagcttctaagataacctcaaacttcaaaggtttgatggaaggagaatgaatgagttggagtgtaccactgtgagagattgctcgatcatgattatgttgtgagtgggggacccacacttgttgaacgaaaagagaatatcgaacaccacgagtcgtgcatgttctcccaatattgttattgttgtttttttcttctgtctttattaaaccatgttatcgttttttgcttctcgatcttttccttgagagaaatgaagggaggcataaaataatgaaaggaattcttagtgaatcgctgaaaactactagttgcgtactactgttgttgaccgtcaaattacggttactcgtgtaccatggatatatcgttaattacaaaataatataatataaaaatttagatattacaagt

SEQ ID NO: 29321 - DNA, 957 bp, Glycine max
  Clone ID: TF_GM433K20.C25.o1.fg
atgccaaacgccactgaacaattctcaaacatcaacagcatcgagtccctccatgtttcccttcgcaacctctcccaactcagcacccgaatggattccgtccaaagcttcgtctcccaatcgatccaatcccacactctcctcactcaccaccaaatgaacatagtctccaacgagatcctaaccgccattcgccacgtcatcaccaacggcgtcgcccttgtcgccgcctcggaaaacgcgctccctctctcggagactccaacgttggactccccgaacaacaacgacgacgacaacgtggtggagctcgatgccatggagctgctggccaagcaccttcacttctgcgaggtgtgtgggaaaggcttcacgcgcgacgccaacctgagaatgcacatgcgcgcgcacggggacgagttcaagaccccggaagcgttggcgaataaagcccgtggagaaacgcgcttgaaggcgacgcggttttcgtgccccttggagggatgcaaccgtaacaagacgcacaagaaattcagggcgttgaagtcagtgttctgtctgaggaaccacttcaagaggagccactgtcccaagacgctgttgtgcgagcggtgtcggaagaagagcttcgcggtgctgtcggacttgaggagccacgtcaagcagtgtcggggagaggccacgtggaagtgctcgtgcgggaccacgttttcgaggaaggacaagctgctcggacacgtggcgctgttcgaggggcattcgccgatgcttggagaggagagagatacggtggtggcggcggccgcggaagggttacctgaagggttctttgatggattggatgaatttggatttggatccattcaaaacaactcttcacaggaggaacacttggccttggggcttcccacaaataatttagatgcatgggaattttctttttctaatttaatctaa

SEQ ID NO: 29322 - DNA, 1250 bp, Glycine max
  Clone ID: TF_GmC48528_2
cccacgcgtccgtacggcttcccatgtccaattcaaactgcaatccgacccgaatacttcactctcagtcccaggatccgaatactaccaccgcggatcctcatgttctgcttcagaacctttccctggttcggaccagaatggattctctacaacacttcctatctcaatccatcaacaccaacactcccctcgccgtcgatcaaatcgccatggtctccagccagatcgtctcctccatccatcaattgatcgtcaacggctcagctctcgtctcttactctcaaaattccaccgccgcctccggagcaccggatccaccgttgtatccgaagaagccggagccggaaccttcagtcgccgataaagcgaagcaaatactcgattccaaatttgggcctctcgaagacgacgacgacgacgacggcggcgccgaagacttcgacgacggtagcggaatcgtggagctcgacgccatagaaatcctcgccgagcacatgcacttctgcgagatctgcgcgaaaggcttccggcgcgactcgaacctccgcatgcacatgcgcgcgcacggagaacagttcaagacggtggaggcgctggcgaagccttcggagaccactgcgcagcggggcgcgacgcggttttcgtgtccgttcgaaggctgcaaccggaacagctccaccggcggtttcggccgctgaaatcggtgatttgcgtgaagaacacttcaagcggaccactgcccgaagatgacacgtgcgagcggggcgcaaaaagcacttctcggtgctctcggatttgaggaaccactcgaagcactgcggaggagaggccaggtgaaagtgcacgtgcgggaccacgttctcaagtaaagacaagttgtttggccacattgcgatgtttgagggccacgcgcttgcgctcgtgtgtgacaaagagggtaaaggaaaacaaatggtggaggacgacaaagatccaatgttgatgagtgaaagtggatttgaattgaatgattgttttttggatcaagagtttcccgaaggcttctttgatgattttgggtccattgatgactactgttaaggtaagtgttttagggtttcctagtaatagactttgattatgtatgtgtatttagggaatattcatattcaattgctagatttgtatttatgtccctatggtattgaaggattaaaattaaacagtgtttataacacaggatggaaatgtacgattaattttatttt

SEQ ID NO: 29323 - DNA, 456 bp, Glycine max
  Clone ID: TF_GmC73788_1
tgagaggaaagggagggcctcagaactccaaatccctactcccactaaagggagcaaatagttaagaacaaacacatagaggagttcagttcacgatagcaagtttcattgaataaaccatgacggaacctcagaatccttcaccattgacacattctccagcgttagaaatcacacctcaaccactgctacctcccaaaaggaaacgaagcctccctggaatgccagatccagatgctgaagtgattgctttgtcaccgaagacgctgttggcgacgaaccgtttcgtgtgcgagatctgcaacaaaagcttccagcgcgaccagaacctacaacttcaccggcgtggccacaacttgtcgtggaagctgacgcagcgagggagtacagagccgcggaagaaagcttacgtgtgtcccgaaccttgctgcgttcaccacaaccccgcaagggcgc

SEQ ID NO: 29324 - DNA, 457 bp, Glycine max
  Clone ID: TF_GmC2530_12
tattattattattattctgtcttgatgacaccaaatgattgagaaataacaagaggggaggagtaggagctaaattttatgcataagaaaacaatagctggccacaagataaacaagatagcagggaaaaaatcaaacatatacttcagcaattagttccagatttgcacaacaattatggcggcagcttcctcatccactccatttttgggaatcagagaagaaagccctcagattacaacacaccatcaaccctccacagtttctccaaccacagcgcctcaaaagaaacggaggaatcaacctggaacaccatatccagatgcagaggtgataaaactatctcccaagaccctaatggcaacaaacaggtttatatgtgaggtgtgcaataaagggttccaaagggagcaaaacctacagcttcacagaagaggacacaacctgccttggaagc

SEQ ID NO: 29325 - DNA, 834 bp, Glycine max
  Clone ID: TF_GmC2530_6
tacggctgcgacgacagaaggggattgtaaaaaatttcatttatggcaagagagaagggagcaaaatctggaaaagcttttgaagaggaaaaaaaggctgagaattataaataaaaagtaaagaaaagaaggaaggaaatggtgtgtgtatatgtgttggtgcatctgcatgacaccaaatcagtgaagaaactgagtaatattactgccagctcaaatttctcatttataacaagccagcctcaggaggaaaatcacatcaaggagtactcatggaggaggggttgagtatttgctgttgctattaatttcttcttcttcttcttcaatatctctgtctgttctatctccctctagatttttcttttgctagaattctcttgcttatgagtttttttctttctgagattggggatgtgaattaaagaggactcaaattgcatgtgggttttccagaattctgatacagttttggggttcaaggagaaaaagaacactctctcaggtgaagcagaagaaggttaattgttatatataggacttgctataagagatatggcggcatcatcttcctcagcgtcgctctttggatttagagaagaggatcagaatcagatgaagcaacaacattccctgacaccatcttcatcaacaacaccagctgcaccccccccccagaagaaaaagagaaaccaacctggaacaccatatccagatgcggaggtgatagcactatctcccaagaccctaatggcaacaaacaggtttatatgtgaggtgtgcaacaaaggtttccaaagagagcaaaacctacagctacacagaagaggacac

SEQ ID NO: 29326 - DNA, 482 bp, Glycine max
  Clone ID: TF_GmC150983_1
gaaggaagaatgttttaaggaaatggcataatgatcaagccctcaaataatgatacaattacactgtcattgtgaacaaatctaacatcatcttcaaattagtattcacattctttcgatataaaacaggacaaaatgatgcttatatcatatgaataaaaagaaaatccatttaattagaatgcaatttcctatgctctagaaccacctccatgatccctctcaacatgctccacaagggacacaggatcaagaaatcccctactacacttaggacatgcatcaatcttcttaacccctaatcggtttccatttctttcatgaaccttttgcacatgatccaccaaagcagtcacagaggaaaactttgatccacactgagggcattgctccacttggtgatcatttctatttccactgccactgctctgccccaccccgtctcttgtagtagctgcctgccaaacttggttaatttcatc

SEQ ID NO: 29327 - DNA, 753 bp, Glycine max
  unsure (1)..(753): unsure at all n locations
  Clone ID: TF_GmC2530_11
gtaaaattgtgtgtgcatatgtgttggtgtatctgcatgacaccaaatcagtggaagatactcacaaaacctctacctcgaactttctcatttacggacgcgtgggcttgggagaaaaattcatatcaagtggccatgatgggggttgatttaattttccttttttcttcctctctcttcatctcctatatctctcttctctgcttcaaaaaaattttcaagaaaaaaatttccctttattagtttctcttctctacttctctgttaggttcaagagaatccaaattcccttgcctttgagttttgagattggggataagaattgagaaggactcaaactgcacgtgggtttttcagaattctgatttaggtgtaaggtttcaaatacaagaaggaaaagaaacactttgagaagaaggttaattatacatagaggttttttttttataagatatggcagcacctttttctgcagcatcgctctttgcaatcagagaagaggatcagaatcagatgaagcagcagcattcctcaacaccatcatcatcaaccactccagctgcaccaccaccccagaagaaaagaagaaaccaaccaggaacaccatatccagatgctgaggtgatagcactatctcccagactctaatggcaacaaacaggtttatatgtgaagtgtgcaataaagggttccaaagagagcanaacctacagctacacagaagaggacacaacttgccttggaagctaaagc

SEQ ID NO: 29328 - DNA, 638 bp, Glycine max
  unsure (1)..(638): unsure at all n locations
  Clone ID: TF_LIB4281-040-R1-K1-G1
ccacgcgtccgggagtttctcccagaaaacactaatcagagaatagttggaatctccaattcttgtctttatctcttcatcagaaaaaatgtgcgaagccgtagaattgaagaaaggcccaaatacaaagatatcagacgctattactgcgagtactgcggtatctgcagatccaaaaaaacccttatcacctcccacatcaatttgcaccacaaggaagagtatgaaaaagcaagagctaaaagagatcccgaagcagaggcttcgaaatcgaacacttgcgaggaatgtggtgccactttcaaaaaacacgcctatttgttgcagcacatgcaaagtcattcacttgaggaaagtaatctataagtttctaaaatcattggaaaanttatgggttaatagtgtgaagcatntggatccncagagaaagatctccaaaatgcgcgaggcangcatatatggacttgatgggattaagtatcaggtagggggtgaccctcctggtgaagctccatcaaggatgccctcggtcacggctctgttcaaaattgagaggcattttggtgtgtgctggncgatgatttgcagggcaagttaccagaagaaaggaccacctgactcagcaccttctacagcat

SEQ ID NO: 29329 - DNA, 1444 bp, Glycine max
  Clone ID: TF_GmC168_4
cttgcttgcaccatgacccatgtcatgccttgggtgaccttgttggaattaagaagcatttcaggaggaagcacagcaatcataagcaatgggtctgtgaaagatgctccaaaggctatgcagtgcagtctgattacaaagcacatctcaaaacgtgtggcacccggggccactcttgtgattgtggccgcgttttctcaagggttgagagtttcattgagcaccaagatgcttgcaacatggggaggctcaggcctgagtctcaacctcttcaaccatctgcatgcctttctagaacagcctcaagcccgagtccttcaagtgaaaccaatttcagcacagctccatggccaacaaggatgataataccaaagccatcagaaccaccaacaatcttcatgaataaccctattactgctatcaccactgctgaaacctcatccaagagcaacaacaaactactccaccccaacttggatcttcaactctccacccccaccaccaccaacaacacatcaaatgttgcaaaccgtattgatgctgcaatatcacctaagagggatcatcatcatcatcatgagaaccattcaacccatttgcaactctcaattgggtcatcagatatgagtgagaagaacgaatcaaacaggaactcatcagagaagagcagcaacagcaacattaatgatcagaataataataataagcagtccaacaacatggccttgttgagggttcaagagcaagcaagggagcacttgaggatagccatggcagagaaagcatatgctgaggaagcaaggaaacaagcaaagagacagattgagctggcggagcaagagttcacaaacgccaagaggataagacaacaagcacaagcggaactcgacaaagcctactccttgaaagaacatgcaatgaagcaaatcaactccaccatgctccaaatcacttgccatggttgcaaacaacagttccaagctcgaaatgcagcaaccacccccgatgagaattccttggtgttgagctacgtgtcttctgctattaccacggaaggaggaggagaagtagaaaatgataataatgcaaaagatcatggcaaagacaacaactaactccactacttagagagagataatcatcatcatcaccgtcatcatcatctttctctctaaagtttataattctgtattttattttcctatgtcctcctctatgggttaatacttactagtaatacccttttttccatttcaaggctaatatctttgtgcattggtataccaagtgaagtgaaggtgagtgatcgatgttgattatatgtaagtgggatattataatagcgctcgggatggagaaattaaagagtgtaattcttcgtgtatcttgcagtttattgttgtgccatgtaatttgttaattaaatttggtataaatgcagact

SEQ ID NO: 29330 - DNA, 522 bp, Glycine max
  Clone ID: TF_GmC320119_1
cattgaatgccacagaatgaatggagggaatcaccatatacaagttgaaacgaaaaaaattataaaaataaaagtaaggtaaataattaacactgaatacaaattggttcttggggatgaggttaacttatagagaaacacagactccaacttcagtaatgacaatccaccaaagaagactgcttagagaagacaataacgtttttttctctttgctgaaacgaaaacttggattctctatgatcatcctctggtagtgctggaagattcaagtccaacttcaagggtttcttggcttcttgaaattcattgttaccaccaacaccaacaacatttccaccactcatagaagttgctaaagaagcattcacaagagttctgtggcgcctcatgtggccccccaaagcttgccctgatgagaattcagcaccacagatagaacactcgtgaaccttagcctttgttgttgttgttgttgtgctacacatattatttttaaccccatttggtattttcaaggag

SEQ ID NO: 29331 - DNA, 450 bp, Glycine max
  unsure (1)..(450): unsure at all n locations
  Clone ID: TF_GmC331407_1
cgatcgcataccggaacgagtactagagattgtcagtattgcggaaggacattttcgcgtaacgatgtacttcaaagacatctaaagacgcatgtggggcatcaagttggggatggtagaccgagagcgtcacctagtccatctatcgctcctgaggttccggattcaaggtcaattatccatcaaacacctcagatccaacaagaccagatctatcctcaggaccctctctctgcaaataccaatctgacggttcaggctggaccatcgactggcgattcagctataactggaccggtgtatacgactcaacaggatgaagcttggagaatccttcatgggctggtacaagctactcaacctgtttctgccccttcatactctctcaaacaagatgtaatcaacccattccccgatatgttcagcaatcaagccgcangttcatgggac

SEQ ID NO: 29332 - DNA, 761 bp, Glycine max
  unsure (1)..(761): unsure at all n locations
  Clone ID: TF_GmC1674_1
ccccgagcgaacacgcgcaggccacgcgttcgcccactcgtgcgcccacgcgtccgtacgactgctagaagacgacagaaggggactaatgaaatgtacaatggttgttctgatgattctgcttatgggagtgatgagaacagcactgacactgattcttatcctgctccaaaggctcacagcaacaggaacaacctcagtgtccagaaggggaagaagaagaagaaattgaagtcaaagaaaagcaaggcacatgagtgtccaatttgcaacaagattttcaggtcaggccaagccttggggggtcacaaaaggtcccattttgttgggggttctgaggaaaacacacttgtgataaggccaagtgctcctcctgctgctgttccttgcctcattgatctcaatctaccagcaccggttgatgaatagggagaaagaaatgttggtgccaaaatcctggttttttttttttttgcatcattttgaagcatcttctgttgaggtagctgaatgtctctggagttctgaaaatgtcttgtctttatccccatatgatgaaagcaatgacaatgtacagacaagtgggtaattggtttttgttcctaaggccttagatccattatttggtaggggtagtctttctttttcatgtttatgggatataagaacttactagtttctccactgaatattttctttacttcctttatcaagtacaactatatattcctggaantatgttcttttcatgcagatgtaac

SEQ ID NO: 29333 - DNA, 2797 bp, Glycine max
  unsure (1)..(2797): unsure at all n locations
  Clone ID: TF_GmC135_1
ataacattgttgtatttatcacatcttatgaagtggaagcccggaattgggggtgaggcctggcacgctctgtgtacttggtcacttgtccatccttttttttgcctacactcatcgacacttttattgcaaagcttaaagggacttcaatagaggccaaaatatgtaattcttgtgattggtgccatgaagaaaataaacgatagaagagaaataaagcaaagacattatgatggaggcactgaataggggtctagagactgtgtgggcatcgcccgaggaaaagacagaaagagcaacgtcagagagtttgccgtagggttctccttggtttgtggtttccggtattgttttgcactgcttcagatacagagagaagggaatccttcttctctctctctctctttctcttttcctgagtttgaacttggagtaactgagtctatatttttgttcatactagtgtggtcatcactggattttcttggtatatataaaaaaaaaacaaaatattgtctcttgggttggttccaaacaagtagaggaaactatcaattaagtttatagtattttgcttcacagatgtacagaactctctccacttttcattttttttattcccgcagattattttttctttgttggggtttcaaagagtaaatattgttaagtagttaagttgtatatcaattttgcctctttgttctgttcttttctcactagtccagttccagctttttcctttttctgttttaggtgaggattgtcctcagatcccagaagctatccagacttgttacatacgaaaaactcagatctatgtctcatgacaattcacaaaactccaaatatgagaaaagatgaagggtttgaatatttgatgttccaaaaaccatgtctaatttgacttctgcatccggtgaagctagtgcatcttcaggcaacagaaccgaaattggcactgattactcacaacaatactttgctccaccactaagtcaagcacagcctcctccactaaagaaaaagagaaaccttcctggcaacccagacccggaagctgaagttgtcgccttgtctccaaagactctcttggcaactaataggttcatttgtgagatctgcaacaagggatttcaaagagaccagaatctccaacttcacagaagagggcacaatttaccatggaagctgaagcagagatcaagcaacgagattataaggaagaaggtgtatgtgtgcccagaagccagttgcgtgcaccacgacccttcaagggctcttggggacctcactggcatcaagaagcacttctgcaaaaagcacggcgagaaagaagtggaaatgtgacaaatgctccaagaagtatgctgttcaatcagattggaaagctcactccaagacctgtggcactagagagtacagatgtgactgtggaaccctcttctcaaggagggacagtttcataacacacagagccttctgcgatgcattagcagaggagagttcaagatcagtgacaggcataggcatagtagccaactcaacttcaactcaaccaactgcagcagcagcctctcatcaacaagacatcatccatggtaatagtaacaatttctcattgaagaaagagcaacaagcaggtttcagaccaccttggattggacaaccatcaccctcttctgcttcatcattcttggtctctcatcaagaaaaccctaaccctagaggtggtggtcctattcccactcttcttcctccttaccaaacagctcctcacatgtcagccacagcgttgctgcagaaagcatcccacatgggtgcgacgatgagcaaaaccggctccatgattgggacccaccaacaacaggctcacgtgtctgccaatgccgctttgaatttgtcctcacgtgaccaccagatgacccccactctccatggcttggtacctttcgggaataaagctgttcctgctgttggtaatggtgtttctccttcactccttcaccatatcatcgactctttctcttcaccctttgaagggacttcttttgaggacacttttggtggtgctggtggcgatgccatgacgaaaacaaccaccgccgatgacggtgccagaggaaacaataatgaagccctgacaagagatttcttgggtcttagacctctctctcacactgatatcctcaacattgctggtatgggaagttgcatcaactcctcccaacataaccaaaccccaaacccttggcaaggttagctccatatgtcttatacatatttggtttttctttttctttatttcattggtatatatatacatttattttagcctactttttaattttgcttttgtttatgaattatgatatatattgtcaatcttcccaaagtgaaaaacctttcggagtccaaatattttatatgtgtggaggagcgatctttcaatttaaaaggaaagggggggtatgttgcaatttggaattagaacaagatggggttgttagtggtccctttaaaagttgaaagagttggccgattcaatcccagtggtactgtcaatcccttttcccctttggcaaaaaacaatgtccccttttttcttttttattacatggatggcaggatggaagacttccagtagatatcacttgtgtnattagtaaccatcatgggaggctcaaacacccatgtgatacgtcctcttgaaaggcatggcattccttattatttggttatgcacatctaatgaaaataaaagagaaggggagatattgcatttgattaaaatact

SEQ ID NO: 29334 - DNA, 2003 bp, Glycine max
  Clone ID: TF_GmC135_2
agccaagcaagaagtgtgtatttgaacaaaagtttaatttttttttagccaaaacactttttaactcttattttgaagcaaaagaaacacacaataaagagagaaatattgcagtgatatttttctgggggttgagaaagagaacagaagaaaagacagaaagctcaacgtcagagttagccgtataaggttcgcttattgtgtgtttgtggttttggactagctgaagtttgtcctttggatcccagaaacctttccagcatttgaaaaaccaagatctatggcctataccacaaccttaggtttctaaaacttgcaagttgcaagtatatatatggagatgaagggttttatgttctaccaacaacagcaacagcaacaaatagtggaggagaacatgtcaaatttgacttctgcatctggtgaagctagtgcttcctcaggtaacagaactgaaattggaaccagctacatggctccaccaccaactcagattcaaccaccaaagaaaaaaagaaacctccctggcaatccagaccctgatgctgaggttatagccttgtcccccaagagtcttcttgccacaaacaggttcatttgtgagatctgcaacaaaggatttcaaagagaccagaaccttcagcttcacagaagagggcacaatttgccatggaagctgaagcagagaacaagcaaagaggtgaggaagaaggtgtatgtgtgtccagagccaagttgtgtgcatcatgacccatcaagggccctgggggacctaactgggatcaagagcacttctgcagaaagcacggtgagaaagagtggaatgtgacagtgctcaagagtatgcagttcaatcagattggaaagctcactccaaaacctgtggcactagggagtacagatgtgactgtggaaccctcttctcaaggagggacagtttcataacccacagagctttctgtgatgcattggcagaggagagtgcaagagccatcgcaaacccacttcttcccccacaacaacaacaatcttcttcctctcacatgagtactctccaaacccaattcaaccctcaaaacctccatgccttcccattgaaaaaagaaatgcccccttggcttggcccaccagcaacagtagttgttgatcatcatctgtcttcatcctcatccataatgttctctcctccacaccaagaaaacgataaccctccctagtcttggtcccactcttgctgcctaccaaacagtccctaatccacacatgtcagccactgcattgctgcagaaagcagctcagatgggtgcaaccatgagcagaagtggttccacaccagccatgactgggccccaccatcatgctcacgtgtctcattttggcttgaacttgtcctcacgtgaagacaccaccaccaccaccccttcaacaacaactactaatgctaacactgctacagtgttcagccatggcttattatcatcatcaccattggggaataaagctgctgctgctgctgctgtgtcttcttccgcaccatcccttcttcacgatgttatcaactctttctcttctccttctgcctttgaaggaaccccttttgaggatgcattcattcagagctcaaagaaactagatgatgatcataacttgtatttgcatgacacattctcaaaaacaagtggtgcagctgggaataatattaatgaagggttgaccagagatttcttgggtcttaggcccctctctcatgctgatattctcaccatcgctggcattggaaattgcatccatgatcagcagaaccagtctcaaaagccatggcaaggttagctatagctatgtagctccatatatatatgtggatcttctttttcatcctttaattaatcatctatatatataaattttttcccttttaaattagtgtaacttttgtttatgatcttttcgatcttcccaaagggaaggacctttctgaatcgatcccaatgtttttattcctt

SEQ ID NO: 29335 - DNA, 879 bp, Glycine max
  Clone ID: TF_GmC23433_3
ggctcgagctcgagccgaatcggctcgagggttcttgtattcttgtgccagcaaacaccctcgtctccacaccataaaaggaggagagtttcctggcttttgtcttcctctagttgcacaaatcccatcttttctgtctcaattacctctcctttaatttttttttccttagtttttttctgaacaaaattcatcttgctgcagctatctagcagcttcaacaagctgagtgaaacaaaacaaacaaacacttgtttgtaaaattgaataaagggaatattttcaacagattcttcccttttctttggctaccttcaatgtcaaacatcacaagttgtgatagtgggagcttctctacagagaataccagagaagatgcagcagttaaacaacagcaatctgagatgcttggtcagttccacagtccacattctcacacttcaactacaacaacaaataatagcaatggttccaacacaaattcacaaccacctgcacctgttaagaagaaaaggagcctaccaggaaatccagatccaagtgctgaagttattgctctatcaccgaccacactaatggccacaaacaggttcatatgtgaaatctgcaacaaagggtttcaaagagaccagaaccttcagttgcaccggcgaggccacaacttgccgtggaagctgaagcagagaacaagcacggaaattcgaaagatgatttatcgtgtgtccagatccttccgtgcgtccaccacaacccagcaagagcactcgggagatctcactggcatcaaaaagcacttctgcagaaagcacggcgagaagaattggatatgtgataagtgctcaaagaatacgctgttcaatctgactggaaagcccactc

SEQ ID NO: 29336 - DNA, 449 bp, Glycine max
  Clone ID: TF_GmC124792_1
taagtatattagtttctgagagagagagagtcttaattgattaatcctgctatgaattcagagaagcctgtgagtcctgagatttcaagtgaagaaaatgatcatgatcaagaagatgacactggtggaaccaaacgctcttatgagtgcacattctgcaaaagaggcttcacaaacgctcaggctttaggcggccatatgaacatccataggagagacagggccaaggccaagcaattcacacttgatgcttcaccttcagttaacaaattcaatagtaacaacaatgattccatggcccttccctttgtctcagaaattatgaaccaacccacaaggcctaattactcccctttggagtctcagatgaactttcatccaccacatgccttttattatgagttttgtaactcaaggtctcagccttttagtttgaacaaccaagagct

SEQ ID NO: 29337 - DNA, 636 bp, Glycine max
  unsure (1)..(636): unsure at all n locations
  Clone ID: TF_6847267
ataaaagaaatgaataaaagtgtgaatcacatatttacatccccactaattgaatcaatttgaattgatgaattgtgtaccataatatgaatggaaagaatcaacaattgtgtacatacaaggctaaaaacaataaagaaggtcaatactaaaaacagatgaatgagaagttctcggtgaggctaatttatagagaaaggacaaacttcaactttagtaatggcaatccaccaaagaagaagttgctgagaagacaataactttttctttggcctgaaaaggaaacaacttggattctctgtgatgatcatcctcaggtgccggaagattcaagtccaagttcaaaacatctttgttgtgtttcttggattctctatttgcattaattgccccacacgtaggtgcactcccaaaatttctatgccttctcatgtgtccccccaanncttgcccagatgaaaattctgccccacatatggaacactcatgaactttacacttagcattaatagtactcatcctantgttgctgctgctattattattattatacaaaanngttgatnnnngtnnnnngaanntggtgcttgtggtgtcacaataatnnnnatcatgattatgaanannattatnatc

SEQ ID NO: 29338 - DNA, 318 bp, Glycine max
  Clone ID: TF_5770686
cttccttcttttagtgaaatttatgtcttattggaatttccccttcactttgcaaagaaagatggagttcaattcccaaaaccctaaccaatctgagataagatggagctcagatgatcaggctggtcctggacaagtaaaatattcttgttccttttgccaaagagggttctcaaatgcacaggccctaggaggccacatgaatatccatagaagagatagggctaaactcaaacaatctgctgaggaaaagttgctttctttggacatctcaatcaaaaccactggcgatccaaatgacccttctgatttggaaga

SEQ ID NO: 29339 - DNA, 557 bp, Glycine max
  Clone ID: TF_GmC77129_1
ctcgagccgctcgagccgttcagccactaatacttcttcccttactgaactctttgtgtgagtttcttattgaaatttgagtcaagcgagcgagacacagttttgaagatgctaagaaacatggatgaaggagaaatcatgacaaatattgctttccctcagaacttaactgcttccgctgcatccagtgatcacaacaatcctcctccttctttgaagaggaaaagaaacctcccaggaaacccagatcctgaagcacaagtcatagccttatcaccaaagaccctgatggctacaaacaggttcttgtgtgaaacttgtgggaagggtttccagagggatcaaaatctccaacttcatagacgtggacacaaccttccatggaagcttaagcagaggacgggaaaggaagcaagaaaaagggtttatgtgtgccctgagaagagttgtgtccaccatgacccttcaagggctcttggagacttaactgggataaagaaacacttttgcagaaagcacggtgagaagaagtggaagtgcgagaagtgctcgaagcg

SEQ ID NO: 29340 - DNA, 246 bp, Glycine max
  Clone ID: TF_700743676H1
aacgtatcagaataaacaaagaaagtcctctctctaatggagcggtacaaatgcaagctctgctccaggacattctccaatggcatagccctcggtggccacatgaaggctcacttagccaccctccctcttcccccccaaaaccaacaaccaccactttctccctctgctgctgcttccttctcttctaattcctcgtcagaacaagatcaagccacacacggtgaaaagtcgctgatttatggg

SEQ ID NO: 29341 - DNA, 565 bp, Glycine max
  unsure (1)..(565): unsure at all n locations
  Clone ID: TF_jC-gmro02910037d11a1
ggctcgagcacttaatatacttccttcccaccttagtcagatttacaactgttttccaaactgagtcaaacttaggattgaaaaaaacacctaagctctaagatgctggaaaagatggatgatggagaaatctcaaatgctttccctcaccagaacccttcaactgctgcatctaacaatcagcctcctactttgaagaggaagagaaacctccctggaaatccagatcccgaagctgaagtcatagtcctatcaccgaagactctaatggccacaaacagattcgtgtgtgaaatctgtctcaagggtttccaaagggaccaaaaccttcaactccatcgcagagggcacaaccttccttggaagctgaagcaaagaacaaccaaagaagtaaggaagcgagtttatgntgtgtccagagaagacatgtgtccatcaccacccttcaagggccctgggagacctaactgggataaagaagcacttctgcagaaaacacgtgagaagaagtggaagtgcgagaagtgctcaagcgttatgctgttcagtcagattggaagcacac

SEQ ID NO: 29342 - DNA, 1607 bp, Glycine max
  Clone ID: TF_GmC38653_4
aattgtctgccgataattattcggctcgagctcgagccgatcaagatgagatgcagattgttgctgtgaacatggctgtgtctggtttgtctgctgctaatgagcgagtgaaggaggttgccttgttggggattgaaaatcttgcggatgtgcagattcatgacctgttggaatgtcgcaagtgcaacatgagcttcaatgagaaggatttgtacttgcagcacctgttgtcctttcaccagaggacgacaaggcggtaccggcttggttcgtctgttggagatggagttataattaaggatggcaagtttgagtgccagttctgtcataaggtgtttcttgaaaggcgtcgctacaatggtcatgtggggatccatgttaggaattatgtgaggaaagttgaagattccccgggtcagccaaatgtccaggggacagacgacgagactcttgtgagatggtaaggccctctgaagaaaatgtggtacactcttgggattttaactcctctatatccacagaacaatctttgggttgtttacctgcattcaactctgatgagggaggaaaacagttttgcagtgttgatcatgaacatgataatgtcaaggggttccaggaattgagatttgatgaaatagatattgttgagtatgattttttcctgatgtaccaactgaattgagaaataacacagtggtggaagggacgtatgcatccccagttcagtttgaatcacaagaagttatgctaaatattggtggcagaaatcagcttacaactgtgtgtgtatggtgtggaatagagtttgaccatgatgctgttaattctgaaatacaaccagattctgttggattcatgtgtccagcttctaaggcaaaaatctctggtcaagtcaatgtgttggactgtggatccccgaatgctggctgtctatagactgttactcaagaaccaagtgatgagcaaaaaagcagtcatactgcatagaccaatatatatatatatatatatattaaaaagacaaaacaaaaaaattgaagttactaaaggtgggaaatgcgaggggagagattccaatatgatttaccctttccagaagaatctattaccaatatgatttacacttgttatcgtttgtacttgtcacaactgcagagattttagctttggcagctgaatgatattccaaagatagtaaaaacagatgatctagaagaaaaaagccaggatttggaggttgatggaatactcaattatagattgtatcgtgttattttttattaatttcacctcgtatgttgtattgtcgatttgtcgtacattgccccgttcattcgtatagaaaccgatattcagtactgtattgttttcttttatccacaacactgctgtaatagtgtgcctggggctttcatcttgaactaggtactaaactaacgagtgtattccccaattacaccaaatgaaatatgaacatcaacatatgtatacgctggctgtcgtttacttaggatacaaatgattctcactctataaacatgttcacaaatgacaatttctatttatgttatttaaatcgaaggttaactttgtgacgagtttcg

SEQ ID NO: 29343 - DNA, 1275 bp, Glycine max
  Clone ID: TF_GmC71690_1
catttttctctcagataaataatcattgcaacactgttgttcagaggaagtgactgacatttgggactccgaagtccccattaaattccaaattgaaaaccgaaggaaaactcagcgtgtgattgaaatttgaagagtgtgaagatggcgatggaagtggagcagaatcagaatcatcaattagggtttcccttctggaaaccgctccgtcgcaggttcggacccgaatctcctttcttcgctcatggcaacctcgaacgggaacttctcgccaaacagcttgctttggaattaacagaagagaaacaacagcttgagaaatggatgcaagaggaagaaggaagggaagtcttttgtcccattgtgggttgtggtgcacgcttgacctcaatggaggactttgaaaatcactataatgcaaggcatactgcatcctgttctgtgtgctccagagtttacccgacatcttggttgctcagcatacatgtatctgaagtgcatgattctttctttcaggcaaaagttgcacgtggctatgatatgtacgaatgcttggtggaaaggtgtggattgaaattcaaaagctacaatagtaggcagcagcatctggttgacaagcataaattccccacctcatttgagtttttcaagaaggctaagccttcaaagaaacataggttgaagtcccaacgcaaacaagctgtttgtaaggaggattcttcaggaatgatggaagtggaaaatgcatccatggatgaccttgtttcagcagtctctaaattgaacacttctgactccaccccttcatcaatcagttttggtcgccgccacaaaggcttgtcatttgtccctcgagctgttcagcgtggaggtggatcaaactcaacagcatctgtgacaaagaaataagcttggactcaacaaatctgcattcttaattgctgaataatcaacattcagatgcagctcccttataaaatccgtgtggacgtcttgcattctaagtttgaagaagccaattaagttgaagatggaaaattagaatcatgctggaggatgtaataacagcatttgtcagtattatctttttttgctcccacttggggctgtaagtttgcccaacacaggcaatatgagcatgcgaatatgcctggcttgtataatgtggagattttgagcttctttttctatgatattgttctgttaacatctaaaaactttactgaatagccacattgtaattagagttgaacccaatcactcttaaagcttgtc

SEQ ID NO: 29344 - DNA, 549 bp, Glycine max
  Clone ID: TF_10846993
ggatcaaacaaggaagttcggaagaaggtatatatctgtccagagaaaacctgtgtccaccacgacgcggcaagggctctcggtgatctcaccggaataaagaagcattacagcagaaaacacggtgagaagaagtggaagtgtgaaaagtgctccaaaaaatacgcagttcaatctgattggaaggctcacaccaaaacctgtggcaccagagagtataagtgcgactgtggcaacctcttctccaggaaggacagttttattactcacagggccttctgcgatgccttagctgacgagagttcgagactcacctcagttgcttcaacaagcctaaattttaagagcgaagatgcaactatgatcaacacacaagctagtttgtcgacacgtggattaatcactgaccatggaatgcaaaatgtttcacaatttggtccacatgggtttcgtttaatgaacatgggcacagaccagcaaagaccaaacttgtcactatggttgaaccaaggagatcaccacattaacaatccacttgatgtggcatta

SEQ ID NO: 29345 - DNA, 1276 bp, Glycine max
  Clone ID: TF_GmC910_2
ggctcgagataaagcaagtagctaatgagatcccgaagcagaggcttcgagagcgaacacttgcgaggaatgtggtgccactttcaaaaaacacgccggctcgaggcagcacatgcaaagtcattcacttgaggaaagtaatctataagtttctaaaatcattggaaaattatgggttaatagtgtgaagcattggatcccagagaaagatctccaaaatgcgcgaggcagcatatatggacttgatggattagtatcaggtagggtgacctcctgtgaagctccatcaaggatgcctcggtcacgctctgtccaaaattgagggcttgttcatttgtgttttgttcttgtcagagcatcatgatacttttatgtgtgtgttttttgggttttagtttcttgctttaacagtatttggtccagaggccatttgtgtgtgctgtcgatgattgtcaggcaagttacagaagaaaggaccacctgactcggcaccttctacagcatgaagggaagatttttaagtgccctgttgagaattgcaacagtgagttctcatttggaaagcaatatgaaaagacatactgaggagattcatgatgacagttctaccactaccagtagtgacaaaacaaaaactttcgtttaatttgttcatggttttgtgtcaacagaaatctaatctagacaagcataagaaggctgtgcacttaaatgtaaagccttttgcttgtgggtttcctgattgtggcatgagatttgcttacaaacatgtgcgagataatcatgaaaaaactgctaaacatgtttttacccttgtaagttcttttccctttctattccctttgtgcaaaaggctatcataagtgatattgtcatagtcacacggctttgcattgactttggttcagggggattttgaagaagctgatgaagagttcaggtcaaggccaaggggaggaaggaagagaacatgtcccactgttgaagtgttaattaggaagagggttaccccacctagtcaattggagcattggttatttatgcaggatagtgagtagagtgcatttagcactctgtgctcctattacaagtaggcaaaatgtaaatttaacatgttgacaggagtatataacattttggattattgttaacagatatatagaatttaggacaacgtgtaataatgattgatgcttatgagttatgacagattccatagtgtagcgaatctattaacctttgtaccaatttgcaatttaaacaactgcttttgttt

SEQ ID NO: 29346 - DNA, 429 bp, Glycine max
  Clone ID: TF_GmC1644_3
aaaaaaagtcatagtttttttttggggttgtgtgtgtcttttggtggaggaatgcttgtcacctactcctttaaagttctcccaaaaacacttttgtgagtgagtgagtgagagaaagaagagaaggagttgaagtggttgttgtattgtagtagtgtgtaaagtcttggtgatggatagacacaaatgcaagctttgttcaaggtctttcagcaatggcagagcccttggtgggcacatgaaggctcaccttgcttctctccctctccctctccctccaaagcttcactcttgtttctcttcctctgactcagaacaagaacaatctttaagggagaatcctaagaaaaccttgaggattctggatcctgaagacagagagagcgagacagagtctaataagaacccgactcgttaacgatccaagcg

SEQ ID NO: 29347 - DNA, 1516 bp, Glycine max
  Clone ID: TF_GmC58470_1
ctgataccgcaatctctttcgcattctctctctctctctctccaccgtccactcccttcagccatcttgtactctctctatctctctataaaagcaaacgcaactagccataaactgttcccactctctcctcaacacctttctttttcctttccacccatggctgacccctactccaatttcttctcttcctcttcacccttgttccgtttcaaccacaaccaatatttcccttcttcaaacccttctccacaacaccacaaccacaacttcatcaaccacacaaaaaccaacgacaccaccaccaccaccgcctttttccactaccaccaacaccaaactactactgctttttcttcttttccaccctcacctcctttgagagaagaactacccctcttgaagctgagtccaacaaagcaagatgaggaggaagtagaggacttggtgtctaattgcactggtggagccatggacgtggaagagaggatccaccttaaagaggaattagaagatgatgaagatggaagtactagtgtcactgttgcactccacatagggttgccaagccctagtgctgctgagatggcttctgtcctctcttcttcctctcatgagatcactgacaaagaccaacatggagatcatggtgctgctgaggattcttcttctgctggcttcagactcaacaagggccagtactggatccctaccccttcccagattctcattggccctacccagttctcttgccctgtttgctgcaaaactttcaacagatacaacaacatgcagatgcacatgtgggggcatggatcacagtacagaaaaggacctgaatctctgaggggaacccaaccaacaggaatgtgaggcttccttgctattgttgtgccccagggtgcagaaacaacattgaccacccaagagcgaagcctctcaaagactttagaacactccaaacgcattacaagaggaagcatgggatcaagcccttcatgtgcaggaaatgtggcaaggcttttgctgtgaggggagattggagaactcatgagaagaactgtggcaagctttggtactgtatttgtggctccgatttcaagcacaagaggtcccttaaagaccatattaaagcattcgggagtggccatgcagcttatggcatcgatggattcgaagaagaagatgagcctgcatctgaagtagagcaagataatgatgattccacccagtgattaatgagaattaatgcatgggtttaatatatgtgaattatcctagttattttgtgaaatgattggggatgaatatatataaagcttaatttggcttcctagctatttcagcactatatataagcaccaagtttaaatggaaagccaatctttttttttaaaaaaaaaattatctttcttctgttggcaatgttagctaggactaggagagactggatactgaacacatagctggtaaagctagatatatatatccaacttctttgcatttgttctcgtgt

SEQ ID NO: 29348 - DNA, 734 bp, Glycine max
  Clone ID: TF_LIB4164-053-R1-K1-F8
ccacgcgtccgatttcttggatgctactttctttatgcagtgcctatgtcacggattcgtctgtctgcttcaaagcttttgtactttcggaatttgcaaggtatagcttgttaatttaggacagttttcaattctcttcggttccaaacatgatgtctcaagaagcaatacctgctccttccaacaataacaacctcagagactccacggttcaacttcatgaaccaaactcaaaccctaatcctaaccctaattcggttaagagaaaaagaagcctacccggaacaccatatccgaatgcagaagtgattgctctgtcgccaaagtcgctgatggctaccaaccgattcatctgcgaagtatgccacacgggtttccagagggaccagaacctgcaactgcaccggcgagggcacaacttgccgtggaagctgcggcagagaaacagggaagacgtggcgaataagaaggtgtacgtatgtcctgagaagacttgtgtgcaccacgacccttgcagagccctgtgggacctcaccgggataaaagagcacttcatgtagaagcacggtgcgaagaagtggtagtgcgaaaagtgctccaagaaacacgctgttcaatctgactggatagcccatagcaagatgtgtcggactacacagtacagatgtgactgtggtacaatattcttcatgaaggacagctttgcaacgcatatggcctttgtgtgacgccat

SEQ ID NO: 29349 - DNA, 780 bp, Glycine max
  Clone ID: TF_GM169K08.C11.o2.fg
atggaggagtctcagtacttgctgtggatcaagagaaaacaaatcttgaagtcacacattcaacaaccatttggaaccagcaacaacaacaactcatcatcatgggaggaaagggcttttgcagaagatgctgctaggatacttggtgggtgcatatggcctccaaggtcttactcatgcaatttctgtaaaagagagtttaggtctgctcaggctctagggggacacatgaatgtgcacaggagggacagggctagactcaaacaaagccttagtcaccataatgaagcccttcaacatcatcaaaaaaatgattgtacagttgcaacaagcaaagtctcatcttctagggcctcaactatatctacccaagaaatttgttctcatcagcctaccatgtccctttattcttccttaattgggtggggacatcatcaccacatggagtctcctgattcagaaccaaaagggcaagtgaatgcaagggaagaatttttaaaaggtttgggttgtaatgattatgttgaaacaagtttgtctgtgggacaaagtgcagtgtttggccaaaaattaccaacaactgaatcatgtggggacgaaagcatcagttataaaagatcaaagacttctatgcctcctttgcctggagttttcctcaagccatgttcaaatgatagaaacctaacttttcagtctgcagaatttgtacttggactcaagcctggaatggaagacttagatcttgaactcaggctggggaagccacagaaagttatttag

SEQ ID NO: 29350 - DNA, 378 bp, Glycine max
  Clone ID: TF_GM169K08rgnG6.C1.o1.ma
atggaggagtctcagtacttgctgtggatcaagagaaaacaaatcttgaagtcacacattcaacaaccatttggaaccagcaacaacaacaactcatcatcatgggaggaaagggcttttgcagaagatgctgctaggatacttggtgggtgcatatggcctccaaggtcttactcatgcaatttctgtaaaagagagtttaggtctgctcaggctctagggggacacatgaatgtgcacaggagggacagggctagactcaaacaaagccttagtcaccataatgaagcccttcaacatcatcaaaaaaatgattgtaagtcatcaagtgctcaattttctgaagagaatttcaatttctttctctcatctagatag

SEQ ID NO: 29351 - DNA, 1269 bp, Glycine max
  Clone ID: TF_GmC5902_1
agcaggtagaagatgatgatgactcttgggaggtcagagcttttgcagaagacacaaggaacatcatgggcaccacatggcctcctaggtcctacacctgcaccttctgcagaagggagtttcgctccgcccaagccctcggcggccacatgaacgtccaccgccgcgaccgcgctcgcctccaccaagctccagtaccctcctcctcctccaaccccatgacctcttctcttcccacttcacccttcatcaatatccctcctcaagaccttgttgcaaatgctggcttgtgcctcctctaccacttgcccaaaagccctagtagtactgcaccacccttcccaccttcccccactactccttctccttccactcttctctctatctcttcttatcctacaaccaactttctgatgcaaacttcctttaattttcccggtgcacccgcaactgggatcaatactactactactactactgtttcctctttgtgctataactctagcaaagtggaacaatccgcaacttcctcctctattgatcataatggccacctcgaagagcttgatctagagctccgcctaggccacaaaccaacaccaacctcataaagcttgcctgaggagctcatcagaaatatatcaaatatatattatatagtgtgaaccatatatatatatatatatatatatatatagtactgctggtagtagcttctgagaaaaattaaagtccgacaatattattgttttgctctctttttaactgcagcgatgtgtggaagacaggaagagatatggagagtgttgttatttgtagatgtttgttataccattaccatgtccaccttttggtatagctgataggcttgtgggttttgttttgggtttaattttgttatttttcttggtggattgatttttatctgtgtgaatgttttgtgactgaaggtgcacatggagatggagggaggagcaagcagggggtggggataggaaagaaggagagaggtaccacatgtaaatttttcaaacaaaaagaaaaatcaattgtaagttggtattaatttttggagaaatatattatcagtaattatggggggagattagggtttggatttagacactgaaaaaggttgcagtgaagtgtcattttctattttagagttgtctaagtacatacatgtctgtctgggcatacatttccgtggggattattttcctcccttcactaagtaaacctagtaatatattattatcttcaccgttc

SEQ ID NO: 29352 - DNA, 1316 bp, Glycine max
  Clone ID: TF_GmC166371_1
attttactaatgtcttattgactggtggtggaaaccaaacacaaaataccaaacaataaaaaaaagactatgctctgagacattgaaggtagagagtaccaaccacttcaccttccacaccacactctcctctaagccatatatctcatgcttaattttttcatagtagactcatgtagctttcaattcctctccacaatccaacaattcccatctctaattcctttccttttcctgaattaagttgaacataatggaggaggatcaatgttggatcaagagtaggagaaagtactcaatgagctctaatcttgactcatctactaattacccctcctcctatgatgaccactcatcatgggaagaacaagccttcgcaaaagatgcagctaggtctggttgcacatggccacctcgatcatattcttgtagcttttgcagaagggaatttaggtcagcacaggctttaggcggccatatgaatgttcatagaagagatagggcaagactcaagcagccatatagccctcagaatgaaatcctaagtgttgatcttgagaaaattaccacgcaacccctgaattcagttcagatttcttttacttctttgggttacttatacccatcttctcttggtgtattgacccataataacactaaccctaattctgatccttattctcatgctcctccttcaccttccaaggttttagtctcatcaatcaataagagaggaagagagaaaccccagattccgctttacaaaggatgtcatgagtcttctcctgatcttccttctaaatccatgtcaaatttaactgaagacttcagattttgttcacgtaggctcgatcctgaagctggtgttgagaaaaaattgaagggattggattctaggtgtgggagtactgagggagatgatgataaaacggacgtggctgtgagcttgaacttgtttatgaatctagctcgcccaactgtgcagtttgagactaaggagaaagatacaagtttcaagaagaggaaagaagatgcttcatccattccattcttccccaaatcatgctctgttgataggcttcatatgcagtcaaagatgtttgaattgagccctagttccatagaagagctagatctggagctaaggcttggttataggtccatggtatagtaagtagtaacagatatgaagcaccaatattgtttataaatgtaattttactcttctggttttcctcttgttccttgtttatttctttgataccatgtaaggaagattttcacgtttaatatattggatttgtgataataacaat

SEQ ID NO: 29353 - DNA, 1003 bp, Glycine max
  Clone ID: TF_GmC736359_1
gcacgaggaacctgtgagtcctattattcattctggtgtctccctctttgactctcttagaaaaccaaacacaatacaacacaccaacaaaaaggttagagtacccatcacttcatatcttccacacaaaaaactccctcaagcaatccctatctaacaagatcccaagatagtagactcatgtggctctcaattccttgcttaaatatgggatcacttgcataaccctcttcatccagacatatccaccttttttctctttctctttattgttatttacccgaagggtttttgttttgggtgatattttgtgatttgtgttccaatggaacagggtcaatgctggacaaagaggaagaagtactctttgagctctagtactggttcaccaacaaacccttcctatggtgactcatgggaagaacaagcctttgcagaagatgctgctaattctcttggtggctgcatatggcctccaagatcctactcttgtagcttttgcagaagagagttcaggtcagcacaggctctaggtggccacatgaacgttcatagaagggatagagcaagactaaagcaacaacccactagcccccacaatgaaattctatgccatgaccttgaaactcagcggcacaagccagttcaaagtccttttgcttctctaggtggttatctatatccttctcctctttgtggattggcttgtaaaaaaactaaccctaattgtgatcctgattttgttgcttcaccttcttcatcaccctcgccttccaaggccttattggctccatcagctaatattggtaccttcagagaggaaaccatgattccactttatgattcctctattctccacaagatttctcctgccagtaattcttctgaatcatggccaaattcagctgaagatcatagattatattcatgtaagttccaccctcaagctgatactacgaaaccctccaagggaataatggatttcagatgtaggggtaataag

SEQ ID NO: 29354 - DNA, 1783 bp, Glycine max
  Clone ID: TF_GmC1203_1
ccacgcgtccgcgaacaacataaatttaattgggccccgattggagctttctttccgcttctgactccgtgccctagcttcttcttcctcctcctcctctgccattgcagcaaggcacacacctcaggctccaacccatttcacgagggatcggattcgctcgccatcatggggaagaagaagaagagagtttcctcgaaggtgtggtgttattactgcgatcgcgaattcgacgacgagaagatcttggtgcagcatcagaaagccaagcactttaagtgccatgtctgccacaagaagctctctaccgctggcggcatggccatccacgtcctccaggtccacaaggaatccgtcaccaaggtacccaacgcaaaacctggcagagagagtacggatattgaaatatatggaatgcaagggattccaccagatatcttggctgctcattacggtgaagaagaggatgatgttccgtcaaaggcagccaaggtggatattccaccaactcagcttgtaggtggaatgattccacctcctttgggtacaggatatcctccgcgaccaaccttgcccacaatgccaccaatgtataatcctgctgtacctgtgcctccaaatgcttggatggttccacctcgacctcagccatggttttcacagcctccagctgtttcagttcctcctgctgccccatacacacagcagccattatttcctgtgcagaacgtgaggcctccactgccagctactgctcctgcgctccaaactcagattactcctcctggactgcctacatctgcacctgtcccagtttcacaacctttatttcctgttgttggtaataacgatacaactactctaagttaatcattttctgctctttctcatcattaccgttgaacttctcttacttcagtggtttctgcacatgcgcttgtcgtgacatatttgatcagatattcaactgatgcatatatttttttcggttgatgcaaatctgaggggctacctatcatttacaagtatttatcatctgatcggggttccagttggagtagctagtaactcacattcttatgcttctggtccaaatactggtggtccttcaattgggcctcccccagtaattgcaaacaaagctcctgctcctcagcctgccaccaacgaagtctacttggtttgggatgatgaggcaatgtccatggaggaaagaagaatgtctttgccaaaatatcaggtgcatgatgaaagtagccagatgagctccattgatgcagccatagataagaggatacttgagagcaggctggctggtcgtatggcattttagatcaatctcatccacacattcttgtgaaatttcttcagtgatatgggctcaaaatggcattttaataaggctttgacagcgtgtggtcaagattcctttatttaaggtccagaaagtaacattgttattggtgcaattctttgccaaaatgggcaatgggccctacggtcatagtggaatcgaagaaaaaatattgaaatggttctgatttcttcttaggaagttgcaaaactttgtttatttctcaatttcataccttttctccctttaatgtttgtagtcaacctttaggacatgatacttgaaagagtactatatattatttggtgtaatctagattattacatgttttgggtggaaaattgatggcaattctcggttggtttaaaaaaaaaagaaaagaaaaaaggggaggagaaaaaaaagaaaaaggaaaagaaagagggggga

SEQ ID NO: 29355 - DNA, 1078 bp, Glycine max
  Clone ID: TF_GmC1203_4
tgatctttctttccgcttctgaatccgtgccctagcttcttcctcctccgccattgcagcagggcacacaaccttcgtcacaaacccaattcgcgagggatcggattcgccatcatggggaagaagaagaagagagtttcctcgaaggtgtggtgttattactgcgatcgcgaattcgacgacgagaagatcttggtgcagcatcagaaagccaagcacttcaagtgccatgtctgccacaagaagctctccaccgccggcggcatggccatccacgtcctccaggttcacaaggaatccgtcactaaggtgcccaatgcaaagcctggtagagagagtacggatattgaaatatatggaatgcaagggattccaccagatatcctggctgctcattatggtgaagaagaggatgatgttccatcaaaggcagccaaagtggatattccaccaactcagcttgtaggtggaatgattccacctcctttgggtacaggatatccttcgcgaccagccttgcccacgatgccaccagtttataatccagctgtacctgtgcctccaaatgcttgggtggttccacctcgacctcagccatggttttcacagcctccagttgtttcagttcctcctgctgccccatacacacagcagccattattccctgtgcagaacgtgaggcctccactgccagcaactgctcctgccctccaaactcagattactcctcctggattgcctacatctgcacctgtcccagtttcgcaacctttatttcctgttgttggaaataaccatacaactactcaaagttctgcattttctgctccacccctgccctcaagtgttccatcagttactccagtgatgtctacaaatgttcctgttgatacacatttgagcagcaactcttcagtaacaagtagttatcaggctataggggttccaggtggagcagctagtaactcacattcttatgcttctggtccaatactgggtgggtctttcattgggcctcccccagtaattgcaaacaaagctcctgcttctcagcctgccacaaacgaagtctactttg

SEQ ID NO: 29356 - DNA, 817 bp, Glycine max
  Clone ID: TF_GmC285225_1
aaatcacaatagaggcgtagcttctgtagttttccaatttgattataaattttgtctcagccaatctgttgttgaccacagtttcataacccactttcttcattcttggtgaattttatgtcttattgcaatttccccttcgctttgcaaacaaagatggagttcaattcccaaaaccctaaaaaatctgagataagatggagcccagataatcaaggtggtcctggacaagggaagtcttattcttgttacttttgcaagagagggttctcaaatgcacaggccctgggaggccacatgaatatccatagaaaagatagggcggcaaagctcaagcaatcttctgaggaaaacttgctttcattggatatctcaatcaaggccacaagtgatcatcctaatgacccttctgatttcgaagagaaaattttgtttcggttgggtgctggtgaagagaagcatcctagaaaccataaatatccattcaattttttttcctcgcaaagatgatcatcatgatcatgcaccacaaattccccatcttccttcttttgttttggggcagatggttgaggagaagaaagctgaattagaccttgagcttaggttagggcttcatcctcgggagtcagcaacattgaacactagatcgttcttttgatgagtagcgtttccaagtggaagatcagcgaaaagtggcttttatttcatacctagctcctcttccaccttatctacaatatatataaaggtaatatttgattatgtttaagaatttaattttgatgcagtatgaatattgttttcactcacagta

SEQ ID NO: 29357 - DNA, 482 bp, Glycine max
  unsure (1)..(482): unsure at all n locations
  Clone ID: TF_uC-gmflminsoy034g08b1
atacgcgtccgcgctcactcactcactccttgggttgttcttttctcccttggcttcctcatccatcatcgctatcattagcaaattaacaaagacatggggtttctcttcttcttcttctccttatttttcttctctccaaccactttcaagatgtgatgctgatctggggtgttgctggttttcccttgtgatcgatttctcttgtgttggtggtgatcaagaaagtgtggttaattttgctttctttgctgatccgtgcgtgtgtgtgatcttgaaaaatcaatccaatggaagaagatcaagaagtgaaacacatgtgcaagttctgcagcaagagctttccttgtggaagatccttgggtggccacatgaggtcacatgtcaccgncaatgtttcaaccgaggcagagaagctttcatctttcaacaacaatggttgaggatgagattctgcatcaggagggactaacactggagga

SEQ ID NO: 29358 - DNA, 161 bp, Glycine max
  Clone ID: TF_701129039H1
gcgaggtctgcggtgttcgattcaccaggaacgacaagctgaagatccacatgcggaagcacacgggagagcgcccctactcatgcccgcactgcccagcccgcttcctgcacagctacgaccacaagaaccacatgcacctgcacacaggggtccggccc

SEQ ID NO: 29359 - DNA, 742 bp, Glycine max
  unsure (1)..(742): unsure at all n locations
  Clone ID: TF_LIB4390-021-R1-K1-C11
ccaccctctcatcatgactcatccctactgctccaatgacttcaatgcttggtttgacctcaattctccatgccttttttccacttcttcatcaccttgctccaataacccaccattttactttcctactagtaatactaattaccttcataactgcacaaataatgacatctcttttacgcagcgtattcaatcttctcccagctcctttccccttccaaaagaagaacttcctctccttaacctaagccctgcaagaggtgaagatcttgaatcttccttcagtgccatgaaagtcaacaaagagaaggagaaagaactaagcatgtcagctaataataactctttggatgatgaaactgctgtgacggtggctttgcacttagggcttccaagcactactactactactacttcatcagctgatttaacttcaaacgtgtactctgacaaagaagataaaaaagacacggttgcttctgagtattctcctaccagaattaacaagggtcagtattggatccctacccctgctcaaattctgatcggtcctacacagttctcatgccccctttgtttcaagacgttcaacagatacaacaacatgcagatgcatatgtgggggcacggatctcaatatagaaaggggccagagtctctaaggggaactcaaccaacagcaatgcttaagctcccttgctattgctgcgcaccgngatgcaagaacaccattgatcatcca

SEQ ID NO: 29360 - DNA, 1136 bp, Glycine max
  Clone ID: TF_GmC1688_1
gcgcccacgcgtccgctgcgagagacgacagaaggggactgcatttcccacctcaatattaatatatttctttccccacaagagagatcatggaaaaggatatcattcatctttctccaacatgggatggtgacaatggcaattccactgagaaaaggctcaggctatttggttttgagctaaacccttctaaagatggttatgccaaagaatctggtgaaggagatgaaagtgtgaactcctctaactcagtttcttctggaggagacaaaactgtgcaagagaaaccctctgccaaagactctgatgagagaaagtttgagtgccaatattgttacaaggaatttgcaaactcacaagccctaggaggccaccaaaatgctcacaagaaagagagaatgaagaagaagaggttgcagcttcaatccataaaccgctacctacaacaccctttccaatccaagcatggctttgctcacccttctgatactccttggttctatgacccctctacctataataactctgagttcacccttagtgaagaacctcagattagcttcaattcaaatgttttagatgccaacttttcttgtgaccagaaatctagttggtattctcttgcatctcacccttctaattcccaacaagatacttgcatgtttactttctccaatgcaagtaataatagtcctttcatcttcaagccttgccacttccctgcttcaaatcagagccataaaagtaaagccctagatcttcaactaggcctcaacttgcagtcaaatacaagaagttccttaagaaggatgtaatttaagtatatataggacacataagttaaattaacagtttccttgaattattttaatgcatcaattctcaaacatctggaaaaaggaaatgagaaaaggtaaaaaaaaaataattacaattcattagagttagttggccttggccactgcagagccaagaagagtctgacaatgaccacctttcagaattcagacagcatatagaattcatacgatgtatttattatagcatgttgtagccctttgatatatattacatacacttctttacattctcagtacatacatgcttagagaacaacgttctctttcatttcagtt

SEQ ID NO: 29361 - DNA, 1323 bp, Glycine max
  Clone ID: TF_GmC1730_1
gcggcgcctcccacccgacgtccaaaccggccctcatctcctgcttccacaatcctatcgcacatctttctcagttctacgatggagttttggggcttccagcgtcatatcgcatatctttctcagttctattcctacgatggagttttggggtgccgaggttaaggttggtgagtctgttaaggtagatccagccgaattcgaggcatgcatacacctttctcaggctgctcttggtgaggcaaagaaagacaaaccaaatgaaccggttgttctctacatgaaagttggtcaacagaaatttgtcttgggaaccctttccagggagaaaattcctcaaatatctctggaattggttttggaaaaggagtttgagctttcccacaattcaaagaatgccagtgttcatttctgtggatacaaggcattttatgatgctggcgatgatagcgaggaggatgaatttactgatagcgaagaggatgttccattgcttaaagcagagaatggaaaacctgaaacaaaagctgaagagttgaaggtacctgaatctaaaaaagctgttgccaaggctagtgcatcagcaaaacaagtcaagattgttgaaccgaaaaaagataatgaggaggactctgatgatgattctgatgaagtgatgattttggatcttctgatgaagagatggaggatgctgatagtgacagtgatgatgagagtgatgataaagaagatgatgatgaagaaacccatcctaagaataagaaggcagatctaggaaagaagagacccaatgaatctgcatcaaaaactccagtttcctccaagaaagccaaaaatgctactcctgaaaagactgatggtaagaaaggtggacatacagcaactcctcaccctgcaaagaaaggcggaaagactcccaacagcgaagccaaagccaagactcccaacagtgaagccaaagccaagactcctaagtctggtggactctcttgcaaaacctgcagcaagtctttcaccaatgaaagtggtctgcaacaacataacaaggcaaagcatggtggtcagtgatatttttgctgttggttatgactcattcatgtattatttttggcttatgtaatagagtgagtttcctaaggacgttaggcatctgtccttgtttttcggcccagtaaaccgtggtattgtggtagtgttgaaggtgaatgcatgtttgataagtttttgtttgaaattttaatgggaacttcaattattgtctataattattgcgtttagatttgctgctaaaaaaaaaaaccataaaaactaactctataaggg

SEQ ID NO: 29362 - DNA, 611 bp, Glycine max
  Clone ID: TF_GmC1730_3
cggctcgagctatcagcatcctccatctcttcatcagaagatccaaaatcatcatcatcagaatcatcatcagagtggtgatgaagatgatgatgaagagacccctcccaagaaggtggatctgggaaagaagagacccaatgagtctgcatcaaaaactccagtttcttccaagaaagccaaaaatgctactcctgaaaagactgatggtaagaaaggtggacatacagcaactcctcaccctgcaaagaaaggcggaaagactcccaacagcgaagccaaagccaagactcccaacagtgaagccaaagccaagactcctaagtctggtggactctcttgcaaaacctgcagcaagtctttcaccaatgaaagtggtctgcaacaacataacaaggcaaagcatggtggtcagtgatatttttgctgttggttatgactcattcatgtattatttttggcttatgtaatagagtgagtttcctaaggacgttaggcatctgtccttgtttttcggcccagtaaaccgtggtattgtggtagtgttgaaggtgaatgcatgtttgataagtttttgtttgaaattttaatgggaacttcaattattgtct

SEQ ID NO: 29363 - DNA, 713 bp, Glycine max
  Clone ID: TF_GmC908_2
cattcacaacacaacacaaccaaatccaacatggtagccattctgaagagacaaagagaaaccgaagccgaggagagcatcataagactggcagaaagtctcatgcaactgtcgcgagtccaacaaaaaagcaagcctcttctcaaaaccttttctccaacggagttcgagtgcaaaacctgtaaccgcaagtttccatcttttcaagcccttggtggtcacagggcgagccacaagaagcccaagttcgaaggtgaagaactcaaagaggaggccaagaagggtctgagtttggggaacaaacccaaaatgcacgagtgttccatttgcggcatggaattctctctgggtcaggcactggggggtcacatgagaaaacacaggggtgccaccagtgagaataataacgaagcgttttcttcttctataaagcaagcaatttcaaaagttccagttttgaaacgatcgaatagcaagagggtcatgtgcttggagatggacctgaatttaacgcctttggaaaatgacttgaagttgttgttcggaaacaaggctcctagagtcgatctttctttgtagaggattattaattaattcctgtattctttggattcattactattgtttaaaaaattgtcattgacttctttcagttcttcgtgtagatcgattagttttggaattgatttcgttgtatagttgattgattgatt

SEQ ID NO: 29364 - DNA, 1913 bp, Glycine max
  Clone ID: TF_GmC168_2
ggggtcaatgaaacaacaaagcaagaaagctcgtggcaaagaaaaagctagccccaaaaaaaagccttaaagaaagctgattacataaagcaataccttttctctctctctctttttctatctttctttctttctttcccccgtcagtgcccacgcgtccgttcctcctcatcatcatctttccatacgagtaaagctgaaaaacccgctattccaacctctcaccacttgtactagttttgagaatttgatcgtgtgctaacatatagtcctcaaattaaagcacaaatatttttccacccatgttagacaacaacaattgcagtgcttctaattctggtgcaccatcttcttctgatgccgcctttgcattatctgaaaatggggtggctaacaacaaaaggaaaagaagacccgcaggcacacccgatccagatgctgaggttgtgtctctctcaccaaccaccttgctggaatctgacagatacgtgtgtgagatctgcaaccaagggttccagagggaccagaatcttcaaatgcacaggaggaggcacaaggtgccatggaagctgctaaagagggaaacagcacaaggggggcatcagaagaagagggtgtttgtgtgccctgagccaacttgtttgcaccatgacccttgccatgcccttggggaccttgtgggaatcaagaagcacttcagaaggaagcacagcaatcacaagcagtgggtctgtgacaagtgttccaaagggtatgctgttcaatctgattacaaggctcacatcaaaacctgtggcaccaggggccattcctgtgactgtggccgtgtcttttccagggtggagagtttcatagaacaccaagatgcatgcactgtccggcagcaccggccagagttacaagcacttcaaccagcatgctcttcaagaacagcttcaagcgcaagtccctctagtgaggcaaattttagcatagccccaccattgcaaggacttccagtactgccaaaaccagctgaacaacaacaacaaccagcaacaacaacagtcttattaacttcagagatacacggtaacaagtccactacctcgcataacttagaacttcagctcttaccctcctcaacaaactctcaagcaaaacgaaatacaaaggaaaactatggcttgaaactttcaataggctcatgtagtaacgacaaagggaatagtagtgaaccaccagagagagcatgttcagaagcacataggagcccacctgaaaggaataataataataataataacaatgtgagtgactattccacgttggaagtggcaaggttgcaggagtttgcaggagaggaactcaagttggccattgcagaaaaggcttatgcagaagaggctagaagagaggccaaacgtcaaattgagatagctgaacttgagtttgagaatgccaaaaggataaggaaacaagcacaagctgaactttcaagggctgaagagctgagaaagcaagccatcaagaagataggttccactgttatggaaatagcatgtcatacttgcaagcaacagtttcagtcttcaactgttggggtgccatcatcagaagaaacctccattgtgatgagttacatgtcctcagccaccacagaaggagaagcagaatgaatgacatatactgtgaccagaacacattgtgctaagaaaagaaagaaaagacaagctttattctgcctaagggaaagatatgatatgatgtgatgatgatattgcaggagtttacatgaagttatattgttcttttttcttattcatttttttctttaatgttttcttctctcttagactaggtgaaatttgttttattttaaagaaagttcatattctttattataatatttttatcgagatgcagtgtttatg

SEQ ID NO: 29365 - DNA, 1898 bp, Glycine max
  Clone ID: TF_GmC910_1
ccccaacctcagctttcgactcgttaggagtttcacaacgcagctgcgcacagcacagtcctgaccctcccagaaaaccctaatcagcgtatcgaatagttggaatctccaattcttgtctttatctcttgaccagaaaaaatgtgcgaagccgtagaaattgaagaaaggcccaaatacaaagatatcagacgctattactgcgagtactgcggtatctgcagatccaaaaaaacccttatcacctcccacatcaatttgcaccacaaggaagagtatgaaaaagcaagagctgaaagagatcccgaagcagaggcttcgaaatcgaacacttgcgaggaatgtggtgccactttcaaaaaacacgcctatttgttgcagcacatgcaaagtcattcacttgaggtatttgaactcttgattaattattatttaagaaaaataagttggatacagtcaaactctaaaagcacataagaaaactgtatttaaaagctatgtcttatagaccgttgtgttccttgagaaacatttgatttgcggaagacaggctttgggttgtgacttgattgtgctagttgttttatagactgaagatacatattttgcaggaaagtaatctataagtttctaaaatcattggaaaattatgggttaatagtgtgaagcattggatcccagagaaagatctccaaaatgcgcgaggcagcatatatggacttgatggattagtatcaggtagggtgacctcctgtgaagctccatcaaggatgcctcggtcacgctctgtccaaaattgagaggccatttgtgtgtgctgtcgatgattgtcaggcaagttacagaagaaaggaccacctgactcggcaccttctacagcatgaagggaagatttttaagtgccctgttgagaattgcaacagtgagttctctttgcaaagcaatatgaaaagacatactgaggagattcatgatgacagttctaccactaccagtagtgacaaaagtcacaaacagcatatgtgtccagagattggctgtggaaaggtttttagatatgcatcacagctacaaaaacatgaagattctcatgttaatttggaatcagtagatatggtgtgcttagagcctggttgcttgaaacatttcactaatgtccagtgccttcaagcccatgtgaagtcctcccatcagtatatgacctgtgacatttgcgggacaaagcaactgaagaagaatattaagcgccatcttcgatcacatgaagctgaaggcagttcatcagagacctttcaatgcgagtttaagggttgcagctgcacattctcaagaaaatctaatctagacaagcataagaaggctgtgcactttaatgtaaagccttttgcgtgtgggtttactgattgtggcatgagatttgcttacaaacatgtgcgagataatcatgaaaaaactgctaaacatgtttttacccttggggattttgaagaagctgatgaagagttcaggtcaaggccgaggggaggaaggaagagaacatgtcccactgttgaaatgttaattaggaagagggttaccccacctagtcaattggaacattggttatttatgcaggatagtgagtagagtgcatttagcactctgtgctcctattactagtaggtaaaatgtaaatttaacatgttgacaggagtatataatatggtttggattattgttaacagatatatagaatttaggacaacaacgtgtaataatgattgatgcttatgagttatgacagattccatagtgtagcgaatctattaacctttgtaccaatttgcaatttaaacaactgcttttgtttacaaaaaggtttggaaggtgatatgtaagcactcatcggcatttgcttt

SEQ ID NO: 29366 - DNA, 3251 bp, Glycine max
  Clone ID: TF_uC-gmronoir015a12_FLI
gccgtccgttctccgcccgccactctctccggctctgacctccaccaccaatcccagcagaatgtgccctcctccgtcccctcctcgtcgtttgcttgtgcacagtgtgccaaacactttcccagccaatccgccctcttccaacaccaattgatcgctcacatcggcggcaccgatgcgccccagcagcagcaacagtcgaccgccagcaacgacactcagtcgactgttaacgcattggcaatgttagcagctgcgggaattaacgggggaagtgggacgacgcaacagcaacagcagcaattatttggacagttgctcggctccaaccctttctcacaaggcacaacgccttcgctgatgttcaacaattcgtccgcttttggcggaattaatccgacagagtttgacggtgccgcaatgttggcgaaactgagcgcagagttcgccgcggttgcccaggcacaacacggtcaaagcggcgctatttcagccacaacggtacaatcgacgggagggccgtcgacgcagcaaaacggagcaatgggcaggggacatacgccggcgccgtccaacaaaccgccgcctcagaaacgacaatattcctccaccagcaaaaacttttgcgacttgtgcaacaaagaggtgtgcaacaagtacttcctgaggacgcacatgctgaaaatgcacaacataatcatagacgagaacaaacagctgatagcgaacattgacacggtggacaaagaacggaagggcgaggtgaagttcaggtgtgacatttgccataccagcatgaacacgcgagaggagctgaagttgcacaagagggagtcgcatggaatgcacgcgggtggcggcgggtcgcagtcggccccactcggcggagcccgcggagtgccaaaagcgacgtcgtcgtccgcctcgcaaccgacggcagtgtccatggataccgcagagacaaaccagcaacaacagcagaaaagggtcgctctgccgtcgttcgcgccggcggcttcgaatttcaatgccattgaacaccaaacgcagcagcaacagcaacaatcgacgcagcggagaacgacgagcgaagggacggaggcaaatgatgagaataatcagcccctgggggtacactcgccgcagcagcagcagacgagggaagcggcgggggcccagcagccgtcgctggcgggggccaacccaatgaaacagctgctctctatcatcggaggggacgaggcgctgccgccgtcgctcgtcgggggcgcgcgtctgctcagaacgacgggggaaaggaacgacttcaaaaaggacactgaagaagaacatttgggccacagaatcgccgacgccaataataacgcgacaaactgtcgattttgcggtctttgtctggaggaagaaggccaactgcaactgcaccaactgatggaacaccccaacgagtacatggcggaactgcagccaacgatggacttaccgcactcggcgagtaccgaggacaaactgatcaatcaggtggccctgcaaatggcagaggctaacagtcacaaccaccaccatcatcatcatcaacacacatcagcaccaacggcaatttccgcaactacggaagacttcggtcgcgtcctccggcgcttcgtcctcttcggccgcctctttcggcgaagtcggcacggcccatccgcctcagcaacagaaaacgaagaaaggcactctgtcgcgaggcgaaaatgccgacggagacgacgaaaacggaggaggagggggaaggcaccaatgcccacagtgcaaaagaatttacaaaagtgcgcaaagattggaggggcaccagcgcatggtgcaccacaattttgtcgccaaaatgtcaccggcgaagcgatcgatcatttcgccgaaaaagattgccaaactgatgagttcgttttcatgtcacaaatgcaggcgacggttcgcaagtcgcggagaatgcgacgaacacgtcctttcgcacatccgctcggggagattgaagcaagaggaagcggaagacgaacaaccgcaggaagaggaggaggaaggaggggagagagcaccgcaagtgaagaggccgaagatggaggaggagggcgaagaggacgaagtggcggaacaacaccatcgggaagacggagtcagagaagtgggggaaaagacgaacatcgccggaggagtggaggaagaagtaagacagcagcgtgcacagagacgaacaaagggcggcacggggggaggcgaaaagcacagccatacgagcggttcgactagccccgtgtcggttcaggccggaagttctggcggtgtactgcccgagggctttgcccaccctttgttggaccacacgaagcctttcgtcctccaatccttcactctgcggcccgtttctcctcattcgaactgtcaacttcccgatgaactcgtcgcttatttgcctgtccgttccacgcttggccaacccatccgagtgaccttcgagctcaatccgactcctcacgtggaccagcaggtgcaacacctttgatgcagccgaggaaccgaccgccatttgcctctcaattcttcgtttccattggcatcgtcgggcagtgccataaaaatacggatgccgttgtgtttgatagtccttaaattggccgtctgttttatcagtctcctttcccccatttattatggtaattgttgttgttgttttgctctgttgggacttcgttccgttcatttttgccccttttattcatttgttcattcttttgactctcttctgatgagtttcattctctcgctttcttcgacagttctttcatgctctgatttgtttcaattccaccttttttatcctttggtttcctttgcctcttaaaattattttttattattatacataaatattattatatttttctccatatccttccatcgattcctccccctccccctaatattgcacattcgtcgcgcaatctcaaggtggtcaccgaccgtctttttgacggttctttgccgcccttcccctcggatttctttcattaaatttcgtcaatttgccatttccctcccccaattttctccatgcgtattatttccatttttttcgttgttcgttctcatttaatcaatttgtgaggccgatttacccgcacttttcattcacaatttaaagttgaaagaatatttttgttcattctctgttcaaaatttaattcaaatgttgcattaaggacaataaactg

SEQ ID NO: 29367 - DNA, 984 bp, Glycine max
  unsure (1)..(984): unsure at all n locations
  Clone ID: TF_GmC21_2
cccacgcgtcccaacccaacccaaaactcaagctaaattctcactctcacaacttcaatctctttctctctctctctctctctctctctctaccaaaaaaatggctttggaaactctcaactcaccaacaacaaccgccccatctttccccttcgacgacccaactattccatgggccaaaagaaaacgttcaaagcgttgttcacgcgaccacccttcggaggaagagtacctcgctctctgcctcatcatgctcgctcgcggcggcaccacccgccgcgtcagcactccaccgccgcaaccgactccagatccttccaccaagctcagttacaaatgctccgtttgcaacaaaagcttcccctcttaccaagcgctcggtggacacaaggccagtcaccggaaactcgctgcctccggcggcgaagaccaacccaccaccacctcctccgccgccagctccgccaacaccgcctccggaggtaggacccacgagtgctccatctgccacaagtccttccccaccggacaggccctcggcggacacaaacgttgtcactacgaaggtaacagtaatggaaataacaacaacagtaacagctctgtcaccgccgcctcggaaggcgtggggtccacccacaccgtgagtcacggccaccaccgagacttcgatctcaacatcccggcttttccggatttttcgaccaaggtcggagaagacgaggttgagagccctcaccctgtcatgaagaagcctcgccccttcgtcattcccaagatcgaaatccctcaatatcaatgaactctatgaattttttatttttatttttttcgattattttggagaattttgagatttactataatttgattttgtacatagtcctacctggaagttttgttgaaccgtacgtaccggacccagttctctgatttaggttgtactttcacagtgncagatttgcaattcaattcaatttcttt

SEQ ID NO: 29368 - DNA, 1225 bp, Glycine max
  unsure (1)..(1225): unsure at all n locations
  Clone ID: TF_GmC2530_9
cggacgcgtgtgcggacgcgtgggttcctatctctcttctctgcttcaaaagtttcttttttttttcttgaaaaaattttccctttagattttcttctctagttctctgtagggtccaagagaattgaaattcccttgcctttgagttttgagattggggataagaattgaaggactcaaactgcatgtgggttttccagaattctaatttaggtgtaaggtttcaaatccaagaaggaaaagaaacactttgagaagaaggtcaattagagggtttttttataagatatggcagcacctttttctgcagcatctctttttgcaatcagagaagaggatcagaatcagatgaagcagcagcagcattcctcaacaccatcatcatcaaccactccagctgcaccaccccagaagaaaagaagaaaccaaccaggaacaccatatccagatgcggaggtgatagcactatctcccaagaccctaatggcaacaaacaggtttttatgtgaagtgtgcaataaagggttccaaagagagcaaaacctacagctgcacagaagaggacacaacttgccttggaagctaaagcaanagaccaacaaagagccaaagagaaaggtttatctgtgtcccgagcccacatgtgttcaccatgaccctttcagagctttgggagacctcactgggattaagaaacactactatcgcaaacacggtgaaaagaaggggaagtgtgaaaagtgctcaaagaaatatgctgttcaatctgattggaaagcacattcaaagacttgtggcactagagaatacagatgtgactgtggcactctcttctctaggcgtgacagtttcatcactcatagggcgttttgtgatgcgctagcacaagagagtgcaagattccccggtggcttaaaccctttggggactcatttgtttggcacaaaccacactactagtttaagcctatcccaagtgggtaaccaactttcccaagttcaaaagcagaaccaaaccgccactaattataacagcattttgcgccttggcaacaataatgttggtgcagcagcaacaaagtttgagcacttgattccacctctaaaccattcttcatttggacactcaccacaatcaatgccttcctcagctttcttcatgaatgacaacacaaatcaagcattatttgaagaacaccaatcacaactacaaggcctaatgcaac

SEQ ID NO: 29369 - DNA, 816 bp, Glycine max
  Clone ID: TF_GmC149295_1
ggctcgagcacaactatttctcaaatattcattttgtcaccaatcacatctcatttttctaaattcttgtttacacactctcattaatttattacattccatattgtaattaattcttcgtacgtatccatgaagagacagagagatttcaaggggtttgagagcatagatttggcaaattgtctaatgatgctctctcatccccaacaaaatgagaaactacttcaaaaaaaaattgaggctgtggaatttgagtgcaagacatgcaaccgcaaattctcttcctttcaagcattgggtggccatagggctagccacaaaaggtcgaaacttgagggagatcatgaactcaaagcacatgctatatctctaagtttggcaaacaaacccaaaatgcacgagtgttccatttgtggacaagaattctcattgggacaagcacttgggggtcacatgagaaggcacagaacaaccatccacgaagatttttcttcaataaaacaggttattacacaaatgcctgttttgaaaagatcgaatagcacgagggtggttacgtgcttggacttgaacctaacaccgcttgagaacgacttgaagttgttgtttggaaagatggcaccgaatgctggtgcctttgcctgattctttattgttatcagttttgtgatcaacgctgatttgtatttagttttttttttttctttttcggggtgagaatttgtatttagttagtagtcctgtttttgaagtcttgtagtgtattctttaattttttttaacgtgagaattggtttttattttcttcacaatcaa

SEQ ID NO: 29370 - DNA, 777 bp, Glycine max
  Clone ID: TF_GmC475_1
ggagaagacgaaactagcgagggcacttctccaatctcaacaactttcgtgtagtgcactgttttgctatagtaacccattaattaaaccgacctacgtagtagccatgaagagaggcagagaagagagtaagttagacatggctaattgcttgatgctattgacgaaagttggagagagtgaaaccaattacccaatatcaaagggtagtgatattggtgatttcaagtgcaagacttgcaatagaaggttctcttcttttcaagcccttggtggccatagagcaagccacaaaaaaccaaagctcatggtcacagatctttcgtgccatcaagagttaccgaacccaaccatgaaacaacaacctaggatgcacccgtgtccgatttgtgggcttgagtttgctattggacaagctttgggagggcacatgagaaagcatagaactgctattaatgatggcttgttgtgtggtaaaccttcttcttcgttgtccatcttgaaggaatcatcgaaagatggtgatcaaaagttgaatttgcgcttggacttgaacttgacgccattggaggaggatgatcttaagctcaacctaaggacgcccgtgctcaattgtttcatttgattggaaattaattttgtactaaaccagattctttttttcttattaatatagttaatgtgtatttttcgtaatttattattatacgtacgacctataggtagctcattttgtagtcatattgtgttcataatacgaaacttcttagttcttat

SEQ ID NO: 29371 - DNA, 2663 bp, Glycine max
  Clone ID: TF_GmC4501_1
ccacgcgtccgccaagaagaggctgaggcaaaaatggtggcagaagatttgggtattgattacatgtggaagaatattgaatacagtcatgcttccaaggaggatgaggagaagatccagtcagctctggatagtgaggaagctattcctgggaatggtgactgggctgtaaagctaggaatcaatctcttttatagcgcaaatcttagccgttctcctctttatagtaagcagatgccttacaattctgttatatactctgcatttggttgtagctctccagcaagctcacctgtagagccaaaggtataccaaagaagggtcaacaggcagaaaaagattgttgctgggaaatggtgtggtaaagtttggatgtccaatcaggtccatccccttttagcaaaaagagattttgaagatgttgaggatgagaaactcttaattgggtggatattacctgatgagaaattggaaagatcagaaattaccctcaaaagtgaagctactagcagaaaatcaggtaagaaaaggaaaatgacagcagagaatggacggttcaagaaaggaagttatgctaacgaaaaatgtactttcagataattccactgaagataaacacaacttgccaccaaggagcattcttagaaataagaaagtcaggtatgttgagagagaccgtgctgctttgaaagggggttattgtcctccatatcatcgaaaaccttcaaacaaccaaacaaacttctctgaaagtgatgcagtttctgatgattcgcttgatgatgatgatcacatgcagcaaaggaggaatgttattattgaaaaggctaaatttatggacaatgatgtggtttcaaatgatcgatggactatgattctgattggcagcagagggaagaacttagcagcaagcaagttgaagatacggagagagatgcaatttcagaagattctttggatgttggttctcttcagttgcttaggaagaattccagagccaagcatgccaaaaacataagtcaagaagatataatttctgatgaccaaatggagagtcctttgcaaaagcggcaaaggagaattcctaaaagcaggcagggcaaataccttactggaaaagatataatatctgatgaccaactagagcataaaaagaagaagcagcaacggaagaatcctaaaagcaggcaagccaaatacctcaatgaagaggatattgcatcagatgaccaattggagggccattatcgtagatatcagagaaagaattctagaggaagacatgccaaatgtgtagcaggggaagatggcatgcctgatgaccaattggaggatcattgtcagaagcagcaaacaaatttctctaggaaaaggcaaaacaaaggcattgttagagaggttaaaaacgaaatgtgtgatgaccaattggaggaccattttctgaagcagcatagaagatttcctaagagcaggcaaaataaacacactgagaaagaagtcatggatgacttagctgagaataattctcatctgctgcatagaactcctaaaaggaagcaagctaaatgcatggaagaagatgatatgaattcagatgatgaaatggaagatgatcagccgctgaggagagcacttcgaagtaaacaagctaaaccaaagacacttctgaaacaagctaattccttccaagcgaaaaagcaggcatctcggcccataaaacagggctctcggttgcttgtgaaatcaaaggctcctcagcaaataaaacagcctgctcatttgcggaataagcaatctaataacacccaggaatttagtttatatatggaagaggaggaagatggtggacctagcacacgccttaggaagagagccacaaaagctcaggaatctgagggaaaattgaaagacaagcaaacaaaaaggatgaaggtgaagaatgctgcagctgcaaaggtttcggttggccatgccaaaatgaaggatggggaagcagaatatcagtgtgatattgatgggtgcactatgagttttgggtcaaaacaggagctgatgcatcataagagaaacatctgccctgtaaaagggtgtgggaagaagtttttttcacacaagtatctggtgcagcatcgtcgagttcatgaggatgagcgcccgttgaagtgcccttggaagggatgcaagatgactttcaagtgggcatgggctcgtacagagcacattcgagtccacactggtgcacgaccttatgtatgtgctgagccagattgtggacaaacattcagatttgtttctgatttcagtcgtcataagcgaaagactggtcattcagcaaagaagaattgtcaatagcaagtggaatagatgtttaattgttatttaacatgacattttatgtatttatgaatccattgctcaattgacccggctaggactagggtttagtaacagtttaggatgtccctgcaattaccatttgtagttaactgttaattctgtttgcctttcgggtcttcaacccatttgtttattacaattaaagcaattgcttggatctagaaacacgattctaatccagttcatacctgattctcatcgagttcatatcgcttgcaattgttgttccaacctttatgtctcttgaatcgtgattattttattgc

SEQ ID NO: 29372 - DNA, 1409 bp, Glycine max
  Clone ID: TF_GmC724_3
tggctgtggaaagacattcatagatgctggtgcgttgaggaaacattcccacatccatcgtagtgacaaacatattgcctctctccatggatgtgagaatggcaatatgtttgtcactacgatggatgtggaaagaaatttctggatagctcaaagttgaaaagacattttctcattcatacaggggagagggattttgtgtgtcctcatgaaggctgtggtaaggccttctccctggatttcaacttaaggtctcacatgaaaacacattctcaagagaactatcatatctgcccatatccagattgtggaaagagatatgctcatgaatacaagctaaagaatcacattgcatctcatcatgaaaaggttgggtagtgtttcctatttgtgtagctggtacactttccttatttttttaccactcagtctattaattaatgatgcatgttatcatgtaaagcatctctgttcttttaatccatccatttggtgtttctgcaatagtttcatttggtttgttagtatatctcagtacaaatatgtattatttttctcatgtatattgtgaatttctttataaagatgtctctaattcgaaactgatgaattactccagtggatgtgattcacaaatttttgaaactgttaacatttcttgaataaccgtttgatttggaatttcaaccttatctagcagaatgcacccttggatgtggcaaagtacactactccacctccagagaagcaaacaaaaacttctaaaccatctggaggggcatacggttctgcatcatctgaccgtccctatgcatgtccctatgatgggtgtgaaaaggcatacatccatgaatacaagcttagactccatttgaagagggagcacccggggcttatggctgatgaaaatgcagagcatgctcaggctaatgttggcaatgaaatggatgaagcaagtgaccatgatgcctatgttgcgaaacggtcaaatggtaaaattcagaagcagagtaagccaaaaccaaacctcaagttgcctccttccaaaattgcaaaacgcaaagtctccactcccactttaactgtaaataaaaattcttggcccgtgaaagatgaacctttcgatgaagaagatagtgaagaaacagaagaggatcgtgacaatgttgaagatggttggagatatgcaggaggaaacaatgaagatgatgatgaagaaacagaatatgaagactgaatcagttatggcatcctctatggaacttacctttttcaagaagtatatttctcttctacaattgttttttgggttgtcgcttttttatttggctttggaaatgacatcttgtcaaactgtgtgttggctgttacaagcattaggaagaatttatataaataaaatgcgattt

SEQ ID NO: 29373 - DNA, 1664 bp, Glycine max
  Clone ID: TF_GmC431_1
gcccttttctgaggaggagagaatttcaccaaatcaaggggaaactctctgaagaatatgggtttaatggagtgcaatgtggaggacaataagaatctataccttcatgctcctactttcattgagtggcttaaaccatgttcttctcctaattattcatatctaaattccaacacaatatcatactcatcttcttcttctccttcttcatcttctttttctcttactcagaatgagtttgttcaggaaactatccaattcttgccaattttaagtgagaaggcctcaaaagatgaagatcaaagttttgaggtgaaagaggaaaaggttgaacaagtaactgtggctttgcacattggattgcctgacagtaataaagggcatgctgatgaggttgatgagaagatgattttccatgttaaggaagaagaagagtcatcaaagagaagcttccatggttgctcctttaacaaccaagagagaaggttttggattccaactcctgcacagatccttgttggacctatgcagtttgcttgctccatttgtagcaagaccttcaataggtataacaacatgcagatgcatatgtgggggcatggatcagaatttaggaaaggaccagactcactcaaaggaacacaaccagctgcaatgttaaggttaccatgctattgctgtgctcaaggatgcaagaacaacatcaatcatccaagggccaagccattgaaggacttcagaaccctccaaacccattacaaaagaaaacatgggacaaagccattcatgtgcagaaaatgtgggaaaacatttgcagtcaaaggggattggaggactcatgagaagaactgtggcaagttgtggtattgcacttgtggctcagacttcaagcacaagagatccctaaaggatcatattaggtcttttggaaagggacataaccctcatcctccctttgaagcttttgaggatgagaaggaatgcattactggctctgatgaagatgaagttaatgctcatcatacatgatctaacaacattctatagcttatttcctttattatgaagatatggtagtagcaaggttttaaattgcgatcgcagttacaatttcgtcgtgatttttggtgttaccggaaattacagacaaatgcggttgatgcaattaataccttgagtagaagtggtaattaatgtactagagggtttggtcactacgcttgtgctcagtaacaaaaaattctcaacaactgctgaggcatgaagactcagggaaaggtttgctaccgagcacttgcagggtggtgataaacttagttatatcaatagaggtttggagtagtttgcttttggtttaattaataagatggttgcctcaagtgatgaagcagatgaattttcttctcatagcaacagagattagtgttatgtcaagtttagtttttttgtaacctcttcaatatggaggaaatttatccgcttcattactaaatggtaaccctcactcattctaggactttattgtatgtaaggtcttgttaaaatatctttgtgacgctttgatgtgaattaatttgctgctataaatggatagccaatgtgtgtgtttttttcaagattaaaaaaaaaaaaatcttttactatatattgaatccaagctgacg

SEQ ID NO: 29374 - DNA, 643 bp, Glycine max
  Clone ID: TF_GmC222431_1
agttcacaaattaactgagatttaattaagaataagataataattcacatgcagacattatatatataattaaaataaaaccagttcagttccattttcgatccttcagtcattatcttgttctacttcagatgcaggctcttcttcttcttcaaatccatcaatcccgtaagctgcatggccacttccaaaggctttgatgtgatccttaagggacctcttgtgcttgaaatcagatccacagatgcaataccaaagcttgccacagttcttctcatgtgttctccaatcacccctcacagcaaaggccttgccacattttctgcacatgaagggcttaatcccatgcttcctcttgtagtgtgtttggagggttctgaagtctttgaggggctttgctcttgggtgatcaatgttgttcctgcaacctggggaacagcaatagcatggaagccttagcatacctgttggttgggtacccctcagagattcaggcccttttctgtactgtgatccatgcccccacatatgcatctgcatgttgttggatctgttgaaaggtttgcaacaaacgggacaagggaactgagttgggaccatgaggatcttgagaaggggtagggaacccaggactggccctttg

SEQ ID NO: 29375 - DNA, 745 bp, Glycine max
  Clone ID: TF_GmC908_1
ccacgcgtctcattcacaacacaaacacattcaacaacatggtagcaattctcaagagacagggagaaaacgaatccgaagaaaccatcataggcttggcaaaaagtctcatgcaactctcgcgtgtccaacaacaaagcaataagcctcttctcaaaaccttttctccaacggagttcgagtgcaaaacctgtaaccgcaagttttcatcttttcaagctcttggtggccacagggctagccacaagaagcccaagttcgaagctgaagaactcaaagaagaagccaagaagactaaacccaaaatgcacgagtgttcaatttgtggcatggaattctctctgggccaggcactggggggtcacatgagaaaacacagaggtgccattagtgagaacgacaataataatgaagcgttgtcttctataaagcaagcaattgcaaaagctccggttttgaaacgatcgaatagcaagagggtcatgtgcttggagatggacctgaatttgacgcctttggagaatgacttgaagttgttgttcggaaacaaggctcctagagtcgatctttctttgtagaggattaattaattattcctgtatctttcgattcattatattgtttaaaaaattagtcattgacttctttcagttcttcgtgtagatcgattaattttggaattgatttcgttgtatagttgattgattgattaaataggaatattgatggttgatcggagtttcgt

SEQ ID NO: 29376 - DNA, 1807 bp, Glycine max
  Clone ID: TF_GmC47148_1
gaccgagacattagaatatcgtatctttgcttttccttctctttctcttttttcctccaacttggagtttttctctcttcaaaggcaatgttccctgcagttatgtccaattccaattcctggtccgaagaggccactgtctcctgtggtacaagaatcactggactcaatcacgttgtcacaacaaccatttctccacaacaacctcaaaagatcaagaaaaagagaaacctccctggaaaccctgacccagatgctgaagtgattgctttgtcaccgaagactcttctagctaccaatagatttgtgtgtgagatctgcaacaagggtttccagagagatcagaaccttcagcttcataggagagggcataacctcccatggaagctgaagcaaaggagcaacaaagacgtgaaaaagaaggcatatgtttgccctgagccttcatgcgttcaccacaacccttcaagggctttgggggacctcacaggaattaagaaacactattgcagaaaacatggagagaagaagtggaaatgtgaaaagtgctcaaagatctatgctgttcagtcagattggaaagctcactccaaaacctgtggtactagagaatatagatgtgattgtggaacacttttttccaggaaggacagtttcataactcacagagcattctgtgatgcattggctgaagaaagtgcaagactatcagcaaataatttagccgctgcagccggcgccaccgtcaccaccacaacaacaaacccattccaatctctatatcttttccaaacccaacaacagaacttccaaaaccaccaaatgaccagtttcaaccaatgggactcatctcaagaaaaccctaaccctagcaacaacattgccaccacttccctccacatcgagccagagtctcaaagcttccacaaccccaccctctcttcatttctccaacagcaacaacaagggcaacagcccaacaacaacaacaggggcatgatagcctcaccatttgggaacctccacgtggcagcagcagcacctgccacgtcatcatacatgtcagccactgcgctgctttcagaaggctgcaaccgttggagccgctgccataacaggcccagtacctgttgggccacaacagcgcgtgaggggtcacgtggctcaccacctcggcgcaggcgagttcggaatcggtacagtgagtcaactcgacccggtggtgttggtgccagataacaacaactacacgagaacaatgttcaagagtagtgaccgtctcacaagggactttctgggtctcacggcagatgctaacggcggcgcggttgacgttagcaccaacgtcaaggatatgctagcgttcactggggccgtagagtaccaccaagtccaaccgcaccgtcaacatcatcaccaccacgcgcttctgaagccccaacaaggcttcggtttccttgggacaaccactgcccccgagacgtggtggaattgttagacacagacaggagaataattccaagtcacgagggtaaaataggcaacacaactttgccattacactgacccttgactcttgaatcgtcaatcatcaaatctgttttggttttaacacctcgttatagatttttttttttcaatccactttagacttcacatcttagttttgattgttgttctctcaatttaaatcaagtacaatgctttagttcagtttttttttatttgactgaatattaatatatttggtgctttgttgtcaaaaaaaaaagaaagcccctctctctatatatgatctgttatcatt

SEQ ID NO: 29377 - DNA, 1263 bp, Glycine max
  Clone ID: TF_GmC444_5
aatcatcaaagtttgaaatggtcttttattttcgtaaaagaaaaattcaaaaaattagaatcgtggaccaccaacagtaaaaacggttacacgccgaaacagaaaagaaacacgcgcaagtggcctcaactgaactaaaacaaacttgccgcaccgttcacgcggttctgctggttcatgatgtctattccattccggggcatattctagatcaatcacactactacgctatgatgataaagcaaactgagagaaatcaattacattcttacaaatataaataaatgaattgaattgaattgaattgccactgtcaaaagtacaatgactacaatctaaaagctaaaactagcgaataaggtccaagtactatatatgtacaagaacaaattaatctcaaataactttaaaaaagaaagaagaaaaaaacactgaatattttttggatctatggatcatcagtattgagggatttcaatcttgggtatggtcaaattgagacgggatttcttggatggatgaggactggtaacctcgtcatcaacgaagaaccttgttgaaaagtccggaaaagccgggaggttcagatcgaaatcgcggtggcttcctgtgtgagtggaccccactccctcagaggcggttacggcgctgttaccgccttcgtagtgacaacgtttgtgtcctcccaaggcctgtcctgttgggaacgtcttttggcagatggagcactcgtgggtcctagcaccgccgttcgacgccgaactcgttgtcacggcggaggaggtcgagtggtgctcgccgccgagcttccggtggctggccttgtgtccaccgagtgcttggtaagaggagaaggctttgttgcagaccgaacatttgtagctcagtttggcggcgggtagcggcgcggaattgttgtcggagacagcaggcttggcggcggggacaccgccggcgccgccgtgagcgagcatgatgagacagagagcgaggtactcttcctcggtgcatgaagagtgttgcagttgctgctccatgcggctacgcttagaacgctttcctttggtccacggtgtctccaagtaactgaggttggtttcttcaaagggactaaacgatggagtggcagttctgggtgattgaagagcttccagagccatttgaagtgtctgcgcttgtgaatctgtaatagggtgtgataggaaataagagaagtgcttgttgtggttgcttttggtgaacttgagtttgagcctggggtgt

SEQ ID NO: 29378 - DNA, 908 bp, Glycine max
  Clone ID: TF_GmC719_1
tgccgcatccgtagctctgcttccccattagagaacattttaccaattgagcactttcaaacaacgttgttgttttttgtacacaaccatcagagataaggagagtgaggtgggcatggctagttgtttaatgttactaaccaaagttagtgataccgaaaccccatcaagaaagagggttctaagtggtggtgattttaagtgcaagacttgtaacaggaaattccaatcgtttcaagcacttggggggcaccgagccagccacaagaagctaaagctcatggcttcaaacctttcgtgttcgaccgtgacacaaaagatgcaccagtgccccatttgtggaattgaatttgcgattggacaagcactgggagggcacatgagaaaacatagagcttccttaaacgatggtttgataactcatgatcatgttgtgccaacatctagtggtactaaaaggcttcgtttgtgcttggacttgaacttggcaccgtacgagaatgatctcaacctcaatttaaggacacctactttaaatttgttcgtttgatcgatttgagtgtttttagggcgaattcttgttggaaattgttttatttttattttttgtttcttactttgccgtgctttttagtttatgacgtacgcgtgattctatagggttctatgtatattcatggtgctaacttgaaagtacagggaaaattttgctgactaccgttaagcaaagcatattaagcatactatcatggctcttttcaggaacatgttttgaaaagtcactttcaatatgaaggattcagttactgttagttgagggtagtaattattggttggatctgttatgatagataccattaactgtgagattaaaaacaaaatagaattgcccacacttatctttgtct

SEQ ID NO: 29379 - DNA, 1938 bp, Glycine max
  Clone ID: TF_GmC2175_1
ccacgcgtccgtgaaaaccctggtcttctttctcatgcctcttttattgtggtttttttttctttcttttctctctctctctctctgtgaaatggagccgtttgcttagagctgcttcttctgatctttgaatcttgatctagatatctagatacagaattggaaatggattcaaatgggagcctacgtgctaacacctgggcaaggtcgtcgtccttgacctctcctgcaagtggtttatcctcagatcctctttctttcccaggttttggtttgcagcataatcaacaaaaatgggatgttccctcaaattcagattttgggatcagggctgaagcacctttcaaagaattcaatcagccctctcaaacccagtctccgcttccttgcaactcaaacaatgagattgaaatccctggtcaagaaaactgtcatctgagtgaatcatcacaaaccaatacactccaagattgggaccccagtgtgatgttgaataacctatctttcttggaagaaaagattcatcagctccaggatctagtgcatttgattgctcgtcaaaaaggcattggacaacctaatgaacttgtaactcaggaacagcagctcgttacaactgatctcacatcaatcattattcaattgatctctaccgcaggtagtctcctcccttctgctaggcataaccttgtaaacactagttcattggttggacagattgaccagcttcgtgggacgaccattcctcctgggaccggtgcaagtaacggctgtattcaaccacagaataatggtggaaaaatattgtctgatcagtccatgcagactgatctacctaatagtggtgaaatggagcaaaagtacaatatggtagaacatgacttgaaagatgaagaagatgtagaggatggagaaaaccttgcccctggttcatatgagattctacaattagaaaaagaagaaatccttgctcctcatacccatttctgtacaatttgtgggaaggggttcaagagagatgcaaatcttcgaatgcacatgcgaggccatggtgacgagtacaaaaccccagcagcgcttgccaaaccgcacaaagaatctgcatcaccaaagcctatcaagaggtattcctgcccctatcctggctgcaagcgcaacaaggatcacaagaagttccagcctctgaagacgatcttatgtgtcaaaaaccattacaaaaggacgcattgtgacaagagttacacttgcagtaggtgcaacaccaagaagttctcagtcatggctgatctaaaaactcatgaaaaacactgtggtaaggataaatggctctgttcgtgtggcacaacattttctaggaaagacaagctttttgggcacattgctcttttccaagggcatgcaccagccattcctttggatgacactaaaggggcaggggtagctgaggcacccattcatgatagcaaagagaacaacagtaaggtgcagagcatgaacttcacttttggatcaaatccttcaaatgcaaatgaagttccaaatgccatggatgcaaaaggcgatagcgatgatcctatcaattatttctcatcattgaactttgaagccaactttggtgagtttaatgaattcaccagacctctatttgatgacccagaaggttcgttctcttttgtcatgcctggatctttcaaatctggaggagaatctagttctgacaatcttttataacaatggtactaccattggttctgtaataacttaatatctatgtttctcttaattgtgaagatataactttcgggtttgtgttaaatttgtaaagccggtttaatttcatgaccatgcaaatccttaagaaggatgttagattttcttgatgattttataaattataaattgcgcgtctcggttattcagctaaaaaattccaaattc

SEQ ID NO: 29380 - DNA, 1865 bp, Glycine max
  Clone ID: TF_GmC558_1
gttaagcttcttcgtataagcattcacttaccttcccatcccatgttctctttctcatcgcaattttttttcttttttcttttaattttcctctcaagtggagcattcaggttgttagagcgtccattgagctttcaatctgtggctggattttgatctctctgagtttaaaatggatccaaaaggaagcttatgtgctacaaggtcctcttccttaacctctcctgggaatggactacaaacaaatttgtcgtcagatcctccctctttctatggggtcaggattgaatcacctttcgaagaattcatccaaccctctcctccaacccaatctgtacttccaggtgaatctaacacagatattgatatccctgaccaggaaaattgtccactgagtgactcatcacataccagtaaactccaagattggaatccaagtgcgatgttgaataacctttccttccttgaagtaaagattcatcagcttcgggatctagtgcatgtaattgttagtaaaaagtgccaaccttttggacaacctcatgaactagtgactcaggaacaacagctcatcacagccgatcttacatcaattattgttcaattgatctctactgctggtagtcttctcccctctgttaggcacaccctcacaaacgcaaatcccttggttggccagcttgaccagcttcatgggattaacctcccttttgaatcagaaccaagtagtggtattaggccacaaaataacagtggaaataaactgtttgatcagtccattcagaatgatctaccaaataaattggaaatggagcaaaactacaatatggaagagcatgagccaaaagatgaagaagatgtggatgagggagagaatcttccacccggttcctacgagattttgcaattagaaaaagaagaaatcctcgcccctcacacacatttctgtacaatatgtgggaaaggattcaagagggatgcaaatctccgaatgcacatgcgcggccatggtgacaagtacaaaactcctgcagctcttgcaaaaccacacaaagaatccgggtctgaaccaaagctcatatcaagaggtattcctgcccctatgccggctgagcgtaacaaggatcacaagaaattccaaccactaaagaccattttgtgtgtcaaaaaccactacaagagaacacactgtgacaagagctacacttgcagcagatgcaacaccaagaagttttcagtcatggcagaccttaaaactcatgaaaaacactgcggtaaggataaatggctttgttcatgtggcacaacattttcaaggaaagacaagctttttggacacattgctctattccaaggccatacaccagctattcctttggatgaaaccaaaggaatggctgagccacctgatatccagaacagagaaagcaacaataaggtagaaagtattaacttctgttttggatcaaattcttcaagtgaaaatgtagttcaaaacatgatggatatgaaaggtaataatgatgatcccatgaattatttctcatcattgaacttcgaaggctgtaactttggggcgtttaatgaattctcccaacctccatttgaagattcagatggttgtttctcttttcccatgtcaggatcctttaattatgctcccaaatttggtggcggtgaatcaagttctgacaatctgtagtgacaatttataataatgttactctacatcatgtctatgttttctttattcccctgttaacgaataatccttttgttttgtctaatttgtaaatccaggtaatatcttgtactccccccatttctttatattgaaaaaaataagttttatgtttatatttttt

SEQ ID NO: 29381 - DNA, 1380 bp, Glycine max
  Clone ID: TF_GmC135_3
atttagacccggaagctgaagttgtcgccttgtctccaaagactctcttggcaactaataggttcatttgtgagatctgcaacaaaggatttcaaagagaccagaatctccaacttcacagaagaggacacaatttaccatggaagctgaagcagagatcaagcaaagacattataaggaagaaggtgtatgtgtgcccagaacctagttgcgtgcaccacgagccttcaagggccctgggggacctcactggcatcaagaagcacttctgcagaaaacacggcgagaagaagtggaaatgtgacaagtgctccaagaagtatgctgttcaatcagactggaaagctcactccaagacctgtggcactagagagtacagatgtgactgtggaaccctcttctcaaggagggacagtttcataacacacagagccttctgcgatgcattagcagaggagagtgcaagatcagtgacaggcatagtagccaactcaacaactcaaccaactgaagcagcaggagtagtgatctcttcatcctctcttcatcaagacatgatccatgctagtaataataatttcccattgaagaaagagcaacaaggttgcataccccattggcttgggcaaccatcaccctcttctgcttcatcatcattcttgttctctcatcaagatcatcatctccatgaaaaccctaaccctagaggtggtcccactcttcttcctcctccttaccaccaaacagctcctcacatgtcagccacagcattgctgcagaaagcagcccaaatgggtgcaacgatgagcaaaaccggctccatgattaggacccaccaacagcaggctcacgtgtctgccaatgctgctttgaatttgtcctcacgtgaccaccagatgaaccccactccccatgacttgctacctttcgggaataataaagctgttgataacggtgttggtgtttctccttcactccttcatcatgttatcaattctttctcttcttccccctttgaagggacttttgaggacacttttggtggtggcgatgccatgaccgccgatgaaggtggcggtggcggtgccggaggaaacaataacgaaggcttgacaagagatttcttgggtcttagacatctctctcacactgatatcctcaacattgctggcgtgggaaactgcatgaactcctcccaacacaaccaaacccgaaacccttggcaaggttaactccatatgtcttatacatatttggattctttttctttaatatattaatatacatttattttagcttatttttaaattttgcttttgtttatgatatatattgtcaatcttcccgaacctttcggaatcccaatattttctttcctta

SEQ ID NO: 29382 - DNA, 1159 bp, Glycine max
  Clone ID: TF_GmC2530_8
ttcgcatttgcggcatcgctgtgtcctttttatatcttcactagatctactacactcccaactccacacttcttcttcttcttcttcttctgtccggattgcttctgtctcctaagatactttcctcttggtacctttaatgtttcaaaatctgagtttttttttctttttgttttctgacagacaagaaagcagggaaaaaatcaaacaaactttcagcaattagttccagattcgcagaacaattatgacggcagcttcctcatccactccatttttgggaatcagagaagaaagccctcagattacaacacaccatcaaccctccacagtttctccaaccacagcgcctcaaaagaaacggaggaatcaacctggaacaccatatccagatgcggaggtcataaaactatctcccaagaccctaatggcaacaaacaggtttatatgtgaggtgtgcaataaagggttccaaagggagcaaaacctacagcttcacagaagaggacacaacctgccttggaagctaaagcagaagagtacaacaaaagagccaaaaagaaaggtttatctgtgtcccgagcccacctgcgtccatcatgatccttcaagggctttgggagacctcactgggatcaagaagcactactatcgcaagcacggcgagaagaaatggaagtgtgaaaagtgctcaaagaaatatgctgttcaatctgattggaaagcacattctaagacttgtggcactagagaatacagatgtgactgtggcactctcttctctaggcgtgacagtttcatcactcataggggccttttgtgatgcgctagcacgtgtaaccagcagagaacgttgcatctatatttccaaggggacccgtagcaatggtgtctatgtgcatcaatggtggggagactgaattgcattgaacctttgatgattattatggtgttagagaaactctgtgtatgtacaagtttctcttgtgttttatgtatttggactatagtccaactatgtctctgttttgtgtttgttgtctgtgaaagtgtgtaggatgctatgaacatccgagtgctttatggttgggcgattaatgctaaaataaacaaccactgtcgttctcgtttgctaataaaatctgtgatgattcgtggt

SEQ ID NO: 29383 - DNA, 1234 bp, Glycine max
  Clone ID: TF_GmC57025_1
aattcggctcgagcacacatgtatatatatatatatatatatatatatatttaactacttcaattcacttcatcatagttacgtatatgagcatctctatttctctcaattaccttaactagcattgtttcaattcacatataaaatcgtttcgtgctcaacctttgtttgtgtgagatatagagatggaagggttggattctaataattctacccacaacagcatagccaagggcaaacgcactaagaggatgaggcttttgtccccttgcggtgtcatcgttgctgccatcaccaccaccaccaccgtcacctcgagcacttcgagtgctaattcgggtgcctcgtccaccacaacctacgagagcgaagaggaggacatggcgaattgtttgattctcttggcccaaggaggggaatctcgtcatcatcctcgtcacgacaagcaacaagttgaagatcatggtcttgagaattgtgatgatggtgccatcaagacagaagaaaagggtaacagcagcaacgttaacactaccaccgccgcaacaacaactgctgctaataataataccaaagttggtttctatatttatgagtgcaaaacgtgtaaccgaaccttcccttcgtttcaagcactgggtggacatagggcgagtcacaagaagcccaaactcgcggctgaagagaaaaaacaaccactgccaccgtcaccgctaccaccgccaacaccgtctcaattgcaacacatgattgttaccaattatgatcggtttgaggagggtagcgttaaaagtggtcctccaatttcccttcaattgggtaataatggaaacaacaacaagggtaagattcacgagtgttccatttgtggctctgaattcacatcaggacaagcattgggtggacacatgaggaggcatagggcatccacaaacgccaacaatgttgttgacacaacaagttgtaacactgtcatcaccaccaccattaccgcggttccaccgaggaatattttgcaattggatcttaacctcccggcaccggaggatgatctccgagaggctaaattccaatttacagcaacaagtcaggtgctggttggtactccggctttggtggattgtcattattaagccagggtgggaattggaattaatttcaaagaattattattattattttgatatctcatcaatgtgaattattagcgttattttttaattttaattatttg

SEQ ID NO: 29384 - DNA, 1287 bp, Glycine max
  unsure (1)..(1287): unsure at all n locations
  Clone ID: TF_GmC48528_1
ccaaaaccagcaccacccccccacccctctctatctcttttctcccaaactccaatccgacccgaatacttcactcatgtccaattctatctccgacccgacccgaataattcactctcaggatccgaataccaccgcggaccctcaggttccgcttcggaacctttcccaggttcggaacagaatggattctctacaacacttcctatctcaatccatcaataccaacactcccctcaccgtcgatcaaatcgccatggtctccagccagatcctctcctccatccaccaagtcatcgtcaacggcgccgccctcgtctcttactctcagaattccatcgccgccggagcaccggatccaccgccgtatccgaagaagccgaagccggaaccttcagttgccgataaagcgaagcaaacactcgattccaaactcgagcctctcgaaggcgacgacagcgaaatcgtggagctcgacgccgtcgaaatcctcgcggagcacatgcacttttgcgagatctgcgggaaaggcttccggcgcgacgcgaacctccgcatgcacatgcgcgcgcacggagaacagttcaagacggcggaggcgctggcgaagccttcggagaaagcctcgtggctgcgtgcgacgcggttctcgtgtccgttcgtaggctgcaaccggaacaagctccaccggcggttccggccgctgaaatcggtgatttgcgtgaagaaccacttcaagcgaagccactgcccgaagatgtacacgtgcgagcggtgtcgcaagaagcacttctcggtgctctcggatttgaggagccacttgaagcattgcggaggagaggccaggtggaagtgcacgtgcgggaccacgttctcaaggaaagacaagttgtttggccacattgcgctgtttgagggccacgcgcctgcgctcgcgtgtgacgaagagggtaaagggaaacaaatggtggaggacgacgaagatccaatgttgatgagtgaaagtggatttgaattggatgattgttttttggatcaagagtttcccgaaggcttctttgatgattttgggtccattgatgactactgttaaaggaagtgttaggttttcctagtaattgactttgcatatctatttttaggaaatactgtattcatattatactattgctagatttgtatttatgtctttatgttgttgagggattaaaattaaacagtgtttataggatggaataaaacgattaatttcattaccaaaaaaaaaaaaaaaaaaannnnnnnnna

SEQ ID NO: 29385 - DNA, 643 bp, Glycine max
  unsure (1)..(643): unsure at all n locations
  Clone ID: TF_LIB4165-008-Q1-K1-F10
cacgcgtccgatccaatattgacaactttattagaagtccgtgtgaggggttgaggccaagagctgggaagattgccactgacaaaagtggggtggaaatcaaccaagttgacaaggaaaatcaggtggctaaaagggcaaggagatcttctgaaggtttggttcctcacaaaaataaaaagggatgatgttaaaaagccccataagtgtgaccttgatggttgccaaatgagtttcaagactaaggctgagttactactgcataaacgaaacctttgcccacatgaagggtgtggtaagaagttcagctcccacaaatatgctttacttcaccagcgtgttcatgatgatgagaggccccttaagtgcccatggaaaggttgttccatgtcattcaagtgggcttgggcaaggacagagcatattcgcgtacatactggggagaagccttatcactgcaaggtcgagggatgtggcctttctttcaggtttgtatcagattttagcaggcacagacggaaaacggngcaccatgtgaaacctnctgcttgagaagatataatattcatttgttaactttttgttctcgcaacatgtgcatatttgcagttagattggtaaaagtgaggcatagagtcatgtc

SEQ ID NO: 29386 - DNA, 607 bp, Glycine max
  Clone ID: TF_GmC793411_1
taatccattccacacctttctattctttttaaacccttgatcatatccattttcgatcaccccttcaaaccaaaacaccaatattatttcaagtactattgatataatatagtgatgaagagagaaagagaagttgatagtataaccatggccaactacttgatgctgctttctcgaaccaccaccaacttgaacacttccaacaaccgtgtgtttgagtgtaagacatgtaaccggcggtttgcgtcgtttcaggcattgggtggccaccgtgcgagtcacaagaagccaaggttgatgggagagagtgatagccaagtgctaattcatggttcaccaccaaagcctaaaacacacgactgttccatttgtggattggagtttgcaataggacaagctttgggagggcacatgaggcgtcatagagctgcagcagcagcagcatcaaatggaaacatgcacactactattaattcttggttgagttctggcagcagtagtggtggtagcactgttgataatactttaccaccaaacatgaaccacaaccccaacgtcaccgacaccaagaggattttgtttcctgatttgaatttgacgcctctag

SEQ ID NO: 29387 - DNA, 1977 bp, Glycine max
  unsure (1)..(1977): unsure at all n locations
  Clone ID: TF_GmC282_3
atttatcacctcattttctgatgaaaaaagttacacctttggaaacgcccaagagaagaaccaacgagatcgaggaccttcttctgcttctgcttccgccttttccttcgcgcttcggtgctgcccacctacactcattccgtccaaacccctttttgtctgaaaaatcaaaccttaatttctgcgtttttttctattggatccaacttcactcgccggctagagtttcccgaggcactaccctattgggtctaatcattcgagttcttcgattaacgtgaatttgggtcagagacctcatcatcagagctggcaggtggcgggtaaaagaaaatttgcaggttgaccggtagatatagcaaaggagagtagaaaccctagaagaagaagaagaaaaagaagcaatccccatataagaaaaaggatctaaaaccaaaactttctccgtgaggttaaatgcccttaaggttattttccctctaagaaatcctcgagtcgtttaaggttcccatgccggttgacttggacaatgtttccacagcttcaggggaagctagcgtgtcttcctctggcaatctgacagtgcccccaaaacccacaacaaagaagaagcgaaaccttccaggaatgccagatccggatgcagaggtgattgctctgtctccgaagaccctgatggccacgaaccgtttcgtgtgtgaaatttgcaacaaggggtttcagagggaccagaaccttcagcttcatcggaggggtcacaaccttccgtggaagctgaggcagaggtcgagcaaggaggtgagaaagagggtgtacgtgtgtcccgaaccaacgtgcgttcaccacgatccttctagagcgttgggggatctcacggggattaagaagcacttctgcagaaaacacggcgagaagaagtggaaatgcgacaagtgctctaagaaatacgcggttcaatccgattggaaggctcactccaagatttgcggtacccgagagtataaatgcgattgtggcactttgttctcgaggagggatagcttcatcacgcatagggncttttgtgatgcgttagcagaggaaagtgcgagatctcagcctcagactgttgcaaaggctagttcagagtcagattcgaaggctgtgaccggtgattcgtcgcctccggtggcggtggaggctccgccgccacttgtaccgcctgttagttctcagtcaaacagtgttgttgtaccatcatctagcttgcagacacaaaaaccagagttgcctgaaaattccccacaaatcatagaagaaccaaaggtcaatactgctatgaatgggagctgtagcagtaccagtaccagcactaccagctcaacaagcaacagcaacagtggtgctagcagcagtgtatttgcaagcttgtttgcctcatcatcagcatccgcaactgcaagcctccactctcaaacaccagcattcactgacctaattagggccatggggcatccggatcatccagcagacctctcaaggccttcatcttcagagcccatttctctgtgcctagccaccaatcatggctcatccatttttggaacgggaaggcaggaacgccgtcagtatgccccaccgccacagccagccatgtctgccactgcattgctgcagaaagccgcccaaatgggtgcagctgcaacaaatgcctcttttcttcgtgggttaggcattgtatcatcttctgcatcaacgtcatcagttcagcaagataatttgcaatggggccatcagccagtggaaccagagagtgcctcagttcctgcaggtcttggacttgggcttccctgcgacagtagctctggactaaaggagttaatgatggggacctccctccatgtttggtccaaagcaaacacccccttcgatttctcgggttgggggaatgggctgctgggggcaccccctgggtggagggcttatcggcactcatca

SEQ ID NO: 29388 - DNA, 1174 bp, Glycine max
  Clone ID: TF_GmC427_1
gttttctttcgcttgttcgtttgtttaattcaataaaggaaattaggcatgaccctcttgttgagtatgctctgcctatttgaaaatttcacacctcttttaattgtcgtaatgatgtgtgaagtgtgtgttattttaaaaaaaaaaaaaaaaaaaaaaaaaaaaaaaaaaaaaaaagaaaaaaggcggagcgatttaaagcccggcgttcggctcgcgtgcggctcgttctcgagtcgattcggctcccgctatttttcatacaacacattctttctagacacgcaacacctagaagatttccttattctttttggtgctaaaccgttgggatccatcgaaattctagacacacaacacataaaagatttccttgttctttttactgcttaaccgttcggctatctcatatatgaacaacaacatgttaggaatgaagagacggagagatgataatgaagggtccttggatttggcaaaatgtcttatgctgttttcttgtccaatagaaagcaacaagacacaacagaaaagttttggttctgtggaatttgagtgcaagacgtgcaaccgcaagttctcttcttttcaagcactgggagggcacagggcaagccacaagaggcagaagctggagggggaagaactgaaagaacaggccaaaagtcttagcttgtggaacaaacccaaaatgcacgagtgctccatttgtggccttgaattctctctgggccaggctctgggtggccacatgagaaaacacagagcttccctcaacgaagggtttcctattattccttctatcgaccaagttattgcgaaaatcccggttttgaaaaggtcgaatagcaccagggttatgtgcttggacttggagttacacctgtagataatgactctgtgcttggaatcaactatgaaatcaccacctcagcttctttttctttgttctgactaactcttttttacctctttctggacacatgtagtattctttcatttttgtgtaaaaatttcattgacttttcccttataaagatcattgattctttatttgttagcaccaaaaattctcacatattatttagttggtgttggctaaccggtacgtcataccaccgattatcaaaaagttctgaatgttttaatagtattgatttttaattattttttt

SEQ ID NO: 29389 - DNA, 2202 bp, Glycine max
  Clone ID: TF_GmC23433_2
gacaccatgtccgggaaagtttcgtgggttttgtgtacaccccttcttcggtttcacaaatcccatcttcgttgtttcaattttcctctcgaccacactttcctttttgcaagtaagtagcaccaagaggcaggaactagagagtaacaacaaattcaatgtcaaactcaaacatcacaagttgtgatagttggagcttcactacagagaataataataatggagaagatgcagcagcaactgttaaacagcaattggagatgcttggccagctttatagtccaaattcaaacacttcaaccacaacaaataatagcaatggtggctcaaacgcagattcacaaccacctgctaagaagaaaagaaacctaccaggaaatccagatccaagtgctgaagtcatagcactctcaccaaacaccctggtggccacaaacaggttcatatgtgaaatatgcaacaaagggtttcaaagggaccaaaaccttcaattgcaccgtcgaggccataacctaccgtggaagctgaaactgagaaccaccactgaagttcgaaaacgggtttatgtttgtcctgaaccctcatgtgtgcatcacaacccagctcgtgcactaggtgatctcactggcattaaaaagcactttagcagaaagcacggcgacaagaagtggaaatgtgagaagtgctcaaagaaatatgctgttcagtctgattggaaagcccattcgaaaatatgtggaacaaaggaatacaaatgtgactgtggcaccatcttttctagaagagatagtttcatcacccacagagctttctgcgatgcactgagtgaggagaacaacaagttcaacgaaggacaattgccaaagatgcatggttcaaacttgcaaccaccaacaataatcccaaacctagttgcatcattaccaatcaatggcgccaataatcacaagcacccactatcactccctcacgacctcatgacaacaattcccgcaaaaccctttaacaacaacatggctgcagcattcacgagaagcctttcatccacctctcaactaagctcaaaatcaccaaacattaacatgttcgaggaaaatggtctcctttcacctcacatgtccgccacagcattgctccaaaaagctgcagaaatgggtgcaacagtgaatagtaacagcaacaacaacagcatgatgatgagtggagaaaaaagctttattaatgtcacaagcatggcaccaccatcatatgggatcatgaaccccaacatgcacaacggtcaacaagacttgtctcagtataatttcattgccaatggggtggtggatggtggtagcaatggcatgggaatgggtggtttggatatgtttaatgctatattggatcaaagtaaggccttgtcgaagatcatagagcagaacaacagaaacagtacttataatggtgttttgcatgcaatgaataatggtaagtcaagtgaccccattgaaggtggtggaactaaagggagtgaagctgtgaatcatgtgatgactttggacttgttggggataggaggtggtggtggagatggtaatttctatggtggtgatcaacagtcagaaatagctgctggagatggaatatggggaaattggtcaaataagaatgcagggcttgaatcattttcagcaacaaacagcaccatatgaatgatactgaccttgctggggggagggaagaataatttgcatgtctcttctattatggaaattaaaggtggaattttcagcttagtttggttctatgaactaattaattccttttcgaccatatcaaactagtagtacactgcagaaattaatcgtctacacattaacactgattggttttcctgtgacaaatcagtgtgtggacactttaatttggtcccttaaattagtgttcatcagtatctttaaatggcgaataatcagaagaattgccctgcacatttagttagttcaatgtgcacacttcgacttcacagcatttcaatttcagtcattccattttcatatcttattaataagaatggaatatggcaatatgctgaaaatttgtagcaacgttaatttgtgtattaagttggccatttatgataagacgatcgaaatggtccagatttagttaagttctatagaataccatccaccagtcaccacgtttcaaacttgataaaaa

SEQ ID NO: 29390 - DNA, 1182 bp, Glycine max
  Clone ID: TF_GmC282_4
ctcaaacttgttttatccatgggttgatcatcccaaaaaagtttgctttgtttgggtaaatgacccttaaccctgtttgtgaataataatagagttaggaggttccgatgacggtcgatttggacaacgcttccaccgcttcaggtgaagcagccagtgtctcttcctccggcaatcagacaaaacccgccgctccaaagaaaaaacgaaacctcccgggcatgccaggtagttgtagtaaaagtaaaacaaactaacaaacacgcaccaatttcaattaaatctcttctttattccttttttcttatcagatccggaggcagaggtgatcgctctgtcgcccaagactctcttagcgacgaaccgtttcgtgtgcgagatatgcaacaaaggattccagagagaccagaatctgcagctccaccgccggggtcacaacctgccgtggaagctgcggcagaggtctagcaaggaggtcagaaagagagtgtacgtgtgccccgagcccacgtgcgtgcaccacgacccttccagagcgttgggggacttgacggggattaagaagcacttctgcagaaagcacggcgagaagaagtggaaatgcgataagtgctccaagaagtacgcggttcagtccgattggaaggcgcactctaaagtctgcggcacaagagagtataagtgcgactgcggaaccgttttctccaggttcgtttccctttctctctcttgcttgattgtctaatttcttttgttttgtttcgctccactctaaaaaaagcctttgcttggttgttgggatttgaaggagggatagcttcatcacgcatagggcgttttgcgatgctttggcggaggagaacgccagatctcacactgttgtaaaagatatttcggagaatgattccaaggttttaatcggtgattcgccacccccgcagcctgttgcagccacggtggctgctactactgctgctgctaccaccaccaccactaccccacgtgtccgcggacgcgtggcgaatagtgttatgtcctttggattgcacacgcataacctatatttgccagataacaattccccacaagtcatttgaggagccacaagctgctactgctactgctataagggggagctgtggctgcagcagcttctgctcaactagcaatggtggtgcttct

SEQ ID NO: 29391 - DNA, 573 bp, Glycine max
  Clone ID: TF_jC-gmle01810062b01a1
cgccaggactgtcgatgcaagtcagccgcgcgctcaattcggacatggacaccgaccgccccccgttctcgatcaggattcttaccagcacaggacgatggcagggatcgccacggagacaatcgacagcttcatcactgctgcctcgccaaaaagctacgatggatctgacctgaccccttcgcagtattccgacgcctttgcaaatcaaccgacagatctcacagaggatgccttcactccgttcgaatccgtggatgacctacaggacgataggtctataataaaggacatcgatctcgcttctctgggtcatgcgacgcatgatgtgaatgaaagcgcaaactcgctcagtaagaagctgttcgcatgtgaaatatgtggccgctctttccaacggatcgatcaccttgccagacataaggtcaaccacgatagcgtcaagccgttcaattgcatcgtctgccatcgggctttcgcccgtaaggatgtctatcggaagcacttacagaggcacgaggcggacagacggacgcgcaaaccccacacggcaccacttcatgcacattgatc

SEQ ID NO: 29392 - DNA, 2346 bp, Glycine max
  Clone ID: TF_GmC168_1
attacgtttatccaggttttcttcatgagcgcgaaccatataagtcaccagcagctgcacaacgtgctatagaaagatgattaaagagaataacaactccaggagtgcagaaagaaagaaaggaagagaggaaccctaagagatagagagagagacaaacaataaagctagatagacagatagaaagctgatggaaaagctgaaagataaaaagcaagttaaaagaaaggctgagcggaaaccgaaacggaaagaagaaaaaaaaaaagaaaaacgaaaaaactaaaaaaaagaggccttttatttgttccttctctatctagtgtcttcctcctatcggcctggtgtacctctctctccctctcttcacctcaatgaatggtctcttctctatctctttctcttcttccttcttacttaattctatcaccaacatagccacagacacaaacataggcactacttatttctcttcttaggccttattatcatcatataccacatcatcaaagcacttgccatcatagagtaccatgttagccaataacttatctccatcgtcagttcccacttctgagccttttccctgcactgaaaatggcactgccaccaataaaaggaagagaaggcccgcaggaacaccagatccggatgcagaagtggtgtccctctcgccgaaaacgttgctggaatcggatcgttatgtgtgtgagatctgcaaccaggggttccagagggaccagaaccttcagatgcataggaggaggcacaaggtgccatggaagctattgaagagggagacaccagtggtgaggaagagagtgtttgtgtgtcctgagccaacttgcttgcaccatgacccatgtcatgccttgggtgaccttgttgggataaagaagcatttcaggaggaagcacagcaatcacaagcaatgggtctgtgaaagatgctccaaaggctatgcagtgcagtctgattacaaagcacatctcaaaacgtgtggcacccggggccactcttgtgattgtggccgcgttttctcaagggttgagagtttcattgagcaccaagatgcttgcaacatggggaggctcagacctcatgaatctcgccaagaggataagacaacaagcacaagcggaactcgacaaagcctactccttgaaagaacatgcaatgaagcaaatcaactccaccatgctccaaatcacttgccatggttgcaaacaacagttccaagcttcatgaacaaccctattactgctatcaccactgctgaaacctcctccaagagcaacaacaaactactccaccccaacttggatcttcaactctccacccccaccaataacaacaactccaacacctccaacaccaacacatcaaatattgcaaaccccattgataatgctgcaatatcagctaagagggatcattatcatgagaaccattcaacccatttgcaactctcaattgggtcatcagatatgagtgagaagaatgatcaatcaaacaggaactcatcagagaagagcagcaataacagcaacaacattaatgatcagaataataagcagcagtccaacaacatggccttgttgagggttcaagagcaagcaagggagcacttgaggatagccatggcagagaaagcatatgctgaggaagcaaggaagcaagcaaagaggcagattgagcttgcggagaaagagttcacaaacgccaagaggataagacaacaagcacaagcggaactagacaaggcctacgctttgaaagaacatgcaatgaagcaaatcaactccaccatgctccaaatcacttgccacttttgcaaacaacagttccaagctcgaaatgcaaccaccaccagccccgacgataattctttggtgctgagctacgtttcttctgctattaccacggaaggaggagaagttgaaaacgataatattgcaaaagatcatgccaaagacaacaactaactctactacttagagagagatattaatcatcttcatcatcatctttctctctaaagttgtttattctgtattttatttttctatgtcctcctcctttatgggttaatacttaataccctttttttttccatttcaaggctaatatctttgtgcattggtataccaagtgaagtgaaggtgaaggtgatcgagtgacgttgattatgtaagtgggatattataatagcgcacgggatggagaacttattgaagagtgtaattcttcgtgtaacttgcagtttattgtgccatgtaatttgttaattaaatttggtataaatgcagactatgataaaagggttaatttctcgctggttcaatt

SEQ ID NO: 29393 - DNA, 1305 bp, Glycine max
  Clone ID: TF_GmC168_3
acggctgcgagaagacgacagaaggggatggtaattgatcatggtttgttgtatgtatgtatgcagatccagatgcagaagtggtgtccctctcgccgaagacgttgttggaatcggatcgttatgtgtgtgagatctgcaaccagggattccagagggaccagaaccttcagatgcataggaggaggcacaaggtgccatggaagctgttgaagagggaaactacagcggtggtgaagaagcgagtgtttgtatgcccggagcctagttgtttgcaccatgacccatgccatgctctgggtgatcttgtcggcataaagaagcatttcagaaggaaacacaacaatcacaagcaatgggtctgcgagagatgctccaaaggctatgcggtgcagtctgattacaaagcacatctcaaaacttgtggcacccgaggacactcttgcgattgtggccgcgttttctcaagggtggagagctttattgagcaccaagacgcgtgcaacgtagggaggctggggccagaaacacaatcacaggcacaggcagtgcaagcagctgcatgcttgtctcgaacagcttcaagcgaaaccaatttcagcactggttccccttggccacaaagcggtactataataattccaaatcccaccgttacggtagtagaaccctcctcatacaccattgtcactgccgaaaccaacaacaaagtccaccccaacctggagcttcagctctctaataccactcctactgcatcatcacaggaagaaagggttcatcaagagcagttgaggattgcgaaggcgaagaaagcgttggcggaagaggcaaggaagcaagccaagaggcaaatcgaactggccgaacttgagttcactaacgccaagaggataagacaagaagcgcttgcggaacttgacaaagcctatgccttcaaggaccatgcaatcaaacacatcaattcaatcatgcttcaaatcacttgccgagcttgcaagcaccattttcattcgccaaccgacgaccaaatcttctcctacataacacaagctcgccaagtacaaaaacatcgtctcaaacccattattaattaactcttaattagacgacatcgatcccttccttcttttactattactactatgtcaagtgagtgctatggttatgtacgtgtgggattaatagccagctagcgaggtggtggaaaaaatgtgggttattattaatgtaaatgtaaattagttgcagcttgtgccatgttatttaaatgcagactataatatgatgagcaggttttgctgg

SEQ ID NO: 29394 - DNA, 1361 bp, Glycine max
  Clone ID: TF_GmC724_2
cccacgcgtccggatccaaatccaagtacggttgggttggagagaaaatgcgtccctgctgaaaacaccaaaccctaaaacgcgaaaagggttctaagaatttgcgaaggaaagagctagcggagatggagattcactacagtaacagctatttcgagaggcgccccatcctcaagtccaaggctgccgctgtcaaatgggtcaaagaatgaggataccttgaagaccttgaaagaaaaggtaaaagagccttcagtgccagagccagaacctgagccaactactgaagtactttttctttgcagctatgatggctgtggaaagacattcatagatgctggtgcattgaggaaacattctcacatccatggagagaggcagtatgtttgtcactacgatggatgtggaaagaaatttctggatagctcaaagttgaaaagacattttctcattcatacaggggagagggattttgtgtgtcctcatgaaggctgtggtaaggccttctccctggatttcaacttaaggtctcacatgaaaacacattcccaagagaactatcatatctgcccatatccagattgtggaaagagatatgctcatgaatacaagctaaagaatcacattgcatctcatcatgaaaagaatgcatccgtggatgtgacaaagtacactactcccccttcagagaagcaaacaaaaacttctaaaccatctggaggggcatatggttctgcatcatctgaccgtccctatgcatgtccctatgatgggtgcgaaaaggcatacatccatgaatacaagcttagactccatttgaagagggagcatccggggcttatggctgatgaaaatgcagagcatgctcaggctaatgttgacaatgaaatggatgaagcaagtgaccatgatgcctatgttgcgaaacgatcaaatggtaaaattcagaagcagagtaagcctaaaccaaacctcaagttgcctccttccaaaattgcaaaacgcaaactgtccactccctctttaactgtaaataaaaattcttggcccgtgaaagatgaacctttcgatgaagaagatagcgaagaaacagaagaggatcgtgacaatgttgaagatggttggagatatgcaggaggaaacaatgaagatgatgatgaggaaacagaatatgaagactgaatcagttatggcatcctctatgaaacttaccttttccaagaaatatattttctcttctacaaaaaaatttcagttgtctcttttttatttggctgaggaaatgacatcttgtcaaactgtgtgttgctgttacaagcattaggaagaatttatataaataaaatgcgatttaaaatgct

SEQ ID NO: 29395 - DNA, 1033 bp, Glycine max
  Clone ID: TF_GmC1644_2
tacggctgcgagaagacgacagaagggggagtgagtgagagaaagaagagaaggagttgaagtggttgttgtattgtagtagtgtgtaaagtcttggtgatggatagacacaaatgcaagctttgttcaaggtctttcagcaatggcagagcccttggtgggcacatgaaggctcaccttgcttctctccctctccctctccctccaaagcttcactcttgtttctcttcctctgactcagaacaagaacaatctttaagggagaatcctaagaaaaccttgaggattctggatcctgaagacagagagagcgagacagagtctaataagaacccgactcgtcaacgatccaagcgcaactggaaatctaccatgcccaagctcagcctcggacaccccgaagccgaacctctcagctccgtctccgacacctcccccgaagaagacctcgccatgtgcctcatgatgctctcccgcgacacgtggcaggaacacaaactcgccaatgcaggtccacccaagactcgctgcagcagcggatcagagatcaagctcaagagcaaagtccgctccaagcacctctgccacgcttgtcacaaatcctttcgatcctctcgcgctcttgggagccacagaaccctgtgctctccccgtctggaagcccaaaataacagcatcattagtaataacaacattaaggtttttgaatgccccttctgttacaagctgtttggttctggccaagcgctcggtggacacaagagatctcacctaattccttcttcctcttcaaccgttaatcattctgtcaagttgaaacagagcttcatagatctcaacttgcctgctccggccgaagacgacgatcttagcgttgtttctgatgcctaattcgatctggcatatgttttaattgtttaatgtttagttgtctggtggtgttactcataaagtgaatttttcttcttcttcttcttcttcttcttctttataaaagtagctgagaatatttcattatgtttattgacagatc

SEQ ID NO: 29396 - DNA, 1337 bp, Glycine max
  Clone ID: TF_GmC1922_2
ggtccggattcccgggtcgacccacgcgtccgcctctctttcaccaattctccaaaatttcaaccccccaaactcaagatttgtgctgtcagagcgattcacattgcctgtgttacggttgtctgctttcaaagcttttgaagttgtactttcggaatttgcaaggtagtgttgtttaggacacttcaattttcttcggttccaaaacatgatgtctcaagaagcaatatctgttccttccaacaacctcagagacccctcggttcaacttcatgaaccaaactcaaactcaaattcaaaccctaataatcctaaccctaattcacttaagagaaaaagaagcctacccggaacaccagatccgaatgcagaagtgattgctctgtcgccaaagtcgctgatggcgaccaaccgattcatctgcgaagtgtgcaacaagggtttccagagggaccagaacctgcagctgcaccggcgagggcacaacttaccgtggaagctgcggcagagaaacaaggaagaggtggtgaagaagaaggtgtacgtttgtccagagaagagttgtgtgcaccacgacccttgcagagccctgggagacctcaccggaataaaaaagcactcacgcagaaagcacggtgagaagaagtggaagtgcgaaaagtgctccaagaaatacgctgttcaatctgactggaaagcccataacaagatttgtgggactagacagtacaaatgtgactgtggtacaatattctccaggaaggacagctttgtaacgcatagggctttttgtgacgccatggcggagcaaaatgcgaggcttccgtcggttttgtcaaaccttggaagcgagattttgatgaatgctgctcaagctccaagagtaatgccacaggctttacaattacatgggtttcattcagagtttggtgggccaggccaagaaccatacattggaaattttgcggatgtgaaccatgatgagcataagctaaggatgccactatggctagaccagaccaataatcctcttcagcttaatcatcatcatcatcatcatcctctaagcgtttcaagcaacaactcttcaagtttgttctcaccaggaacaaccttggctgaagtgaacaacatgtttgggacatcatcgtcgtcacagggacagtggctgaattaccgataccacccagaagcatcatttacacatgccaacgtttctattcctcatggactgaagctagagcaagaagaaaacaaagggaacttgtcgcatagcagccccaagtcagaatctgctgataataatatagtgtgagctctttgtaccaaagtcacat

SEQ ID NO: 29397 - DNA, 1517 bp, Glycine max
  Clone ID: TF_GmC724_1
ctgagtcgacccacgcgtccgtacggctgcgagaagacgacagaaggggagagggagagaggatccaaatccaagtacggttgggttggagagaaaatgcgtccctgctgaaaacaccaaaccctaaaacgcgaaaagggttctaagaatttgcgaaggaaagagctagcggagatggagattcactacagtaacagctatttcgagaggcgccccatcctcaagtccaaggctgccgctgtcaaatgggtcaaagaatgggttccccaagatcttgtgacaacaggagggaagtgcatgatcttaaaatgggtaacagaggataccttgaagaccttgaaagaaaaggtaaaagagccttcagtgccagagccagaacctgagccaactactgaagtactttttctttgcagctatgatggctgtggaaagacattcatagatgctggtgcattgaggaaacattctcacatccatggagagaggcagtatgtttgtcactacgatggatgtggaaagaaatttctggatagctcaaagttgaaaagacattttctcattcatacaggggagagggattttgtgtgtcctcatgaaggctgtggtaaggccttctccctggatttcaacttaaggtctcacatgaaaacacattctcaagagaactatcatatctgcccatatccagattgtggaaagagatatgctcatgaatacaagctaaagaatcacattgcatctcatcatgaaaagaatgcatccttggatgtgacaaagtacactactcccccttcagagaagcaaacaaaaacttctaaaccatctggaggggcatatggttctgcatcatctgaccgtcgcaacgtgcttcgcctaatgttgagagtgaaggcatacatccatgaatacaagcttagactccatttgaagagggagcatccggggcttatggctgatgaaaatgcagagcatgctcaggctaatgttgacaatgaaatggatgaagcaagtgaccatgatgcctatgttgcgaaacgatcaaatggtaaaattcagaagcagagtaagcctaaaccaaacctcaagttgcctccttccaaaattgcaaaacgcaaactgtccactccctctttaactgtaaataaaaattcttggcccgtgaaagatgaacctttcgatgaagaagatagcgaagaaacagaagaggatcgtgacaatgttgaagatggttggagatatgcaggaggaaacaatgaagatgatgatgaggaaacagaatatgaagactgaatcagttatggcatcctctatgaaacttaccttttccaagaaatatattttctcttctacaaaaaaatttcagttgtctcttttttatttggctgaggaaatgacatcttgtcaaactgtgtgttgctgttacaagcattaggaagaatttatataaataaaatgcgatttaaaatgccccaaaaaaaaaaaaaaaaaaaaaaaaaaaaagcggccgctctagagga

SEQ ID NO: 29398 - DNA, 1185 bp, Glycine max
  Clone ID: TF_GmC50_4
agacactcaaattacatggtcatagtgtacacctagttaggcaaacacaccaaacaccaaacaccaaactagttggctcaattctctttgaatggctttggaggctttgaattcaccaacagcagccaccactccgttccgtggctaccaagaagaggaggaggacgaggaggctgaccttcacttacgtgagccttgggctaaaaggaaacgctccaaacgaccgcgttttgagacggaggaagagtacctcgctctttgcctcatcatgctcgcacaaagcggtaacaccagaaacatccacaacaacaacacccaattaccgtcttcttcactgtcagacaaagaagcgtcgccgccggtgaaactaacacacaggtgcaccgtttgcaacaaggcctttggttcttatcaagcactcggtggacacaaggccagccaccgcaaggcctcgtcggaatccaaccccaccgcctccgtctctgccctagccaacgacagcgtttctgcttccaccgtcggcggcggaaggatgcacgagtgttccatctgtcacaagagtttccctaccggtcaggccctgggtggccacaagcgctgccactacgacgtacggctgcgagaagacacagaaggggccaacggaaacaacagcagcggcgccactacctccgacggcggcgctgcctcctcctcccacacgctccgtgggtttgacctgaaccttccggcgccgctgacggagttctggtcgccgatggggtttgatttcgggaagaagaaggtaggcggtgaacaagaggtggaaagcccgttgccggtaaccgccaagaggccgcgtttgtttacaggggaagatgatgaaaccgcgtagatttgtttgcagaattttattttaaattgattgaaattgaatttgttgctggtatatcgcgaatatgattatgaattcaaaccagttagtttaattttcattttatgtttttttttagtatataggtgggattgggattttgtttctgctactctgtacagacaaattttgttcattgcttttggactcttttttgtcattgattcaatctaacaattgctttcatcagtaatgtttatgccaaagataaatataagttaattcccatcatatacagattcctatataaatttatttcttggcttcttccg

SEQ ID NO: 29399 - DNA, 487 bp, Glycine max
  Clone ID: TF_jC-gmXLIB3563P002dh04a1
cagaaacatccacaacaacaacacccaattaccgtcttcttcactgtcagacaaagaagcgtcgccgccggtgaaactaacacacaggtgcaccgtttgcaacaaggcctttggttcttatcaagcactcggtggacacaaggccagccaccgcaaggcctcgtcggaatccaaccccaccgcctccgtctctgccctagccaacgacagcgtttctgcttccaccgtcggcggcggaaggatgcacgagtgttccatctgtcacaagagtttccctaccggtcaggccctgggtggccacaagcgctgccactacgacggcgggaacaaccacagtaacagcaacgccaacggaaacaacagcagcggcgccactacctccgacggcggcgctgcctcctcctcccacacgctccgtgggtttgacctgaaccttccggcgccgctgacggagttctggtcgccgatggggtttgatttcaggaag

SEQ ID NO: 29400 - DNA, 1235 bp, Glycine max
  Clone ID: TF_GmC7996_1
ttcattctttttgccttgacatgaatcaaaaccagcttcagccccttcctctccttagtagcttcttaggttcatctcctgaagaatctttgctacaaaaccaaaatgaaaatcctaatgcatgccatgctcaagttgaggatgttacagtggccttacacataggcctccctgaccattcaagtggctccaattccaccaataatcatggatttgtgaatgccacaactcaagttcctaacaattactggataccaactcaggagcagatcctcattgggtttagccatttctcttgtcctgtgtgccacaaaaccttcaaccgctacaacaaccttcagatgcatatgtggggacatgggtcacagtatcgcagaggcccagactcactgaaacgaacccatccacggcccttgttggaccttccatgctactgttgcgcaagagggtgcaagaacaacatcgagcacgcacgtgccaagcctctgaaggattttcgcacgcttcagacacactacaagaggaagcacggttccaagcccttcacgtgccgcaagtgtggcaagcctctggccgtgaaaggtgactggcgaacccacgagaaaaactgtggcaaacgatggctttgtatctgtggttctgatttcaagcataagaggtcacttaaagaccacataaaagcctttggatttggtcacacccctttttcttctttttctgatggtatgtaattaattaaacatgcatggcacaaaacttattatatggctcctttagtgttgttggttgtacagtttttcaatcagaattcaagtttcaacttcatattttgcataattatttaacgcaaattttaattatgcaagttatcgaggtgtgaaactgactttgatcgaagaacggtacaaacatgcactttattataacgacttatcttgtcttaatttctagtacttagacaatttaagggtgatctctatgttgttatcaattaataatgaagaggaatgagtttttcttaagttatgttactgtgttagcatttaaatagagaggaataagaagggagacagggtaaagaaactgagaatttgattccaatttattgattccctggttgccttttctgcttcaatatatgtaattagtttgttctgtgtgtgattaaaaagtgaacaaattctgaaatctcaatggacttcttcttatgctagaaaaaaaaaaaaaaaaaaaag

SEQ ID NO: 29401 - DNA, 1341 bp, Glycine max
  Clone ID: TF_GmC1658_1
accactcgtacgaaggctgcgagagggcctctgtagggggtgtcctattggtggaggaatgcttgttacctactcctttttaagttcccaaattccccaaagaagcctaaggccaaaccaaaccaaacgtatcagaataaacaaagaaagtcctctctctaatggagcggtacaaatgcaagctctgctccagaacattctccaatggcagagccctcggtggccacatgaaggctcacttagccaccctccctcttcccccccaaaaccaacaaccaccactttctccctctgctgctgcttccttctcttctaattcctcttcagaacaagaacaagccacacacgatgaaaagtccctgatttatgggttaagagagaatcccaagaaatgcttcaggctcgcagatcccgagtttgacacgggctctgtcgttcaagacagggagagcgagaccgagtcaaagaacccaactcgccgacgatccaagcgaacccgaaggcccgtgaatttggaacaaaaaaagcccaaactgagtttcatggagtcgcctgagcccgtgagttcggtctccgacacttcccccgaggaagatgtcgccatgtgtctcatgatgttgtcgagagaccgatggagtaagaacaacaacatcaacgttgttaatgttaatgatgaggatgttgtcgaagaggaagaagaagaagaagaagaggaggaggagggtgggagatcagtactagagataaagttgaggagagttcgcgggaagcaccagtgtcagagctgcgggaagacgtttcgatcttcacgcgcattgggcagtcacagaagcatttgcgaaggttcgggtaacgatagtaaaatcttccaatgccccttttgttccaaggtgtttgggtctggtcaagcacttggtggccacaagagatctcacctcatgccttcttcttccacaaccgctaataatgattctgttagattgaaagagagcttcatagatctcaacttgccagctccgcccgaagatgacgaccttagtgttgtttctgatgcctgataattacttgttcttctctgcagcaattgggtaaagtccttttctttttttatagtaggtaacgatatttcattgcggttcattgttagatcagatgcttttgatgctacaatcatagcttataatttatgctctattgtgcctagattctcaactaaattgttactctaggtaacatcgtaatcaattaatataagattattttattttaattaccctgatctcaagtttgtgtttttaagtataattctacttaactccatcatcattactttgatttccc

SEQ ID NO: 29402 - DNA, 1120 bp, Glycine max
  Clone ID: TF_GmC153491_1
taaaaaaaggaaatatagaaaacgaaaagtgaaacataaaaatgttccttatgaaccagttcttgaagaataacagaaatacctcgaaagaagacatgaatcctgtaaagaattaatgaaataagtgcataaacttttcctatacagtttggaatcttcactccgaagttgaattgcattgaagtttgaactttgaacctctgctggaatgagcaactatgataggttttactttagttagaaatgaggccaaccagtgcctcctgcttgtgatttcctcctactacccaccaaggtctgtaatgctcagcatggccatggccagtgccttcttcctctgtagaagcaggaaggttaaggtcaaaaaagtccctaatttctggtgctgcttcctcaagtacaattgtttgactttgaaaatttcttgcactctcagacccaccagccaagtgatgagatctcttgtggccacccaaggcttggccagatggaaaaaccttgtggcaaattggacactcgtgccctttccccttcttggaatctctcactgtttcaacctcattgtcaaattgagtagtagtagtagcagtagtaacattagtaaccatttcatgttcttccacatactcgttcttcaggagcttactttctgttgtagggtctggggagagttctgcctccaactcagtgctgttctcactgctctcatttcttgaagcaaagcaacccttgatcctcttgtgactagccctgtggcctccaagtgcttgatatgagtggaagattttcttacaagtagtgcactcaaactttcctctcttattggagcttttgctgaattcaccttctgagttcttgttgttgttcacccaactcttcaaaggacttgacttcaactcagagtccataaactttgccttgattgaagtgtacttattgttactattatgattattatctgttccattgtcctcaaatgcagaattagaaaccatggtcttgctgaccccaaatccacttccaggactctgagtagtacccaaaagctctgaactcgtttttccttttgagttgagatttgaacaatccaaatttcccggacgcgtgggcggacgcgtgg

SEQ ID NO: 29403 - DNA, 1274 bp, Glycine max
  Clone ID: TF_GmC296_1
ggaagcaccagaagaactctcttttgggggctccaaagatcacaccaacattgccaaaggaaaaagaaccaaaagggtaaggccacaatctcctattcccttctccatcaccgccaattcttccaccggaggagaaaaagaagaagattgctacaatgttgatgatgacaacatcataaaaaatgaagatattaacaacaacaacatcaataacatcaacagcactcccaccacttctgcagaattacaagacatcacagatgaagaggaggacatggcgaattgcctcatccttttagcacaaggacaatcccgggaatccccgaaacacgccgaggaagacgccggcatgagctacgccaagcacaacagtaggaaattcttggaagctgctaccttggggtctagcagggcagggtactatgtctatgaatgcaagacatgtaacagaaccttcccttcatttcaagcacttggaggccacagggcaagtcacaagaagcctaaggcattgatggctattggccaaaagaaaaaacagcaacatcttttgtcatcagatgaggaagagtttcaattgaagaccaataagtcaccattttccattcaattgaatacaaatgggaatttgtacagcagcagcagcaacaacaacaacaagtccaaggtgcatgagtgttccatctgtggtgctgaattcacatcaggacaggcattgggaggccacatgagacgccaccgcgctccggtcggaaccacccccaccgccaccatactctccttcaccccgttggctttggaaccagaagaagatcaccccagaaagaaaaggaatgtgttgaatttggatttggatctcaaccttcctgcccctgaagatgatcatagagaatccaagtttgcctttgcatccaagcaacaacaacaacaacatggacagaaacaaccacaacaacatcatcatccagaacaaaaacaacaacagccacaacagcaacaaacaagtcttgtcttccccgtaccagctttggttgattgtcattactaacaaggttttagattggcatttctcaagatgatcaccaaacgaaactggggttaatgtgcaagttagccatacatttgtcgtatgatctgattttttttttcttttttgatctatacatttatcaaaaatttacattacatgatgattcttttgatcctttgtaaacttgatcgagccatggtgattattaagggtgagctcagtttgtttattggagaaaagtttt

SEQ ID NO: 29404 - DNA, 555 bp, Glycine max
  Clone ID: TF_uC-gmroLIB3258P126b02a1
gcgagtactgcggtatctgcagatccaaaaaaacccttatcacctcccacatcaatttgcaccacaaggaagagtatgaaaaagcaagagctgaaagagatcccgaagcagaggcttcgaaatcgaacagttgcgaggaatgtggtgccactttcaaaaaacacgcctatttgttgcagcacatgcaaagtcattcacttgagaggccatttgtgtgtgctgtcgatgattgtcaggcaagttacagaagaaaggaccacctgactcggcaccttctacagcatgaagggaagatttttaagtgccctgttgagaattgcaacagtgagttctctttgcaaagcaatatgaaaagacatactgaggagattcatgatgacagttctaccactaccagtagtgacaaaagtcacaaacagcatatgtgtccagagattggctgtggaaaggtttttagatatgcatcacagctacaaaaacatgaagattctcatgttaatttggaatcagtagatatggtgtgcttagagcctggttgcttgaaacatttcacta

SEQ ID NO: 29405 - DNA, 1204 bp, Glycine max
  Clone ID: TF_GmC1072_1
gccgtccgtgtctctttctctcttctattactattagtaatatatctatcttttcttgcacaaccaaactcgtcactctgtggtattaattcaatattcatagacttcactgtctgattgtctttgtttaataccatataggattcattaaggattctctaatgttggcacaaatggacatggaggagcttgtctcatgtaacaacaacgatgccaccaacatagccaaagggaagcgcacaaagcggcgcttgaggcctttgtctccttgtgctgttgtcgctgctaccactatcaccaccaccaccactgctatcaccgctatcaccaccgtcatgacatctagctgttcaagtgcttctgccggtggcggtggatcgtcttcatccaccacctttgaggaggaagaggaagacatggctaattgtttgattctcctagcacaaggaagagtaggacgggaccctcctcatcatcacaaggacctatgtggtgatgtcaagacagagaagggtagcaccaaagttgatcatttatatgtttatgagtgcaaaacatgcagccgaacattcccttcttttcaagcactaggtggccacagggcaagtcacaagaagcccaagatggaggagaaaaagttgttatcaccaccactgttattgccaccactgccagcttcgtcttcgtcactatttaattttgaggaagcaaaacaaagtcacatgaagaatattattagcccttctgtctcccttcaattagggtgtggcattaacaaggttggtttaaatttccatggcaacaagtccaagattcatgagtgttccatctgtgggtcagaattcacatcagggcaagcattgggtggtcacatgaggaggcatagagcatctaacaataataacaatattgttcagacaacaacaacaacaacaactacttctaatggtgctgttgatgttaagcctcggaatgttctagagttggatcttaaccttccggcgccggaggacgatctccgggactcgaagtttcagtttccggcgaatccgaattctatgatgctgtcggctgctccggctttggtgggatgccattattagaaaccagggtgggaattagatggagaggggggaaaagttatattatttgattaatgatcattgtgaattatttagctttattttaatttacaattattctt

SEQ ID NO: 29406 - DNA, 1167 bp, Glycine max
  Clone ID: TF_GmC21_1
agcacaccgcgcttacttgctcacccgatcaactcaacacaaaccaaaacctcagctaaaattctcacttctctctctcagctccgggaaccaagaatcaactcgatcaactcaacacaaaccaaaactcaagctaaaattctcactctctctctcatctcgagatcatagtatcatattcaatatcatttcataccaaacacatggctttggaagctctcaactcaccaacaacaaccgctccatcttttccctttgacgacccaactattccatgggcgaaacgaaaacgttcaaagcgttctcgcgaccatccttctgaagaagagtacctcgccctctgcctcatcatgctcgctcgcggcggcaccaccaccgtcaacaaccgccacgtcagccctccaccgccacagccacagccacagccgacaccagatccttccaccaagctcagttacaaatgctccgtttgcgacaagagcttcccctcttaccaagcgctcggtggacacaaggccagtcaccggaaactcgccgccgccgccgaagaccaaccccccagcaccaccacttcctccgccgccgccaccagctccgcctccggaggtaaggcccatgagtgctccatttgccacaaatccttccccaccggacaggcccttggcggacacaaacgttgtcactacgaaggtaacggtaacggaaataacaacaacagtaacagcgttgtcaccgtcgcctcggaaggcgtggggtccacccacactgtcagtcacggccaccaccgcgacttcgatctcaacatcccggcctttccggatttttcgaccaaggtcggagaagacgaggttgagagccctcaccctgtcatgaagaagcctcgcctcttcgtcattcccaagatcgaaatcccccaatttcaatgaactcgttgaatttttagtttatttttcgactatatattttggagaattttgagagttactataatttgattttgtacatagtacttggaagttttgttggaccgtaccggacccagttctctggttgaggttgtactttcacaacagtggcagatttgcaattcaattcaatttatttgtttattttaattagtaaaaaaaataatttgatcttaaaaaaaaaaaaaaaaaaactcgagac

SEQ ID NO: 29407 - DNA, 835 bp, Glycine max
  Clone ID: TF_GmC427_2
tacggctgcgagaagacgacagaaggggctcatcgagtctcatatttttcatacaacacattctttctagacacgcaacacctagaagatttccttattctttttggtgctaaaccgttgggatatagcaacaacatgttaggaatgaagagacatagagataatgaagggtcagagagcttagatttggcaaaatgtcttgtgctgttctcttgtccaatagaaagcaacaaggcacaacagaaaggttttggggctgtggaatttgagtgcaagacgtgcagccgcaagttctcttcttttcaagcactgggagggcacagggcaagccacaagaggcagaagctagagggggaagaactcaaagaacaagccaaaactcttagcttgtggaacaaaccaaaaatgcacgagtgctccatttgtggacttgaattctctctgggccaggctctgggtggccacatgagaaaacacagagctgctctcaacgaagggtttcctataattccttctatcgaccaagttattgcgaaaatcccggttctgaaaaggtcgaatagcaccagagttatgtgcttggacttggagttacacctgtagagaatgaatgactgaactaccaagtcacccaagctcctttttctttgttcttattaacttttctacattttttacctgtttctggacacatgtattctttcattttttgtgtgaaaattttattgacttttcccttatagatgattgattctttattctggacacatgtattattttgttaatacgattatcaaaagttcttagtgttttaataaaaaaaaattttcaccca

SEQ ID NO: 29408 - DNA, 496 bp, Glycine max
  Clone ID: TF_GmC39743_1
atactacacaattcacaatcccaacacccattttggagaatcagaatctaactagccaatagccatgaagagacagagagagaacgaagtaacaacgttggaaagctgggacatgcaaatttgttcaacttcaatcacacccgacacaagtgtttccagttccaccatatctccggaagatgtatttgagtgcaaaacgtgcaaccgcaagttcaactcttttcaagcgctgggtggccatagggcttgtcacaacaagagggtgaagatggaaggtgaagaacaacaactcaaaacaagggcaaaatatctgggtttgggaaaacacagtgagcccaaaatgcataattgctccatttgtggtcaaggtttctctctgggccaggccttgggaggacacatgagaagacacagagcttcgaccaacgatgttttctcttccataaaacaggttgttgcaaaagtttcggttttaaaaagatcgtgtaatgacaag

SEQ ID NO: 29409 - DNA, 1341 bp, Glycine max
  Clone ID: TF_GmC1644_1
tacggctgcgagaagacgacagaaggggacacaagaagtcatcttttattgtacgccaaagaaaagaaaagaaagaaatcatagtttttttgggttgtgtgtgtcttttggtggaggaatgcttgtcacctactccttttaagttcccccaaaaacacttttgtgagtgagagaaagaagaagaagaagaagaagaagaagtagcataagtgatggatagacacaaatgcaagctttgttcaaggtctttctccaatggcagagcccttggtggccacatgaaggctcaccttgctactctccctctccctccaaagcctcactcttattcctcttcctctgactcagaacaagaacaagaacaagaatctcttaattatgctttaagggagaatcctaagaagagcttcagggttgcggatcctgaagacagagagagcgaaacagagtctagaaaccccactcgccaacgatccaagcgcaaccggaaatccaccatgccgaagctcacaccgccaccccaccccgaacccgagcctctcagctccgtctccgacacctcccccgaagaagacgtcgccatgtgcctcatgatgctctcccgcgacacgtggcagcaacacaagcacgccaatgcagctacacctaagaggcgctgcagtagcggatcagagatcaagaaaaatgtccgcgggaaccacctctgccacaaatgtcacaaatcctttcgatcttctcgcgcgttcggaagccacagaaatgtgtgttgtccccgcgaggaaggccaaaataattacaacaacaaccgtagcactaaggttttcgaatgtccgttctgttacaaggtgtttggctctggccaagcgctcggtggacacaagagatctcacctaattccttcctcgtcttcaaccgttaacgattctgttaagttgaaacatagcttcatagatctcaacttgccggctccggcggaagacgacgaccttagcgttgtttctgatgcgtaattcgatctcgatatgtttaattgttcaatgtttagttgtctggtggtgttactgataaagtggattttttttcttcttcttctttttttttttaaaagtaggtgagaatatttcattgtttattaacagatcaaatgctcttgattctacaatgatagctgagtataagcgatgttctgtgtcttttttttttaacttttcgacaggtagaagatatgactagagttataacttacatggtgaattttattggtttatacgcaacttggttcatcgtactattaggttttaaacgtagtttcaatgcaaatttgagatttggttgtggacc

SEQ ID NO: 29410 - DNA, 2747 bp, Glycine max
  Clone ID: TF_GmC282_1
ggaatcactttaaagagaagcactttattaactttgtacatcctcacaatctacaccattaaatttttgatggggttggggatttgtttcactacggggaaaagggggaaaactgagaagggtttccgggggctcggggctgttagggggtgaacttgcgaacagagaagggaagaggagtttgtttagtaaggattatcgttgggggcattattggagctggtaggtagggggggctagggtaaataaatgagagaaacggggttaaataaataaataaataaaaggaagaaaaaactctggaggttgaccggtggatattagagtagaagaagaagaagaagaatcccaaaaagagaaaccaactcaaacttgttttatccatgggttgatcatcccaaaaaagtttgctttgtttgggtaaatgacccttaaccctgtttgtgaataataatagagttaggaggttccgatgacggtcgatttggacaacgcttccaccgcttcaggtgaagcagccagtgtctcttcctccggcaatcagacaaaacccgccgctccaaagaaaaaacgaaacctcccgggcatgccagatccggaggcagaggtgatcgctctgtcgcccaagactctcttagcgacgaaccgtttcgtgtgcgagatatgcaacaaaggattccagagagaccagaatctgcagctccaccgccggggtcacaacctgccgtggaagctgcggcagaggtctagcaaggaggtcagaaagagagtgtacgtgtgccccgagcccacgtgcgtgcaccacgacccttccagagcgttgggggacttgacggggattaagaagcacttctgcagaaagcacggcgagaagaagtggaaatgcgataagtgctccaagaagtacgcggttcagtccgattggaaggcgcactctaaagtctgcggcacaagagagtataagtgcgactgcggaaccgttttctccaggagggatagcttcatcacgcatagggcgttttgcgatgctttggcggaggagaacgccagatctcacactgttgtaaaagatatttcggagaatgattccaaggttttaatcggtgattcgccacccccgcagcctgttgcagccacggtggctgctactactgctgctgctaccaccaccaccactactactattacttctactacgcaggcaaatagtgttatgtcctcttgtttgcagacgcataacctagtttagatttgccagaaaacaatcccccacaagtcattgaggagccacaggctgctactgctactgctataagtgggagctgtggcagcagcagctcctgctcaactagcaatggtggtgctacttgtaatagtaacagtagtagtagtgtgtttgcgagtttgtttgcttcttcaacagcatctgtgaccctacaatctcaaacaccagcattcagtgacttgattagagccatggggcctccggaacaccctgcggatcaaatctcgggtccttcatccgaggcgatctctctttgcctctccaccactagtgcctcaccaatcttcgcaacaggtggccggcagtatgcgtcgtcttcaccgcacccggccatgtcagccactgcattgctgcagaaggcagcacaaatgggtgctgctgccacaaacgcctcccttcttcgcgggcttggcattgtgtcatcgtcacctttggattccacctcgtcgggacagcaaaatgtcctgcaatggggccaccaacagcagttggaacccgagagtggctcggtcgctgcagcagggctaggacttggtcttccatgtgaagatggtggttctggactaaaggaattgatgatgggaacttcctcaatgtttggtcctaaacacaccactcttgattttctaggattggggatggctgccggtggcactgctggtggaggcttatctgcacttatcacatctattgggggtggtttggatgtaactgcagcctttggcaatggagatttttctggcaaagatattggaagtagctcttgatatgatatcttttggtagtaagcaagaactgcacttatcagggcaaaagtatatgatgggggcctttctggattgtgttgccccctttaattgccagggaaagaaactgtgatttactgtgttagaaaacggaaggtggtacaagttacaatacgcttgctctggatgaagggtagttgttgaattaaggttgtttgcaacaaaagggtttgaactttggtatggttgtcgtaggttttggcgacagtgacacgtttgaagatagtatcatcttgtttcggctcctttggtctccacagttttgattaaatttaaattacggcattggatgctttggttcgtagttgttggcataattcaggaaactttgatgaggtagtagttttcttcaattgtcgatttattgtaacaaggtagttttccgcgtatgccccattgttttgtaccagtgaatggttgattgaattcttctagcaagtagtgtttttatgtaaatgtcataaagtattgtagtattcctttgtagataaaaatcctcttctaagaagctttatttaattgccaagtatagcattatgatggataattaataccttaattaggaaatcatgtgatttattttcttgccgcctgagatgtggttaaaagtagacaacatcatgaaagttttgatattcttgttaggctatgtgact

SEQ ID NO: 29411 - DNA, 2313 bp, Glycine max
  Clone ID: TF_GmC282_2
caaaaaccaaaaccaacaccaaaccaaaactttatccatccatcccaaaaagtttgctttggttaatgcccctaacaaatttccatttttattttccctgtttgtgactagagagttgggttcccatgccggttgatttggacaacgcttccacagcttcaggggaagccgccagcgtctcttcctccggccaccaaacaaaacccgccgtcccaaagaaaaaacgaaacctcccgggcatgccagatcccgaggcagaggtgattgctctatcgccgacggcgctcttggcaacaaaccgtttcgtgtgcgagatatgcaacaagggattccagagggaccagaatctgcagcttcaccggcggggccacaacctgccgtggaagctgcggcagaggtcaagcaaggaggtgcgaaagagagtgtacgtgtgccccgagcccacgtgcgtgcaccacgaccctgccagagctttaggggacttgacggggatcaagaagcacttctgcaggaagcacggcgagaagaagtggaaatgcgacaagtgctccaagaagtacgctgttcagtccgattggaaggcgcactccaaagtctgcggcaccagagagtataagtgcgactgtggaaccgttttctccaggagggatagcttcatcactcatagggcgttttgcgatgtgttggcggaggagaacgtgagatctcacgctgttgtgaaagataattcggagaatgattccaaggttttaaccttaaccggtgattcgccaccgctacagcctgtctctgcaacggtggctactactactacgcagacaaatagtgctatgtcctgtggtttgcagacgcagaacctagagttgccagaaaccaatcccccgcaagtcattgaggaggagccacaaggtgctactgctgtaagtgggagctgtggcagcaacagcacctgctcaacaagcaatggcggtgctactagtaatagcaatagtagtagtagtgtgtttgcgggtttatttgcttcttcaacagcatctgggagcctacatctcaaacaccagcattcagtgacttaattagagccatggggcctccggaacaccctgcagatcttatctcagctccttcatcatccgaggccatatctctttgcctctccaccaccagtgcctcaccaatcttcgcaacagtaggccaacagtatgtgtcgtcgccaccgcagcctgccatgtcagccactgcattgctgcagaaggcagctcaaatgggtgctgctgtcacaaacgcctcccttcttcgtgggtttggtattgtgtcatcatcatctttggcttcgacctcatcggggcagcaaaatggcctgcaatggggccagcagcagttagaatccgagagcggctccgttcctgcagcagggctaggacttggtcttccatgtgaagatggtggttctggactaaaggaattgatgatgggaacaccctcaatgtttggtcctaaacacaccactcttgattttctaggattggggatggctgctggtggcactgctggtggaggcttatctgcacttatcacatctattggtggtggtttggatgtaactgcagcctttggcaatggagatttttctggcaaagatattggaggtagctcttgatatagcagtaataatatattttggtagtaagaaagaaagaacaagagctgcacttatcagggcaaaaagttatataagacagtgtagaattaaaaatgttgtctttgtgtagaatctttagttgcaatgcaccaacatgcacaaatgagggcctttttaggattgtgttgctccctttaatgcgagggagagaaactgtatttagtgttagaaaacggaaagttggcacaagttacaatatgcttgctctggatgaagggtagttgttcaattaagggtgttttgccaaagggtttgaactttgatatggttgtcgtaggttatggcgacagtggcacgtttgaagatatactcaacagtgttgattgaatttgaattaagccgttggatcatggatgctttggttcgtagctgttggcataaatcaggaaactttgatgatgttgtagttttcttcaactgtcgatttattgtaacgaggtggatttccacgtacgccccattgttttgtagttaatggttgattgaattcttctagtgagtaagtagtgtttttatgtaaatgtcatgaagaattgttgtattccgtatttccttttgtagttaaagttgctgttttaagcagctttatttaattgccaagcatttacgat

SEQ ID NO: 29412 - DNA, 2763 bp, Glycine max
  Clone ID: TF_GmC1035_1
ggaaacaaaagagaaataaattataatcaagtattccaaaaaataatcatgatcaaaacgagttggattggctagcaatatgtaaacaacttgtgcttttatatattggttatagggcctttaaaccaacggcgaccactgattaaccagtaagaaactacaagaataagcaaacatccaacggcaacaggggtgtagttaagtgtcttaatggttattgggtaggaaacaggcaaggagaagagtacagaaatggtcagcacccaaagaacagcaacccaacccacaacgacaccataacggcccaagttgaaaggcccactgacaaagtgtttccgtgccaaggtcacccttaagaatatagggaaggcataagcaatatagaggccaattgttgctatggacaccatggcctcaaatgctactatgcttccaagagatgtcagtgccatgcaaaatgatatgaaaacggaaagccaaactgcatatatagggacctcctgcttgttaactttgtgccacaatgatgacaatggcatgcaaccatctctatttggtgcagaagccatatttgaattcctgttaacataactcataccacagaaaaatatgacaacagcaacaattacttagttaattatgtctccagatccatggactgatcttttcttgaatgcttggaaaatacttgagcaattgcatacccaccagcatcattatcttcactcaaaaggtaaaggatgtcagtgactgcaaaggtaatgcctagtatctaaccccatccaacaacaatggatatcccgacagagctgataattccttttggaccattcctatcagcatccttggtatcatctgtcatatgagctgatgcatcaaatccagttagggtatactgactcattagaagtcccaagagaaatatgtagggtttgctgttgattccttccccattttctgtattgaaatgagtgaaaacaaacttggcactagccctttccgttgcaacagatggaatgacaatcataagcacaaaaacacctataacattccaaatagctgccagctgtcctaagaatgataacaatgagataggaaggctgtttattataccgtgtaggaacaaaattcccccatggaaagcaataactacatatttagatgcctcatatccaccaccatttttgccaccagtactaaggagaataataacctgaatcagttgtgcaagtgaataatctacacttgttgtcactgcccactggccaacaatattgaaccagccagtaatccaggaagcaaagggtgcccatctgggcccagcaagcttggcactccaataataaagcccaccagaagttggataagatgaacaaatctcagccattgagaatgcaacgagcatggtgaaagcagaagctaaaaaccacccatacaccagcgaaacagggccgccataattcaacccagtgttgtaaagagtggtcactccagtcaacaccgatataatagaaaacgaaaacgcaaaattcgaaataaccgaaagatcacgcttgagttcttgtttgtaaccgagttctttgagacgggcgtggccggaatcaagtggggcgtggccatttgcgaccacatgagaagggagtattttgtcagagcccatgaagatggaggaaaaatgtcccttttcatcactttgtcccttttcatacattcacatattcattttgccacaccttaaaaccaagcacccggccatatttcaatttttgttttggttagttgtcatgaagagagaaagagaggttgatagcttaaccatggcgaattgtttgatgttgctttctcgtggaagtgaatttgaggccacctactcaagcacttctatgagcaatcgtgtctttgagtgcaagacatgtaataggcaattcccttcatttcaagcacttggtggccacagggctagccacaaaaagcctaggttgatggcaggagatatcgaaggccaattgcttcatgattcacccccaaagcctaagactcatgagtgttccatttgtgggttggagtttgctatagggcaagccttgggaggtcacatgaggaggcacagagcggcgaatttgaatggaaacgtgcacaattctacggctacgagtagtagtagtgggggtagcagttttgattcatcgccaaagaagaaagctgacaacaagagagttttggttttggatttgaatctgacaccctttgagaatgatttggagtttttgaagattggaaagccaactacttttgttgattatttgtattgattgatctgttgagtactgttaattaaacttaggaaggtatagtttatgtatcatagatagatgaatgttttgtttttttttaatctatcgtctataatatttgtttatcattctgtctgaaaaattgctcatttcttgggcaaaattagaacttcatcatgatattctgagtcactgaaaaaaatatttgcaacagaacacaaaccaagccattttcaatccgctacgagagggaaaaaatacaaatggccatgatcaagctaagaacctagaattggaaattaatgatagaccaaaaaaagacacaaaatgaaggaaggaattcaattaagcgagaaagagagaacctaatgaaaaatgacgcttgagttcttgtttgttaccaagttcaagaagacgggcatcaaaatttgtaattgcaaccacatgtaatgggggtgcggacgcgtgg

SEQ ID NO: 29413 - DNA, 1079 bp, Glycine max
  Clone ID: TF_GmC45046_1
ccgctcgaggggcgcggggcggcggccaggcgacgccgcatcggggggggtggagcgtgcgaagggagagggggtcagtcaaggtcagcatagaaagactccctctcagttccgacgaggcggcgactctgcattcccacccacctaacttctctctctttctctctctagggtttcgccatttatccctaattaagctaatttcaatttcatttttaaggctgtgtttgaaagtgtgttcaatgggtactccggaattcccagatctgggaaagcactgtgctgtctcggattgcaagctcatcgatttcttgcccttcacctgcgattgctgcgtccaggtgcgtgcagagtgatattagtattctcatgtacaattaagtgcagggactgcacagtagagcattgtttaaagcatcggtccggacctgatcataaatgtcctggtcccacaaaggtggaatcaagtttttcattcatgaatcttttgaatgggagtaaaaagcaggagtccaaacccaagtcaagtgcaacctcatggagtacaagctttcttaatgcggcttctaacgttcgagcttcggctgaggctggtgtgtcaaagttaagttcctggcagacagcaaggggtggggttggacagagccatagcagtggtcaagtggagcaatgccctcagtgtggtgctaagttttcctcagttactactttggttgaccatgtgcaaaaagttcatgaaaggagtcgcaaccgatctggagcaaaggttacaattgatgtttgtccaaagtgtagtagaggatttcgagatccggtggccctagtggaacatgttgagagggatcacggtggaagttctagatcataggtacgagttgctattgttattgaatgaattttaacttgaagaaattgcatatttttgctataaatagtctggaggaatatagtgtttataaacatgaatttaattggaatacatcgagagtgtaaacattgtcattcaatcatgtggtaaaaattgtaaattgttgacttttcttgtaattactttaaaagtcatatttaaggtgatatat

SEQ ID NO: 29414 - DNA, 978 bp, Glycine max
  Clone ID: TF_GmC166190_1
ctttcttctccttcactttctccatccatttttagcgttcagtgcttttgatgcttctgctgtccttccagatcttgcacatcattcagttcttctgcttcttcttcactcagatttctgtggggtgttcctcatgtcacggaagtaaaggcaaaaggaggtttctcttcttacctatatgaacttttggtgttgaatttggttggtgtttaaattattgaagagtgtattggaggattgtggagaaggaagtgttgaggttgattgtggagttgaaaaggattgaacttgttttgttgattattgtttgttgaagtttggtttttttctcaatggctgtagaggagtctgagcctgtgattggggagctggaaagggaggagaatttgattgctgcggtaaggcatattgtgaaggcactggggccaaataagacccttactagtgatgccaagaaaattctggcagatcttggcactagattgtcctccatgtccgtacctagtgagaaggaggaggggaaacaagggcaagggaaggatgatggtgataatcatgatgctcttgtgttggaacaggatagggttgatgaggatgaaaaagaggctgatacagcaaaagcagcatgggtttgtcgggtttgtctgagttcagaggttgatataactatagttccttgtggtcatgtattgtgtcgtagatgtttttctgcagtgtcaaggtgtcccttttgtcggcttcaggttacaaaagctatcagaatttttcgtccgtaatatctccaatgcttttgtgatcattttatttggacattgtcagagttccattcgccaatataggctaactgaagttggctaagattaatcgggttacattggactctgacgtgaatattatgtttttgtgattgagccccaaaaatgggtactgttgaaattttctggtaaataggccccaagggaaaaaaaaaggtttggt

SEQ ID NO: 29415 - DNA, 1369 bp, Glycine max
  Clone ID: TF_GmC76336_1
ctttctgtctctgtttttggaattttgtgggacatctttgaatgagaaattctgtttttgttcaggagtctgttatctttgaatgagcaaacattcagtatgagcttgccctgtaaattccttcctatttgggaattaaaaattgaatattttttctatgttgttgaagtttcaaacatgatgcatcactggaatttttattttttttctagaattgagtcttttttcttcctcttatgcatcattttgtgtaaactttgtgagtgttgttttcatgttgtgtgggactcttttgttatttggagctgaatgctactgtgtttttcttgaagtggtagagttggactttgaagctgagaatttgtttaaagaagatgttgatgaactgcacctgtgaatttgcatgacactcagttggaaaattgaattagataacacttttcaatatccaaaaacttcattgatatgtttatgatggagtctttcatactaattctttaagcagagtttagcacttttctcatgtgagtgagattgtatgctttcttttcgcctctttgttagggcattaggctatccaagggacaaagatggaggatgctttcagatgaggatatcatacagtccagcagcccctctttttctgtttcttgttcaatggaccgattaccgcctcgccggtgctctgggtttgctgagaattctaatttatgtgacttatggaaatgggaagaatactatgtcaatatatgaaaggaaagcaagcattagacaattttactcgattatatttcctgctctgttgcaacttgagaaaggcatcacagatttggaggaaaggaaacagaaagaagtatatgcccttagataccaaaggaaaagtgagttcaatgagagaagacaatctgaaattgacattgaaagagaagaggaatgtggagtgtgcttggaggtgaaagcaaaagttgtgcttcctaattgctgccactacatgtgtttgaagtgctacagagattggtgtcagaggtctcagtcttgccccttttgccgggatagcctgaagagaaccaactctggggacctttggatttacactgacaccagtgacattgttgatgttgggacaattttcaaagagaattgtaagatgctgtttctgtacatagagaagctgcctctaattgttccagatcccagatatgtgttctatgatccacttctgagatgaaggaattgcctacagatttttggaaaatagtgtgtatgtttcactttacttgtacatgcattttagaccataatttaattgtgtatatatttaactggcttttttccaatcggcttcaagttggtgatttatttctaaccc

SEQ ID NO: 29416 - DNA, 568 bp, Glycine max
  Clone ID: TF_GmC110067_1
gggatgcttatagttacccttaattagattgacatcacccaagccatagtattagtaactcattcccctgcagcttcatgcaaaaattggaaaagaatggaagtacatttgtggtagggaaaaagtaccgccaagagaaaataacaactcacaaacccactcccaatgctaatttcctatcaaaatttccccactatctacatgatcccgcaaatcaaatcactataagacacatgtttataatatgcctaattatgatataatcttcgtactttgtgaataagccttcggcatataggacacactatgctctcctcatctaaaatcctctgtgcacagtcatagcaagtggcacaatgtccacaaggaacaaagaagctactgcgttgttcatcataacaaatgcaacacaatttttcatcatataactcctctgaagagctactggatgctcctgaatcttcttcttcatcatcttttgcatttgttccatatgtcaatcgatttgtctccacttgcatcaagggctgagtttcggtttgccttgcaactacattacttgttctgt

SEQ ID NO: 29417 - DNA, 900 bp, Glycine max
  Clone ID: TF_GmC1475_1
ctacggctgcgagaagacgacagaaggggatgagtcatgagatacacttttcagttcatgaaacacaacagtaatcctcaaattctctctctattcaaagagaaaaaatcatcgtccacttgcaaccaacacaatttggtatcaaaatgggcctgtcaagtctcccagcaccatctgaaggagtgttatgtgtgcttcttgtaaacactgccttgtctatatccatattcaaaggcattgttaggacaattctacaaattgtcggtatccgcgtttcgtcgttgtctccttcaccagacatctcccgaaacccacctgagccattagaattcaacctcagcccctcggagggtttcattgaagagttcagaagcaggacaccaacacttaggtttggcagcatgtgtggcagtaaacaacctcaacatgaatgttgttgtgtgtgtctcacaaagtttgaaccagaatctgagataaactgtttatcatgtggccatatttttcacaaagtgtgcatggagaagtggttggactattggaacattacatgcccactttgcaggacttccttgatgcctgaagatgatgcatcttgcttttggtaaaaaaacatgtacatataaaagaaaagagatatattcatgtacagtatatattgtatgtacatagttgtggcagtgttgatgttcccttggtcttggctctaacttttttaaccctttacttttttatgattgttaaagtgtgtggagggtcttgttttcctttgtttctctgtatctggtgttgccacatatgagtcgagggatctacttttttgggataattgtgtttgtccataatatcctcttgatatgtaaacagacatcatatacagacccttttgcttttgccacatgt

SEQ ID NO: 29418 - DNA, 2868 bp, Glycine max
  Clone ID: TF_GmC698_1
catgttactagtgcctttcatttccctcctcttctcaacgcattatatatttattcaccgacctcggttttcgtgctgcgttttctgcttttcataaaaccccatttcttttctctctatctctaagccaaagctcgaagcttttcaccatttgagatctggggttggagctttttcccttttctgggttgcttgcagcattttcgccgttagagttaagagacaccaaaatatgggaagcaagtggaagaaagccaaggtggcgctcggtctcaacctctgcatgttcgttcccagaaccttagacgacgattcgccgccgcacacggtggtttccgagcgcctctccgacgccactctcctctctccggccaactggagcaccagctcttcccgcccaaccacaccggtttcctcttttcacggtttgaaactctccaaaagtagcagcaaatcatccaagcaaacctgctcaatatgcttaaccaaaatgaagcaaggatctggccatgctatattcactgcagaatgttcacattcattccatttccagtgcattgcttcaaatgtgaaacatggaaaccaaatatgtccagtgtgcagagcaaagtggaaagaaatacccttgtcaggtcccagtttggatcctatccagggaagagtttcacctagtccagtaaattggccccaaaatgatgctttgatggcagtggtccaccgtgtgcctctacctctacctcatcctcaccgagatttgaataggaggcatgttgtgccactttatcaggcttctgagccaggcatatttgacgatgatgaatccttaaatcatcaacatgcattttctgagagaagcacttgtaataagagtactgaagatactgatgctgctagagcaatggagattaaaacgttcccggaagtatctgctgctccaggatccaagacttattctaacttcacggttttggttcatctcaaagctactgctgccgccgcagcagctgcagcaaaaagacaaaaccttagtagaaaccagactaacttggcgcagatttctcagactccacgtgcccctgtcgacttggtcacagtgcttgatgtcagtggtagcatggctggaactaagcttgcactactaaaaagagctatgggatttgtcatacagaacctaggttctaatgaccggctctctgttattgctttttcttccacagctcgccgcctctttcccttgtgcagaatgactgattctgggcggcagaaggcattacaagctgttaattctttggttgcaaatggtggtaccaatatcgcggaagggctgagaaaatgtgccaagataatggaagatcgaaaggaaaagaatccagttgccagtattatactgttgtccgatggtcaagataattacactgtcaatggctctggaaccagccaaccccaaccaaattaccagtttcttctgcccacttctatcagtggtggtgataattcaggatttcaaattcctgtgcatgcttttggattcggtgccgatcatgatgcttcactaatgcactcaatttcagagacttctggtggcacattttctttcattgagactgaagctgtattacaggatgcgtttgcacaatgcattggaggacttctgagtgttgttgttcaggagctgcaagtgggaattgagtgcacacacccaaatctcaatcttgtctcactcaaagcaggaagttaccctagccatttgatggccgatggatgcaaaggattgattgatgttggagacctgtatgctgatgaagagagggattttctagtttcagttaatgtcccagctacatccggtaatgaaacatcattgataaaggtcaaaaatgtgtacagggatccctgtacacaggaaacagcaacattggaaagtgagggagttaagattgagcggactgaaaatgtggggcaggttgtaatgtcacttgaagtggatagacagcgcagcaggctccaagcggctgaggcaatggcccaggcaagcagtgcagctgaacagggagacctaagcagagcagtacttatccttgagaactgtagaaagatgctttcagagactgtttcggccaaatctcacgaccgcctttgtgttgcattggatctgaactcaaggaaatgcaagagcggatggcaagtaggcatgtgtatgaagcatctgggagagcatatattctttctggattgagttcacactcatggcaaagagcaacagcaagaggtgattccactgataggtcaagtcttgttcaggcatatcaaacaccatcgatggctgagatgcttactcgatctcaggccatgttactaggtagtccatcagggcagaggcttctccagccactggtgtcatacagaccacaaccaagcccaaggtgatccaacagagattttgtgaaaaccatctaaaaattaagcccttccactgatttgcctttttggcttataaaatatgtgggggagggtggtagtaaacgggagtcataaacagaagatttctttgagctttgattttgttgtttaatgtgtaaaaatgaataagaagtcgaggaaagggtggagggttacttaaaaccaatggagggcagtagataggaatttaccacattatgtttcttctattttgtggggtttaaggtttttcttttggcttcacttttctttcctctaattatgccgtttttttgggggggtggtgtacatacagaagaatgcctttgttttttttctgggacacctgggtataaagtttgtagctgcgcaaatgattggttgggattatctcatcagtaatatatatatgttttcaattaagaaaaa

SEQ ID NO: 29419 - DNA, 1151 bp, Glycine max
  Clone ID: TF_GmC166190_2
tttctccttcactttctccatccatttttagcgttcagtgctcttgatgcttctgctgtccttccagatcttgcacatcattcagttcttctgcttcttcttcactcagatttctgaggggtgttcctcatgtcacggaagtaaaggcaaaaggaggtttctcttcttacctatatgaacttttggtgtcgaatttggctggcgtctaaatcattgaagagtgtattggctgatcgcggagaaggaagtggttttgaaactttgctctgataagaaacgtccggaagttgaacccgtaaatgggagcagcaatatggttggcaaggaaatattgccacaagatgcacgtcttgtgcagttccatccattgaggcccttttattctggcgaaatagtggcttggcggtctcaacatggtgaaaaactgaaatacggtaaggtttctgaagatgtaagaccatctgcaggtcaagctctgtacagacttaaaattgaagtttccccgggggatacacaaagtttcctttcatcacatgtattttcatttaaaagtgtatcagcaagcagtcccctaaaagaatcattggtgcatgaaagccctgtattaggcagtaacaggccccatgttgatttcccagagagctcaggaaggggagaaagctactctcaggtgcagcctgtgagagatcagtctggcaaagtttcagctgcagaactggtgcaggctgtcaatgaaatcctctctgctgctgggatcaaaatggacgtggaaaagcaggctctacttcaaagaacagtaaatttgcaagaaaatctgaaagagtctcaggcagctcttgtgttggagcaggaaagggttcaaaaggctacaaaagaggctgatacagcaaaagcagcatggatttgtcgggtttgtctgagttctgaagttgatataacaatagttccttgtggtcatgtattgtgtcgtagatgttcttctgcagtgtcaaggtgtcccttttgtcggcttcaggttacaaaagctatcagaatttttcgtccataatatctccaatgcttttatgatcattttatttggacattctcagttccattcgccaatataggctaactgaagttggcaaatattaattggctacattgaattc

SEQ ID NO: 29420 - DNA, 799 bp, Glycine max
  Clone ID: TF_GmC2979_142
cttactcctaaccttcttcctctctctatatactgaacaaaaacaaaaagagagttcagaatttttagatctcacctatttaactacctcgtaacattctcttctgtgtcctaatcggaactcgcaaagattttgttatagtgatctgatgccatcttagggtttttgaattgcgatgggtctgggaaacgatgacgatgacggagacacgctcaagtccttcggttcagtgtgttgttcgatttgcctcgaggctgttaccgataacggtgatcgatcctgggccaagcttcaatgcggacatcaatttcatctcgattgcattggctcagccttcaatataaagggggcaatgcagtgccccaattgtcgtaaggttgaaaaaggtcagtggctttatgctaatggttgtcgatcatatccagaatttagcatggatgaatggacacatgatgaggatctatatgatcttagctactctgaaatgtcctttggagttcactggtgcccttttggtaacttgacccgacttccttcatctttcgaggaaggggatttttcttcaactgcgtatcatgatgtactgggacaacatgctatatttgctgaacatacggctgtatcatctgctagtcatccttgcccatatattgcctactttggaccaatacatccctccaccttcaattctggtggaactgtttccgaagcttctaatttcaaccactggaatggtccacctgtacctggtgacatgccaacctcctacacatttcctgcagtggatcttcaattatac

SEQ ID NO: 29421 - DNA, 2112 bp, Glycine max
  Clone ID: TF_GmC2979_186
ccggccgggctcgggaaaaaagtaagaaaaacaagagaaagaatttttgctttgctaccatcccaatctcaatctcattcattcctccaactccaaaccttcttcccctctctctctctctctctactgaacaaaaagaaaaagtgagagttcagaatttttaaatctcacctatttaactacctcgcataaaaattcacgtaacattctcttctgtgtcctaatcggaactcgcacaaattttgttatagtgatgtgatgtcattttagggtttttgaattgcgatgggtctgggaaacgatgacgatgacggagacacgcacaagtccttcggttcagtgccttgttcgatttgcctcgaggctgttaccgataacggtgatcgatcctgggccaagcttcaatgcggacatcaatttcatctcgattgcattggctcagccttcaatataaagggggcaatgcagtgccccaattgtcgtaagattgaaaaaggtcagtggctttatgctaatggttgccgatcatatccagaatttagcatggatgaatggacacatgatgaggatctatatgatgttagctactctgaaatgtcctttggagttcactggtgcccttttggtaacttgacccggcttccttcatctttcgaggaaggggatttttcttcaattgcatatcatgatgtgctgggacaacatgctatatttgcagaacatacagctgtatcatctgctagtcatccttgcccgtatattgcctactttggaccaatacatccctccacctccaattctggcttaactgtttccgaagcttctaatttcaaccactggaatggtccacctgtacctggtgacatgccaacctcctacacatttcctgcagtggatcttcattatcacagttgggaacacaattcctctcatttctcttctgccaacagccgtctaggcacctcagaacagacctcggtatcacctggtagtcaaaggcctgcccggggtggttcagatgtccctagatccgggtcttttatgcatcccttccttgttggtcacagttctgctgctagggctggaaactctgttgcatcttcaatgatccctccttatccaggcagcaatgctcgggcccgtgatagagtccaagctcttcaagcatattatcaacctcagcaacctcataattctaccacaatacggacacctgttgcttctagcactcgaagatccagtagtcatagtgggcctgttcaattagcaccagtggcctcgccaccagaccaaagtgctggcttcgtatatattccatcaggttcttcaggacgcaattttcaggaagaaacccatttgccaagtcgattccatgcttgggaaagagagcacttgccttcattggcgttaaacaatgttggtagagaatcaagttggagagcataccaccagactgccagtgtgtcagacccaagtatcagatccagcagctttcgattaagacacgaatccgacagaatgccttcacaaaatcggtgatatacttgtttttatgtcaaactacagttattgtggaaaatcaaaatttatgtatgattgagaaacgttacataatgcttttagcctggctggcgtgttatgacagactttatactctggctggccttggaattcatctttctggcagccgtgtggcagtgtgatggacattggtctcctctagtttctttgccttggagggcataaaataagatcgtatctagttgggaaaatcaggtttgggaagaaatactggtgcattgtcatctcaagtgataaattagtggatgagagcatttgtggttgttggatttattgtagtgggtaaattatttactttgatatcgatgctcatgcaaatgctgtgtatcgagaatatgcttaatcttaccactgctcagtggcaatgtgattatagactactattattgtgcaagagctgaccccagtgattctaaacttgcttagtttaggataatttcaaggctgatttaacgaaataatctttaatttttttattcgtaggaattattcacgatattacaagatttataatatatcatagttagttat

SEQ ID NO: 29422 - DNA, 1891 bp, Glycine max
  Clone ID: TF_GmC9820_1
atgaattcccgggtattgtgcgtaagtgcgagagagagaggtggtggaaagctggttaaacattcgcaatcccgacacaccgccaaaaaaccctcgtacccggtttcgatttccaatgggttgcacctgacctaggtttccacctttctcttccttcatatctttgtcccttcttcccattcctcttctcttctcactcccaacaattcctcaattctccctccatcacacgccatgtccaacagggtttgcaagttctatgcccgtggagcatgtttgaagggggatcaatgtgattttgctcatgagaaaaaggatgatatttgcagctattataaaaaaggatcctgtgcttatggtagtagatgcagatataagcatgtcaaagcttctcaagcgtcatcttcagcaaatggacgccattctcctgttttggatcctgttgtgaatcataccattaaaggaacatcaagttgggttccaaaggctgtgaagtcatcttcatcggacaagcgtgcaaggagctcacaacaaaagaatctgccctctcttgaaaatgatgttggtcaatccagtactagtagtgttataccatctgaacatttgttctgtgcatttgctgctgccaactgcccccttgaagataaatgttctcgcattcatggaaatcagtgcttatactgtagaaaattttgcttacatcctactgatcgaaaggaaaaagaaaaccatttgagaacttgtgagaaaaaggaaaaataccttcaggctttgaaagatagtcaagaagtagagtgcaatgtttgtttggaacgtgttctgtccaaacctaaaccagctgattgtaggtttggtctgcttcctgaatgtgaccatgctttctgtttatcctgtatccgcaattggcgtaatagtgccccaacctctggaatggacatcagtaatgctggcactgctaatacagtcagaacctgtcctgtttgtcgcaaactatcatattttgtcattccaagtggtatttggtattctactaaggaagaaaagcaggaaattattgacaactacaaggcaaactgcaaactaattgattgcaagcattttaactttggaaatgggaattgtccatttggggctagttgcttctacaagcatacagtgaagcccggctcttacacatggatacatcacaggccaccacctcaacgtagacagaaccattttgatgtgcatgacatgttgaacatgctccaggatgttgacttaacaagtgcagaatatttttccatcatgagggactcggacctttatgatgatatggatccattcgagatgatggtatctgataggcttgctggtgattcaggtccttgtttaggtccttttgattctgatgaggaggacttggatatttttcagatggctgcattgtcagaagtgctggcttctggtgtggatgattttggtcccgaagatttcggtgatgaagatttcaatcctatggaggctgccttgttatcaatgatgatgcattctaatatggaagatgaagatgacgacgatgatgaagaagaatacagtgatgaagactactagatttacttagttcatataaaacccatctatagaccagttgttgaggtagttatctttggcagtatggtatcctatcactttgctttgaaaagtattgggggcaggaacttcaagatttattctcgtttattttgcttatactcatgcctatacctggtatttgtgatcatatgccattttgtatattttctaatatcacgctattgaaggagttttggcttgagggttttgcttagtcttgtctcactgaattgcatgttttgaattgtgattgcgctatgtataaatatggcttgtt

SEQ ID NO: 29423 - DNA, 883 bp, Glycine max
  unsure (1)..(883): unsure at all n locations
  Clone ID: TF_GmC181123_1
ttnaccggtggaggcgggttaagtaccccctcagtaaggacttctgtacagaaaaattgtttttataaaaccccttgtaagtacaaattatggggagaccttctccacggtccgacaatatatacataccccatcgtaaaattaagaatttgtactaaaagatgtaagagctttatggaaactaatcctaagactagaacccagtaaaagctgaaggggtggagcatttccttttcttttctacttattactagtcagcagagtatcaaatcagggtcaagcttgttttgagcgataatgcacctcaccgttgtccaatctttatctcaaaaaggtcaaaccaatgtatcacctctaaggatattaaatttgcacagcgggcaagtagcttttgtccgaagccaacggctgatgcatccacaatgaaaatggtgtgtacagggaaggcgatacagttcttctccttcaacatatggacacagacagatacagcattcagaatcatctggatggagagaaagctcactcatatggcttccattgcatgaatctactcttactttaacaagttgcttcttgttgtcatcaaccatcaccaatgaatttgacaggctaaacctatacataggaagtgacctgatatcttcttctgatgcaccttctctgattctcatagcataagctaatgctattattgggatgatgcagaagagagcaatgaaaactatacatgccatccccatgcaaaagataataaaaaatacgtcaaaggctagaaagaccactgttaacccaatctttcacatgatctgtctctttttgaacccatacacaacaaggaaccacctgtaagctccccaaaatagaccaggggtctaaacac

SEQ ID NO: 29424 - DNA, 1072 bp, Glycine max
  Clone ID: TF_GmC225551_1
ccacgcgtccgcaaacagaaacacacaacactcggtttcggttcatgctcgaagaggtcctctcgattcagatcatccacaacacatcacaacagaaacttcctctggcaaatctaccataacccacgtcaaatcctcacgaatctcaccgacccattccctattatcatccatctccaccgatcgctaccattaccaacagcagcttcatccattctccacgcacgcttcttccttttctttctcacaccgcgcgttcgtgttcttaatgcagaccctgattgcaacgaaatggacgtaaatttgggaggtgcaggcgcggtgacagcatagcatagcatgcagcagcagcagcagggagtgagcgtgcgaggagggaaggaggagcagcagcatgtcaaatcaggtggtgaaagtgcgaagggacacgattgcagcatgcatgacttgcccactctgcggcaagctcttcagagaagccacaaccatatccgaatgtctccacacgttttgcaggaagtgcatttatgataaaattacggatgaggagatagaatgttgtccaatatgcaacattgatttggggtgtgttccactcgagaaactgaggccagaccacagtttgcaagatgtaagggccaaagttttccccttaaaggggagaaaggtgaaggcacctgaagttgtcacctcagtaccattaccagctaggagaaaggagagatctctttcatcttttgtggtcagcactccaagggtatctacacaagcagctatgacaggaagaagaacaaaacctacaagaaaggctagtggtctgcgatccactagtttttccattgaaaagcccattaaaaaagaggaagatttgctggaagatcgtcctgatagttcaagttcgcctgacacttcatataagtttgctcagaattctggacagagtatctctccttgtgagggtagtcaatccataccatataaaggatcagagaatggtgccgaaccatgggatgcaaaattggatctttggaaaccttagaatttcttaatagaagttgcaagtaggagtaaa

SEQ ID NO: 29425 - DNA, 2622 bp, Glycine max
  Clone ID: TF_GmC842_1
cggtccggattcccgggtcgacccacgcgtccgctctctctcttcattcttcgttaccatacataacaaactctctgcattctcacttattatttctctcttctattcgtctttcaatgctcagagctattcaaattcaaacttttctttgctccgtcaccgtgtcttcccattactgcttcaagatctgtctttcgccaaccaaatcaaatgggaagcaaatggagaaaagtgaagctcgctattgggatcaacatgtgcgttcaagtccctaaaaccgtcgaacattcctcttcctctatcagctccgccacccccttctccgaccgcctttcgccgtccggcgatgcctccggccactgctccgtctcttcgataacctcctccgcctccgggctccgcctctccagatccaaatccaactgctccaaggggacatgtgcaatttgcctgaactcaatgaaagcagggcaggggcatgccatttttactgcagagtgttctcactctttccattttcaatgcattacatctaatgtaaaacacgggaaccggatttgccccgtctgcagagcaaaatggaaagaggttccttttcagagtcgttcttctaaggtctcccatggcatcaaccgagtaaattcaccgcgaaatgattcctggacaactctactagggagggttcctacccaacaagctagtacagctccacaacttgcatctcctaataatgttgctgaaccagctatctatgatgatgatgatgaagtcttggatcaacaaacttcagttaccgaagatatggatgaagctgttcacaatctagtaaacacaatggagatcagaacatatcctgaagtttcagcaattgcaaagtcagcctctcatgataacttcgctgtattgattcatctcaaagctccccctcattcagggagactcagtaacaacactgaatcatcagctcaaaattctcgtgctccaatcgatcttgtcacggttcttgatgtgagtggcagcatgtcaggcacaaagattgcactactgaaacgagctatgggttttgtcatacagaatctgagttcatcagaccggctttctgtcattaccttctcttgcacagcccgccgcatctttcctcttcggaggatgactgatgctggaaaacaggaggcactgcaggctgttaattctttggttccaaatggtgttacaaacattgttgaaggcttgaggaaaggtgccaaagtgtttgttgaccgcaagtggaagaacccagttggcagtatcatattactatctgatggacaggattcatccataaacagtagcagaatcaatgttgtaaatgattaccggtcacttgtcccgtgctccattcatcggaacaatggaatgggtctgcatataccagtgcatgcatttggctttggtgttgatcatgatgctactgccatgcactcaatctctgagatatctgggggtactttttccttcattgaagatgaggatgtgattcaggatgcatttgcacagtgtattgggggactattgagtgtggtggttcagcaattacacgtagaagttcagtgtgttcaccgttgtctgcaacttggttcggtaaaagcaggaagttaccaaactagcttgattgacagtggaaaaatggcatctatcaaggtaggagatctgtatgctgaagaagaaaaagactttttggtgacagtcaatgttccggtggataagtctagtgatgagatgtcgttgatgattgttagaggtatttatagggaccccatcacaaaagaaatggtggggttgggagtaaatagtgaagtaaagattcaaagacctaatgtagctagagatgtagttatgtcaatagaagtagacaagcagagaaacaggcttcgagctactgaggcaatggccgaggctagagttaaggctgaacgtggtgatttgtctgctgcagtttctgttctagaaagatgtcagcaggcattgtctgaaactatctctgccaaagctggtgatgaactatgcatctctcttgctgctgaaatgaaggagatgcaggacaggatggtgaaccaacgtgtttatgagcagtctggaagggcttatgttctctcaggattgtgtgctcattcatggcaaagggcaactgcacgaggagattctacagacagcactagttttgtgaatgcatacagaaccccttccatggtagacatggtttcacgttcccaaaccatgcttttgaggcctccacaatctgcaaatgccgtcaaacctgctagatcctattctgaccggcagcgaagaaaatagtaatgcaaactgtttgaaaatttctcctcagaaaagtctaatgcatacacttttctgtggagacctttaagtttcttttcttttacttatctttcccttatggttttagaaagatgggggggtataatggaaagtggtaaggaatgagttctaagtgtctttcgttgaattgtacgtcttctggagaagagagtataaagtaacgtagtagtggagatatttgagagaatttcttcattgaattacatccatggtatattctacatacttctgattcttttaaaaccc

SEQ ID NO: 29426 - DNA, 2280 bp, Glycine max
  Clone ID: TF_GmC504_1
aattcggctcgagggggacctgtgcaatatgcctttacacaatgaaaccagggcagggacatgccatttttactgcagaatgttctcactctttccatttccattgcatcacttctaatgtgaaacatgggaaccagatttgccctgtctgcagagcaaaatggaaagaagttccttttcagagtcctgcttcaaatatgccctatgatcgactcaaccaagtatctcctcgggaagaaggctgggcgactgtcttacggaggcttccttctcctcaaggtgacgctgctcggcagatttcatcactttatcatgtcactgagccagctatttttgatgatgatgaagccctggatcaacaaacttcagttacccatcctaaaaacgagattgataatgatgtaataaatacagtggagatcaaaacatatcccgaggtttcatccgttccaaaatctgcctctcgtgatgcctttgctgtattaattcatctcaaagctcctcattcagggagaaaacaaaatattgatgcaaacagtactgaatcatcacctctggttgaaaactctcgtgcctcagttgaccttgttacagttcttgatgtgagtggtagcatggctggtactaagctagcgttgctaaaacgagctatgggttttgtcattcagaatcttggtccatcagaccggctgtctgtcattgccttctcctccacagcacgccgcatctttcctctccggcagatgactgacactggacggcagcaggcattacaggctgtcaattccttggtttcaaatggtgggacaaacattgctgaaggcctgagaaaaggcaccaaggttttttctgacagacggtggaagaactcggttagcagcatcattttactctctgacgggcaggatacatatacagtcaatagcaggcctaatgtcggaacagattacctgtcacttgttccaaactccattcatcgtaataacggtacgggcatgcagataccagtgcatgcatttggctttggctctgaccatgatgctactttgatgcattcaatatctgagatatctgggggtacgttttctttcattgaagctgaggatgtcattcaggatgcatttgcacagtgtattgggggactcttgagtgtggtggtgcaagaattacaagtacaagttaggtgtgttcaccctcaattgcaacttagttcagtaaaagcaggaagttaccaaacaagcttgatggggaatgcaagactggctactatcagtgtaggagatttgtatgctgaagaggaaagagactttttggtgacagttaatgttccagttgatcaatcgagtgatgagacgtcgttgttgaccgtgagatgtctttaccgagatcctataacaaaagaaatggtggctggctcgagaaacagtgaagtaagaattctgagatctgatgtcggtggaggagaactggttgtgtcaatagaggtagatagacagcgaaacaggctgagagcagctgaggcaatggcggaggctagagttgcagccgaacgcggtgatttgtctactgcagtttcagtcctggatagctgtcacacggcattgtctgaaactgtttctgctaaagccggggatcggttatgtgttgctctttctgcagagttaaaggagatgcaagagaggatggcaaaccaacgcgtgtatgagcagtctggaagagcttatgttctgtcaggattgagttcacattcatggcaaagggcaacagcacgcggcgattccacagacagcaccagccttgtgcaagcataccaaacaccttccatggttgacatggtgacacgttcccaaactatggtttttggagcgccggtgccgcaaaataaacgtgtcctcaggcctgctaaatcatttccggagaggcagagaagacaataaaaatgagtttggaaaattctacttggcctatacatatacttgtggggaaaccttcaagtttcttatcttattttacccttttgtttttggtttttgtcaaggtggggtataatggaaaggaaggaattttaggaggacaaaattcctgattttgccaaaaatataaaaagtgtaaatgggctggtgcagagaatgaatggcgaaaaggaacaggttgaatatttcagtgtgattctgagtgatgtacataacctattgttttcgcttgaattgtgcgggtgaatttcatcatcgcttgattatatacatatggtataatatatttgcttctgattcttttcat

SEQ ID NO: 29427 - DNA, 895 bp, Glycine max
  Clone ID: TF_GmC504_2
aattcggctcgagaaaaaagccaaactatctttctctttccatctctctctctttctctctcattgattacagccaccgttttctctttcttccaacttgctttggttcctctcctcaactaaagcctattcccttcttctcacccatgtccatttgtagcatgttttctcttgagcacttcaaagttcaaatctttcacacacactcattcatctccaacctccacacccacttgggtcacttctagaagatctatctgccaacccttttggctgaaaaaagaaaaaagaaagaaagaaaataatgggaagcaaatggaggaaattgaagctggctcttggtttggattcctgtgttcacattcccagagcctttgatgattcctccgccgccgcagcaaggttttccggcggcatctcacccaccgtcgtttcgccggccggtgacacctccggctaccgtccctccactcccacaccatcgtcttccggcctctggttacccaaatcgggaaccaaatcccctaaggggacctgtgcaatatgcctttatacaatgaaaccagggcagggccatgccatttttactgcagaatgttctcactctttccatttccattgcatcacttctaatgtgaaacatgggaaccagatttgtcctgtctgcagagcaaaatggaaagaagttccttttcagaatcctgcttcaaatatgccccatgatcaactcaaccaagtttctccccgagaagaaggctggacgactgtcttacggaggcttccttctcctcaagtgatgctactcggcagattcatcactttatcatgttaccgagccagctatttttgatgatgatgaagccctggatcaacaaacttcagttgcccatccaaa

SEQ ID NO: 29428 - DNA, 2231 bp, Glycine max
  Clone ID: TF_GmC23859_1
cgattcggctcgagcgatccttttcccataaagattgctgaaaatgcccttctgtctttcttacttctccttaagcactgtaaacttcaacaagatgaagagagagataatttgaatacatttaaatcagaaaaattggattctgttaaagatcggattctagagggtgtccttcgcctactattttgtactggtgtatctgaggctattgcaagtgcatgctacaaagaagctgcctcagttattgcatcatcacgggttgaatatacacacttctgggatttggtagcttctggagttgttaattcttcatcacaagctagagataaagcagtgaaatcagttgaattttggggactaaggaaagggtctattagctctttgtatgctatactttttacttccaagccaattccttcattgcagtttgcagcatattttgttctttcaaatgagcctgttttaagcattgctgtccttgaagataatgcttgtaactcaaacatatatgctgctagtgaagaggatatcagccgtcttgacttgccaatagaagaaaaagtccatctgaaagaggaaatatctttcatggtagaaagggcaccttatgaggttcttgatatggacttgcttgcagaccaacgagtaaatctcttccttgcatggtctttgttgatatcacatctacagtcattaccttcatcatcatctcaaagggagagactgatccagtacatacaagactctgctactccagttattttggattgcctttttcagcatattcctgtagagatttccacagttcagagtctaaagaaaaaagatgcagagctttctggtggcttatcagaagcttcaagtgctgcaacccgtgccaccacaactggttcactcttgttttctgtggaatctctttggcctgttgaattggggaaaatttcatctcttgctggagcaatatatggtttgatgctccaggttcttccagcctatgtacgtggctgggttagtgacttgcgtgatcgtaacacttcagctgttattgaatcctttacaaggacttgttgcagccctcctctcattgcaaatgaattgtctcagattaagaaatctgactttcgtgatgagaatttctcagttagtgtaagcaaatcagcaaatgagattgttgctacttataccaaggatgaaacgggaatggatctagtcattcgtctccctgcatcttatccactaaggcctgtagatgttgattgtacaaggagccttgggattagtgagaccaagcaacggaaatggttgatgtcaatgatgctatttgttcgtaatcagaatggagctttagcagaagctataggaatttggaagcgcaattttgataaagaatttgaaggtgttgaggagtgcccaatctgttacagtgtaatccacaccacaaaccacggtcttcctcggcttgcttgcaagacatgcaaacataaatttcattctgcttgcctttataaatggttttcaacttctcacaaatcatcctgcccattgtgtcaatctccattctaaggatacacctggagtgatgaattttaccaattttgcttgctggtgatatcttgaactgaaagtagtggatgaagagaacgtctcgacgtatgagaatcaacgctaatctccagcattgagaatcaatgctgattaaggcagggatgacttacaaactacaactggttaacgaaacaaacatgatttccagattcttttctccactaagattcattttaagcatatagctttcaactccttgaaattgaagaggaaggtgaacaatggttttgcggtaacaacatgggtgtatcatattttcctctcttgagaggtggatccgattcctttagcttgacaaatttatcctctctaattagatttttttccccatggttgtcataattattgttttgcagtgtttttgttctgttaagaggttagttcttatcaaaggaggttatcagaatcagagtggcttgtacatctagattatttatattggccatggaatcactcgagctaaggagcatgatttgcctaagtaagagtaattgttcatctagaaactatatctttattagccatgagaacattaaagagcagtatgctccacgaaatgcgtactatgcgttgtccacacaaatgatttttggtcagcaaaatttactaatcgaccattgatttgc

SEQ ID NO: 29429 - DNA, 2265 bp, Glycine max
  Clone ID: TF_GmC61_1
gttgggtttgttagtagtgtatgtatggcgtgtgtattgctttgcttctctttctctaagtctttgttcacgctctcttcttttctttgtcttggtctaatacataacaacacacaaacccaacaagaacaacattgaacggtgccggcttcatctttacgtaatttttgcggcaacaatcgaatcccatcttgcgatttcgcctcctcaaaccccgcgagttaaattccctccccagatccatattgcttcgacgtcgaatcggtgtggtacggtgtgttttattcattagacaagattggaatgcaagtttaattgattaatactaataatcaatcatcgtagcgagatggtgtcgccgagccaggtggtgaaagtaaagagaaatacgctacgaccatgcatgacatgccctctctgccacaagttcttcaaagatgccaccaccatctctctctgccttcacaccttttgcaggaagtgcatatatgagaaactctcggatgaggagatggattgctgtcctgtgtgccatattgacttaggctgccttccggtggagaaactcaggccggaccataatttgcatgatataagggcaaaaatattcccttttaaaagaaaaaagatcaaagcccaagaagttttgtcttcaatatcattgcctgcaaaaaggaaggaaagatcactttcatcattggtagtcagtgctcccaaagtttcaatgcagcctggctttacaggaaagagaacaaaaagcagtacaagaaaggctgctgctttacgtggatgcagttttcttctcgacgaatcaataaagaaggaacaaacaaatggtgatgataatatggattctcccatgcctgagcattctaagaagcataagccccatgaagatacagagaacagtgtgcaacatacagaagggaaggttgatctttggacaccactgaactgtcttgttgaagctgccaacagaacaaagtcctccaggtcaaattcacaagcaactcctcttgccaaattagagtccccaactactcctcatggtggacaggatgcatctgaaactacaaccaaaacagacctacctgcttctgcccagagtgaattaaacattccaaaatccaaaaataaggatactggacttaaaccaatatttggagatgacaaggatgcaaacagcttgcctttaggaccagtgaagcgaagaagattgcgtcctgctggtcagaaaagggttgcagcatctgagatgtctgcctcatccccagccccactcgatgcaacagggggcaagtgcaacagaaaaaacagtcctatttggttttcattagttgcttcagaggaccagaaaggagattttcccttgccacagatctcagcatgttacttacgaataaaggatggtactgtgcctgtctcatttattcaaaagtaccttatgaagaaacttaatcttgccagtgaagcagaggaagtcaagcaacatattgcaagccttgtggacattgtctgggggctgaggctatcttgagaaattagtacaactttgtatgcttctacataatatattacaaatgcacaactacgaacaactgggtagaagagaaatagagtctccactggcatgatcccatgcacccacatgattagctatgtaatgaaaatgaaaatattggaaacaaaattctcgtgttgaagttttaacaagtcaccaagtaggcactcggtgctgaaataacattgaaggtggaaataatgtgccgaggtctgccagtgctcccatctttacaactgcataatttagtagatctatggttccggacagcatcaacctcaaaaaagataccagcatcagtggggtcctcagccaaagattttgtaatggttttatcatattgtcgaaaggccttgcctccttgacaaagtttcctattctatctatatatcattttccctccgctactttacatacatacacaatcaactgttttgatagcattctcaccgatattactgcttagagatttgttcatttagtagcatgcgaggaatctatgattttgttttgctcatgactgaatatgtgcagccagcaattttcagttttcttctgcttcatttgctgctgttctttggatcatgattactatttccttttgatccaatgatgcctttccccttagtaagaatcaaaatgagtggttataaatcaggaagtactctaccaaaatttctctaatccaagatgcaatcattttc

SEQ ID NO: 29430 - DNA, 1739 bp, Glycine max
  Clone ID: TF_LIB3109-041-F10_FLI
gacgtcgaatcggtgtggtacggtgtgttttattcattagacaagattggaatgcaagtttaattgattaatactaataatcaatcatcgtagcgagatggtgtcgccgagccaggtggtgaaagtaaagagaaatacgctacgaccatgcatgacatgccctctctgccacaagttcttcaaagatgccaccaccatctctctctgccttcacaccttttgcaggaagtgcatatatgagaaactctcggatgaggagatggattgctgtcctgtgtgccatattgacttaggctgccttccggtggagaaactcaggccggaccataatttgcatgatataagggcaaaaatattcccttttaaaagaaaaaagatcaaagcccaagaagttttgtcttcaatatcattgcctgcaaaaaggaaggaaagatcactttcatcattggtagtcagtgctcccaaagtttcaatgcagcctggctttacaggaaagagaacaaaaaacagtacacgaaaggctgctgctttacgtggatgcagttttcttctcgacgaatcaataaagaaggaacaaacaaatggtgatgataatatggattctcccatgcctgagcattctaagaagcataagccccatgaagatacagagaacagtgtgcaacatacagaagggaaggttgatctttggacaccactgaactgtcttgttgaagctgccaacagaacaaagtcctccaggtcaaattcacaagcaactcctcttgccaaattagagtccccaactactcctcatggtggacaggatgcatctgaaactacaaccaaaacagacctacctgcttctgcccagagtgaattaaacattccaaaatccaaaaataaggatactggacttaaaccaatatttggagatgacaaggatgcaaacagcttgcctttaggaccagtgaagcgaagaagattgcgtcctgctggtcagaaaagggttgcagcatctgagatgtctgcctcatccccagccccactcgatgcaacagggggcaagtgcaacagaaaaaacagtcctatttggttttcattagttgcttcagaggaccagaaaggagattttcccttgccacagatctcagcatgttacttacgaataaaggatggtactgtgcctgtctcatttattcaaaagtaccttatgaagaaacttaatcttgccagtgaagcagaggtggaaataatgtgccgaggtcagccagtgctcccatctttacaactgcataatttagtagatctatggttcccggacagcatcaacctcaaaaaagataccagcatcagtggggtcctcagccaaagattttgtaatggttttatcatattgtcgaaaggccttgcctccttgacaaagtttcctattctatctatatatcattttccctccgctactttacatacatacacaatcaactgttttgatagcattctcaccgatattactgcttagagatttgttcatttagtagcatgcgaggaatctatgattttgttttgctcatgactgaatatgtgcagccagcaattttcagttttcttctgcttcatttgctgctgttctttggatcatgattactatttccttttgatccaatgatgcctttccccttagtaagaatcaaaatgagtggttataaatcaggaagtactctaccaaaatttctctaatccaagatgcaatcattttc

SEQ ID NO: 29431 - DNA, 1594 bp, Glycine max
  Clone ID: TF_GmC5904_1
ctcacgcgtccggtggtaagaccgacatccgacttctcctccggcatttgctatgagaatgaatgaatgaatgatacaaactaagcgacgactgacgtggtggattgtggaaacgcaaagagcaattgttccgagaatgagcaattaatgaatgaatgatcactgtcgcctcaggcgccgtccttaccctcttttatttctcagccagctctctctttcctccgtgcgcttttcggctcgccctccgtctccgcctccgtccgcccctccctccaaatcgaccgaccccccgacggcgctccgggcgctaccgcaattccctgctgcaccgtcgacgccaagtcggccgtcgatggcacctggaaaaccctgagaccaggtgtattggtttctcgcgagtccggcgataaaggtgttattcttcaaagaactcaaacgtgtatatacaatgactggaaaggcttattgggatggacttctgatcttcgagccatatgtgcaagatcttggagacagcaagagtctacatctttaaggaaggtgccttttcttctaactgatgttggacggcggccaaatgctgagtatgttgttgtaaacatggatggctcaagacatcctttacctttgacaacagtctatcataaattgcaaccaataactgcttctccttatacttttttgcaagcactttttgggcatgaatatccggttggactactagatgaagagaaaattcttccattggggaaggatatcactgctgttggcctttgcagtttaaaaaatggaattgctgaaattaagtcgtgcaaatatctaccatattttctgtctgacttgagtaaagatcagatgatagtggatctttccatcaagacaaaaatactgttttggggtggtattgctcttggttcaatgtcagttggggtacttggctatgcagttttgaggaactggattaagtggaaacggtggaaggtacagaggcagctccagcaacaaaggcaagcggtgagtgatgctgaacctcaggtggatgatgagattgaagatgttccagatggacaattatgtgtgatatgtctgatgaggagaaggcgttctgtcttcattccctgtgggcatcttgtgtgttgccaagggtgtgccatatcagttgaacgtgaagttgcacccaaatgtcctgtttgtcgtcaggagattcgagattcagtgcggacttatgaatcttgaacagacacagactgatttttctgttcactctgcggcaggaaacttttatgactgctattgagaagagtgtttgttttttactatttctataagatctggaatatggagttttagggaaaacttgcctctgctcttgtttcctgtgaacttattactttatctggtgtagatatttgaacttggtttagataggttggtcgaggttaattcgtagtctcctcacttctcactctgcaaggtcttttggggaaccttgtaggattttccaattatcccagttgctgtgtacataaacatttaattttgcctaacacctatagaatgaacactgatatgttcttgtgcagttgtgcaagtc

SEQ ID NO: 29432 - DNA, 804 bp, Glycine max
  unsure (1)..(804): unsure at all n locations
  Clone ID: TF_GmC5904_3
agtttaaaaaaggaatgcttgaaattaagtcgtgcaaatatctaccatattttctgtctgncttgagtaaagatcagatgataatggtctttccatcaaaacaaaaatactgtttggggtggtattgctcttggttcaatgtcagttggggtccttggctatgcagttgtgaggaactggaataagtggaaacagtggaagcaacagaggcagctccagcaacaaaggcaagcggtgagtgatgttgaacctcagatggatgatgagattgaagatgctccagatggacaattatgtgttatatgtctaatgaggagaaggcgttctgtcttcattccctgtgggcatcttgtgtgttgccaagggtgtgccatatcagttgaacgtgaagtggcacccaaatgtcccgtttgtcgtcaggagatccgagattcagtgcggatttatgaatcttgaacagacaggctgattgttctgttctctctgcggcagaatcttttatgctttgctaatgagaagaatgttgtttgctttttatttcgataagatatggaatgtggagttgtagggaaaacttgcctttgctcttatttcctgtgaacattcatctggggtagataataggttgtcgaggttaattcgaagcctcctcacttctcactctgccaggtcttttggggaaccttatacgcttataggatttccagttatcccatttagtgtacataaatatttaatattgcaaaagtcctatagaatgaactctggtatgttattgtgcatgtgatgttacttgtagactat

SEQ ID NO: 29433 - DNA, 711 bp, Glycine max
  Clone ID: TF_GmC1470_2
ccctaacaaggggggggttgcttccatgctttatatattaaatttcgcacatggatcccataggtgccccaaaactttcacaaagaaaagaactccaagagtaatttgccagttttattatatgaacaatatccttactccttagttacgaaataaagagcgcaccagaagatctatcagagcagaaatctagttctgctaccaatctgagaatgtattcaacctattgccatttaaaagcaagaacaacacagaaaacaacaaatagaagcagcttcttcaaataataatcttgttgcccttgatgggtgcgcagagggaatccatgagcatggacaccatgaaatgtattagcaaatccatgtggaaaaccagcccctcccccatacatggccgcatcatgaaacccatgcatctgaaagttgaataaggatggtataaaaccaccaaatgctgcggacaatgcaaaattcccaaatcttgttgttgccatcggcggtggcacaaatccccccaagcccttcctacttcaacaacaataataacagcgatgctgccaattttgaatgcaacatttgctttgaattagcgcaagacccgataattactttgtgtggtcatcttttctgctggccttggctttacaaagggcttcactttcactcacaatcacgagaatgcccggggtgcaaggctcttgtgggggaggag

SEQ ID NO: 29434 - DNA, 463 bp, Glycine max
  Clone ID: TF_GmC27292_3
tcccacgcgtccgattttttttctctcacacactcaaccaaagacgaaggaagaagaagaattacaaagtaccaccaaacaggctgcgacgacgtcgttctttgcaacttccagttcttgttcttgatgaatatgacaccagtttgcccctttgtcaaagctgctcgccccgatgataacaatgcctctaagaaatctggcgaaaactctatgaaacatcaggctgagtctgagagtaaggtgaagaaagaggttaatgactcagctagtacctcaccaaagtgcccttttggatatgattcacagtcgtttaagattggtcctcttagctgtacggtgtgccaagcacttttatttgacaccagcaaatgtgtaccttgttctcatgttttctgcaaagcatgcatatcgcgctttaaagactgcccgttatgtggggctgatattgtgaagatcgagcctg

SEQ ID NO: 29435 - DNA, 2036 bp, Glycine max
  Clone ID: TF_GmC27292_1
cttcagcttcgcttcagttctatcaacaccttcgtcaagccccacaccgctgaattcgaactccacgataatcagtgggagcaacacagaagacgagagagaccaaagctatgacagtagtaacatgttgaaatttgaaatcccagatattttagatgtgaatgagttcatgtaatgtgatcagatagatcttcaatgattaaatcgaccaaaacgttgatcgattatatcacatgtcccccaattgtttttcttttctgggatagcttgattatggatccatgatgtaggttcatacctgtaacatttcttaattttcattattgattaaattttcaaaaaagaaacatcttctgcctcgcctcctttttcactctcacacaatcaaccaaaaacgaaggaaaaagaagaaccacctgcaacgacgtcgttctttgcaacttccagtttcttctctctgtctcgtttacctcgatcctgttcttgttcttgatgaatatgacaccagtatgcccctttgtcaaagcttctcgccctgatgataacaatgcctctaagaaatctggcgaaaactctatgaaacatcaggttgaatctgagagtaaagggaagaaagaggttaatgactcagctagtacctcaccaaagtgcccttttggatatgattcgcattcgtttaagattggtcctcttagctgtacggtgtgccaagcacttttatttgacaccagcaaatgtgtgccttgttctcatgttttctgcaaagcatgcatattgcgcttcaaggactgcccgttatgtggggctgatattgtgaagatcgagcctgatgctaatcttcaaggtgtagttgatcactttattgaaggtcatgcaaggatcaaaaggtctgttagttcagacaaaggagaagaagcaactgagagtaaaaaggtcatatatgaggatgtgtctttggaaagaggttctttcttggtgcaacaagccatgagggcattccgtgctcagaatttagaaagtgccaaatcaagactcaatctctgtgcagaggacattcgtgatcagttagaaaaagttggtaacacttcagagttatgttcacagctaggagcagtcttgggtatgcttggtgactgctgccgagcaatgggtgatgccagttctgcagttgcatattttgaagaaagtgttcaatttttgtcaaagtttccaaaagatgatttggagattacccatacactttctgtttcacttaacaaaaattggagatcttaaatattacgatggagaccttcaagctgcaagatcttactattttaaatctttgaatgttcgacgcgatgttgtcaaacacaattcaaatgttccatcccaggtgttagacgttgctgtctctcttgcaaaagttgcggatgtggacagaaatctaggggatgaaaagttagctactgatggatttcaagaagccatagacttactggaatcactcacgttgaaatctgaagctagtgggctcgagcaacggcggcaatcagtcctagacttccttagaagccaacttccagataaacaagaacaagctgaggcaccagtctgagataggtggtccacatgaagaaaggaaacacagattccgatgcaataaggggtttcggtatgccgtgggatgagtttgtaaaataagctcagcttaacaaaggcactactaatggaggaagaggagatttctgagtaatgaatattccaggcatttctggcactgcagtgtctgcctatgcctaagattctaaggcgcatcctctctgtattttcttgtgcaccactcttatattttttttttccgcctctttgattgttttcttggtgcatactgacaattgtgatccttgcatcattgtaactaaatatacttctctaataaactagaaacgaagtagcatgtagtatataggttgtgtagtttgctctacaacttgatggatacaattctatactgtgaaaagtgaaatttatagatatactcctctaatattccc

SEQ ID NO: 29436 - DNA, 2430 bp, Glycine max
  unsure (1)..(2430): unsure at all n locations
  Clone ID: TF_GmC122273_1
aattaattctcctttggtgctaccacgaaggaagacggaatgtgaaagggaagtagtcaactagtgcacacaacgcatcacaagtctaacaaatggacattatcatctttctgttcgcccaatctcaaacacccaaacatagtcaaacgcaaactctgcaacaaagctttcctttgcacgctaaacatatccacacagattcgttttgaatctcttatttctttcaggtgaaagaaagactttaagtatgggaaatgaagaatcaacacatgattctcatgatgattttttccggcaaccccgttcccatgatggaagttcaccgaatactagccatcaatatcatcaacccccttcctatgatggaagttcagcgaatactagccatcaatatcatcaaccctcatcatatgctgggagttcggtgaataccagacatcaatataagcagcgacccacatatatagctgacagtttcagttcattggatcagtgatattgcacgcaggttgtttctgctttaagagaagctggtctggaatcttcaaatttaataattggcattgacttcaccaagagcaatgagtggacaggcaagcactccttcaaccacaaaagccttcattttactggaaacactcctaatccgtatgagcaagcaatctctataattggccgtactctctcttcatttgatgaagacaatctgataccatgttttggatttggtgatgcatctacacatgatcagtatgtcttcagctgttatcctgatgagtgctattgtcatggggttgagcaagtacttgcacgctaccgagagtttgtccctcgtctgcttatccgcaggtccaacgtcatttgcccctgtaattgacgcagcagttggcattgtggaaagaagtaatggtcaatatcatgttcttgtcattattgctgatggacaggtcactagaaattcagatacaccacatggaaagtttagtccacaagaacaagcaactattaattctatcattgctgcaagccactatcccctctcaattattttggttggagttggagatggaccatgggatgaaatgcagcactttgatgataacattactcaacgcttatttgataactttcagtttgtgaatttcacaaagattacgtctgagaacaaagatgcatcaaagaaggaagcagcatttgcacttgctgcccttatggaaattccaattcagtaccggataacccaaaatctacaaatcgccaatgaaaatccaacaagtcatcaacgtaaaaggcctcttcctccgcctaaggaagtaatagatcgtgacaatgcagtcctagctgttccacacgtgccaaattttgaatcagttgagccatcagctccagctgcagtagaatcagtatgccctatttgcttaacaaatccgaaggacatggcttttggatgtggtcatacaacttgcaaggagtgtggtgtgacattatcttcatgccctatgtgccggcaggaaattacaactcgcctgagactttacacttgagttgggttggggatttctcgtctgctaacttaagatttatagtttatattgctgttattgcctgttgagaaggaatgtaatgactacctgttaaatttcccaattcttcagattaaaaataagatgtaacattgtcatagaatattattgaaagtagagatatttcttatgatgttattagatatattttaagatatgaaaataaaataaaatctctaatttttgttattaaaaaaaaaaaaaaaaaaaaaaatccaaggggggcccggtaccaattcccccataatgagtcttattacaatccctggccgtctttttcaactcctgaactgggaaaacccggcgttcccacttaatcccttgcancactcccctttccccactgggttataccaaaaggccnccccatnccctccacattgcccncctgaatgggaatggcaattgtaacnttaaaatttgttaaatgcccctgtaattgacgcagcagttggcattgtggaaagaagtaatggtcaatatcatgttcttgtcattattgctgatggacaggtcactagaaattcagataccaccaccatggaaagtttagtcccacaagaaccaagcaactatttaatttctatcaatggctgcaaacccactatccccctctcaaattattttggtgggattgggagatggcccatgggataaaatgcagcactttgatgataacattactcaacgcttatttgataactttcaggtacttgactgatgtatgatcaagtatgtgttcaagtttgtgtgagcttgtaactagtgtttagtattgtttaaatgttcgggattagacggcaaagggaaaagaaatacttataagttataattagactctgaaaaa

SEQ ID NO: 29437 - DNA, 1366 bp, Glycine max
  unsure (1)..(1366): unsure at all n locations
  Clone ID: TF_GmC83664_1
tgattcttccattgagagcatttagttngctcttccttgcttctttgtatttaaacactaggttgtaaaacatttgatgtttatctgtattgcttgtgccaaggacgagaagatatttttaaattagaatgattattttggcacaagcaatacagataaacatcaaatgttttacaacctagtgtttaaatacaaagaagcaaggaagaagcaactttatgctctcaatggaagaatcatagaactctagtgttgtaggaaccacaactagggcatttgtggtagagccagtggaagggggtctctcctttcttttcacaatcattacataataaaacctgagtttgactagaaatctcatcagaaattctctcttcagccaacaacgcatctaacatcctaaaatatacctgcatgtctccaagtgacttgctacatattgggcaggtataattaaagcaggtatattcctgaaaacatgttgagtgcattacatgaccacatgggagggcttttaccggagagcaggatgtgaagatatattcatgacaaattggacagttgtcctctaaatgtttctccctttcatcatcaaataatttgcaacgagacaaataatattttgccatcgataaattacatgaaattgttgagcatgtggcactgattggttgaatcactaagcacttcatacacatcatctacgtaatagattttctgtcaactgaatgatctgattactcattagccatatgtatataggtatgaagttggttgcatcaaggagcaaaaagtttacagtttctcttgtagtgattacaactctagattagtttgtgagggtccctgtaagatggatgtttcccaggaaattccagttcatcattttttatattggcttctgtagaagagatctgctgcctaataatccaacgactcattagtaggttctgtattatgtatgactttttctgaggatccaagcaagagtcacgagacacccttcttatcaccgtctccaaatcatcttgactcaatttcaaaagtcggtcataacgcccagacttgtcacaaagttgagaatacttaccttcattgtttacaggatttatgatatttgttacttcattgcaagcatgtttgttatgatcatgaaattgatttgtgctcgagccaaagttgagaatacttaccttcattgtttacaggatttatgatatttgttacttcattgcaagcatgtttgttatgatcatgaaattgatttgtgagtttcgaacattgattattattttgttctgcattatgaaccttaactttatcatcaaagttgtagttagacagcacaacattatcaccattatgc

SEQ ID NO: 29438 - DNA, 1816 bp, Glycine max
  Clone ID: TF_GmC7458_1
ctcaacaacaacaaacaccaacgctgtccgaatccaacaagctccacctaaatccacgtccaatctcaccgacccatctcgttttttcttatcagtcttcaccgatccacacttggctacactacttaggtgattgtagcgaagaagtggacgtaaatttgcatgcagtgataggaggattcatatatacgtgggtgaaggacgttgatgatgacgatgaagaggttggtgagagtgaacagggatgcgattgcagcatgcatgacttgcccgctttgcaaaaagttcctcaaagaagccactgctatttccctttgcctgcatacgttttgcaggaagtgcatttatgacaaaattacagatgaagaattggaaaattgtccagtatgcaacattgatttgggcattgttccgcttgagaaaatgaggccagataacattttgcaagatttaaggaacaagattttccctttcaaaaaaagaaaggagaaggcacctgtatctgtctcttcagtactattaccagctagaagaaaggagagatcactgtcgtctttggttgtcagcactccaagggtatgtacacagtcaaccatgacaggaagaagaacaaaacctgcaagaaaggctagtggcctgcagggatctagtttatccattgagaagttcattaaaaaagaagaggaattactgtcgtttatccaaaatttattaatgaagaaactaggcctgaatagtgaggatgaggttgagattaaatgcatgggacatccagtgcttccttcactgcaggtgcaaaacttggttgactcgtggcttgatatggcggcttcaggacatagaattccagcaaccatgggatcctcagggaaagattttgtcatgatcctaacctatggtcggaaggtcctacacccttgattgtggttcccagttcttcccctttcacatttttatgctaaagtgctgaaagccaaaattaaggaaaagaagcgcaaggcaaaagttgaagaagaaaagattagcactgatcatgcctcttcagatacatcaaaacccaacaaattgcgaagagttcgccaaaaaaaggaacctgtttttggagaatctagaatatcacctcaggctgttctggatgctaccgacagaaatctcttatggaatgattcaatttggttctccttagcagcttctgaaaaccaggaaggagatgcacctttaccacaaattccttcaaattatgtaagaataaagaacggaagcatacctgtttcctttatccaaaaattattaatgaagaaactaggcctgaaaagtgaggatgaggttgagattaaatgcatgggacatccagtgcttccttcactgcaggtgcaaaatttggttgacctgtggggggttgatacagcgtctttgggacatagaatttcagcaaccattggatcctcagggaaagattttgtcatgatcctaacctatggtcggaaggtcctgcacccttgatcgtggttcccaattctgccctttctcatttttattatagcatgataaataaataaaaaaacgtcagagaataatcgcttcctcgtcaacgggcgtttttatgtagctgttgccaataagcacgcagttatgaggaaatctcctctcctgctagactgttgaatgtagagtagcatgctgttctgttggtcattgtagtgatcattggtctctgatttttctatagcatgtttttttgttttcatacttgttgctacagatggtttcttggatatttgacatttcaatttagatcgccttttcgtattaaaaa

SEQ ID NO: 29439 - DNA, 660 bp, Glycine max
  Clone ID: TF_GmC122273_3
gtcattatcctctctcgattattttggttggtgttggagatggaccatgggatgagatgaagtactttgatgataacattactgagcgcttattcgacaactttcagtttgtgaacttcacaaagatcatgtccgagaacacagaagcatcgaagaaggaagcaacatttgctcttgctgccctcatggaaattccattgcagtaccgggcagcccaaaatatacaacttaacgatagagaatcagttcttcatcaacataaaaggcctctccctccacctaatgaagtaatacatcatgataatgcacgcatggcaattccgcacatgccaaatttggaatcagcagaatcgacagctccagctgctgccgaaccagtatgccccatttgcctaaccaatccgaaggacatggcttttggatgtggtcatacaacttgcaaggagtgtggctcgacattatcttcctgccctatgtgccggcatcaaattacaactcgcctgagactgtacacttgatgaggaagcttgttttatgtattgaatatgataaccgttataccatttgaagttaagaatgaaatatataaagattttgggtgtaaaattctttaaccatgcagtcaatgctcattaaatgtatgaaaaaaaaaggttcaag

SEQ ID NO: 29440 - DNA, 924 bp, Glycine max
  Clone ID: TF_GmC2979_76
cagttgatcttccagaactcctaaaaaaaagttgatcttccagaagtgctaatttgaatccacaagtgcgtagaatgaagcatattaaatttaacatattcacaaagtcccatgtgggattgtgattctcctagtatagacacatttttctgtatgcatttctagctgaaaatgttaattttttaaacaagatgtgtactgctactttatgcaacatgcatgaacactgctaactcctccacaccgtctcaaatctcaaacatgatatagctttatgacttggtctatcttagctcgacatacagggcaaccccatttctttgatttcacctcgttcaagcaagacatgcatccagcaacatggccacagggtatgcatgccccttctgctggagcatctaaacatatcacgcatgatgaaccacttccaccggcatttttttctcctttaggaagcttctcagcatctggagatgccatatcaacagggcttaaatcaattgatggatactgaatgggaccatctgccagaatctcattggcgattggtggagctgatggattcaagtccaaagcactagcattcacgtggctttggaggtgctgagtattgccatctgggttagcttcttgtaccaactcactatcacttgtattaggatttggtgtgccaagaaaaccatgattgcctgtattcactgcactgcttgaagagcttgcttcaaagcttggctgtgtatcagaaaagggtggcctctcctgcatggcagactgaagggatgcactgatggccatagccaactctgtgtcttctgcaactggtagtgctgtgggtggacctgtaggcacgttattttgcaagaatgctggacttacctgtggaattcctttgcaagcattagaaaaccatgtaagttgttgctt

SEQ ID NO: 29441 - DNA, 411 bp, Glycine max
  Clone ID: TF_GmC1254_4
aagtgtgacccaagctatcattttcagtgtataaaacaatggcttgtgcataaaaatttctgcccagtttgtaagcaaaaagttgtggttcgacactaagtggcactatcctcaacgttttttacccttaaattggtgtatagtttttcatatgcaatataagcaatcttcattacatattttaaaacttttggcttccttagcgaggagtcggcaatattatacttgtaagttttatattatgatctcgtaattggacagtgattttgcatattatacgcaaggttttgaaatttgaatgttgtcactcaggtaaacaacgatttgataagggagaactcactttctattcctttttgccccgtgcaattctaagttttctagttattaaaacattggtatttttttacc

SEQ ID NO: 29442 - DNA, 436 bp, Glycine max
  unsure (1)..(436): unsure at all n locations
  Clone ID: TF_GmC761_3
atctgcttctgggagcaacttgtaggaggatttaatagatgttttcacttcaaattgttaatgcactcaggatgatgagtccttgacagttctttcctgcaaacatctgtaccatcctgagtgcattaacaattggttgaaaataaacaaggtttgcccagtttgtagtactgaggtatctgcttctgggagcaacttgtaggaggatttaatagatgttttcacttcaaattgaagaaaatttatgctaagttgggggctaatatcccttgttctaatagcatttccacattagggagatagtctgtgctattgtttccagctccttcattttaagtgtaacatgtaacttttggaacctgctctctagattgtctttattttaatggaaaatgaatggcatttaagtggccannnnnnanannnannnnnnnaa

SEQ ID NO: 29443 - DNA, 500 bp, Glycine max
  Clone ID: TF_jC-gmro02910041024d1
ggaataaacatttttgtaacatatactgagacatgataaaccattccacagtggcttaggcgagacataatggttccatatacaataatgatgaggacaataaaaatgacaaccaaattgcctcttgagataattatagccggtatgcactggacaacactgatatgcacaaccagttagaagccacaataactacaaataataaaaaaagctatcattacatgattacagcacacagcagcagctgcaactgtataggcccgtatcaaagtatattaacatggctgtgaatcgaaagtgtgcagattcctcaacatggctgctaaaaacttccctgacatcgatcttctacacttcctcttgactgagggtgttactttttaagatgttatacttgcagagggggcatgtagcattaatatacagccatttatccacacagacacagtgaaaatggtgaccacaaggaagttctcttagctcaaccccatcatcgtaag

SEQ ID NO: 29444 - DNA, 739 bp, Glycine max
  unsure (1)..(739): unsure at all n locations
  Clone ID: TF_LIB4199-002-Q1-K1-E5
ggtccggnaattcccggngtcgactccacgcgtccgggtagcctgcaaccgagaagagagaggattttgggaagttgcagtacgggtaatttaatctaatcttgcaaaaacaccttctctcgcttcctttccatttacgactatctccttcaatgttgttattctgcgtgtattcctttgttccacgcttagatgcgagcactataagagacgatgcaaaattcgagcaccatgctgcaatcagatttttccatgtcgtcactgccacaacgacgccgcgaactcatctagcaaccccgcagatcgtcatgaacttgttagacgcgatgttaagcaagttatatgctctgtctgtgatactgaacaggaggttgccaaggtgtgttctagctgtggcgtcaatatgggagaatattattgcgagatttgcaaattctatgatgatgatacggataaaggacaattccattgtgatgaatgcggcatttgcaggtgcttgctattcagtgagtgtgcaaaacaatcactcatgtgtagagaactcaatgaagagtttctgccctatctgtttggagtaccaatttgattcaataaaaggcagcaccattttgaagtgtggacacacaatgcatatggagtgctatcgagagatggcaactcaaaatcagagtcggtgacctatatgctcggagacaataggcaatgatgtgaactggggaattttagatcgggagattgg

SEQ ID NO: 29445 - DNA, 1980 bp, Glycine max
  Clone ID: TF_GmC6407_1
ctccaaggtttttccataactccaatccctcatcgcccaagtcgccatcgagtttttcacttctcaaatcaactctacgactatccaaaagtcgatgtggaatctgtatgcagagcgcgaggagtgggcaaggaacagcaattttcacagcggaatgctctcacacgtttcacttcccttgcatagtgaagaagcacccgatcgtcacgtgccccgtgtgcaacactagctggaaggagcttccggtgctctccatcaacaacaacaacaacgacaagagcgacaagagaggcttcaaggtctacaacgacgacgagcctctcatgtctccaacttcactctctcgcttcaatcctattcccgagtcagaaaacgaagacgaagaacaagaacaagataacattaacacggagtttaagggctttcatgtcaatccacttcccaatttacattcaacgacggtgattaggaggaacctccagctatcgttgctgccggaggcggccattgtcgccgccaaccgaaactacgagagttacgtcgtcgttttgaagctcaagccgccgcacgtgacgaaaacgtcgcgtcgtgctccaattgacctcatcgccgtgctcgacgtcggtggcgccatgtccggcagcaagctccgtctcatgaaaagctccatgcggcaagtgatctcgtcgctccgtccaaccgatcgtctttccatcgtcgcattctcggccggatccaagcggctgcttccgctgcggcgaatgaccggtggcggccagcggtcagcgcggcggatcgtcgacgcgctcgccgcgattgatcaaacaagagaaggaactccggtgaagaacgacgccgtgaaaaaagccgcgaaagttctcgaggatcgccgcgagaagaacgccgtggcgagcattgtagtcctctccgatctgaacgactcacgcgctggaaacaacatgcacaaaccctcgcttgtttccaccacgcggcttgcccacctcgaagtcccagtgcacgcggtgcggttgggagagtgttcccacgcgctctcagacgacgcgctggcgaatttcgtgggaggtttgttgaacgtggtggctcaggacgttaggattcagttagaggtggtgtctcgatcccgcgccgtggagatcgcgggcgtgtactcattatcgggtcgacccgtttctctcgggtcatcggattggatccgtctcggtgatctctacgcggaggaagagagagaattcctcgtggaactcaaagtgcctgcggcttccgctgggtcccaccacgttctgaccgtacgatcctcctatcggaaccccctcactcgtgagcctttgattcccgttgagcaggcaatgctcgttccgcgtccccacgccgtacgatcctcgtgcgccaagatcgaacgcttacggaacctccacgtcactgcgcgagccgtggccgaatcttcccggctcgctgaacataatgatctctctggagctcatcacttgctctcttcggctcgcgcgcttctcttgcagtcaagtaagccggaagaggagtttctccgctggctcgaagccgagcaagccgagctgcaacggcgcagacagaggcaaacacagagaaacagtcgtgttgaagagaaggtggagccgcttacgccgacttcggcttggcgggctgctgagaggttggctaaagtggctatcatgagaaagtctatgaacagagttagtgacttgcatggatttgagaatgccagattttagttgtaatttttattttaaaaatgttattgtgcatagatgaaaaggaattattaatagagaattgttttttagaaatgagcatgagacaaggagtagtactagacgactagaacctttctgggttaataaggaaaggaagcgatagtgatggcaaagtgaacccacatacatgtatgacttgattgggcattgtggctagctgtttcttctc

SEQ ID NO: 29446 - DNA, 2152 bp, Glycine max
  Clone ID: TF_GmC254_1
ggctcgaggttatatatatacacacacccctctaattcagctttggagtaacctagttgaagatgccatgggaaacctctttggcaaaaataaaaagcgtgacactgaaagtgccaacaataataaaggaagaggtggaagaatctacactgccgtgaccacaagaggcttaccacctcatttcccaacacaattacctcattcacagcctccaccgctattatatccaactctagaacctccgacaccgccaccgccgccgccgccgccaccggcactaccacaatccatgttcaagaaaccaagttttgcgagagttttcgctaaacaaagctcttcagtcatgaacaacaatcaatctggcataattgcgccacttcgatacacaataattgaatcaaccaagaaagtaacaaagcctaatatgccatgatattcctagttggtgataccaactaatcttgatgtgcaaaatacccacacttacaagtgatgagtgaaaaaaatctacactgccaagaacaaatttgtctaaccttcataaaatcaaaattgtgttagccaagaaatgaagaaatcaacgcattgaatgaagctgcgatgggaaactcgcatgctaaaaagcgtgacactcaattttccagaaacgttgttgaagggagagttccctctccgaaaaacaaaaccttgtcgccgtcaccgtcgctagaaccaccactaccacgagaaccaccaccaccagcagctatgtctttgaataagggttcggggaaactgtctgccaaagagaaatatgctctgattcccgataacttcaccaccctagaacaggttacaattgccttgaggaaggaaggtttagaatcatcaaatcttgtccttggaattgatttcacaaaaagcaatgaatggactggaagtgtctcattcaacaatagaagcctgcatgctattggaagtacacctaacccctatgagaaagccatctctattattggcaagactctggctccttttgatgatgacaacttgattccttgttttggctttggtgatgccaccactcatgatcaagaagtgtttagctttcacagtgatcattcaccttgccatggttttgaggaagttttggcttgctatcaaaaagttgttccaaacttgagactgtcaggaccaacatcttatgctcctgtgattgaggctgcaatagacatagttgagaaaagtcatggccaattccatgtgttagttattgttgcagatggccaggttacaacaagtgctgcatctgaacatggagaactcagtccacaagaagcaaggacaatcaaagcaatagttgatgcaagttcatatcccctttctattattctggttggagttggtgatggaccctgggaagacatgaagaagtttgatgacaagataccagctcgcgactttgacaattttcagtttgttaacttcactgacataatggctaagaaatcaagcccctcagaaaaagaagctgcttttgctctggctgctctaatggagatacccttccaatataaagcagccactgaacttggactacttggtcgtgcaacaggaagatcaaataaaatagttccaagacctcctccagcaccatattcccagcttgtgccaccagctcgtgttctgagcaatacgccaactttcatggaagatgaaagaaatcaaatggcatgtgcagtttgtctgacaaatgcaaaagatttggcctttggatgtgggcacatgacttgcagagagtgtggacacaaattaactaattgtcccatgtgccgagagaggatcactagtcgtctcagggtgtacagcgggtgattgtaatgaaaaccatgcacattaattacatagtttgcataacatgcctttctcaatagggtttatatatggtgaggttaaaagtctaaaaatgatagcttgtctctgtttgggatgtttcaagtgtattgaaaaatggagatgaattgtgcaaggtttctatatatatgcatggttcgtgtcgatgcgtttgaagttgtatattactatatacctgcacataatgtttaatatatttatggtctctaatcaaatttttgctctgcataaaaacctacaaaaaaaaaacaaaaacaaa

SEQ ID NO: 29447 - DNA, 1097 bp, Glycine max
  unsure (1)..(1097): unsure at all n locations
  Clone ID: TF_GmC254_2
aatcaagcccctcagaaaaagaaactgctttgctctggctgctctatgnnagatacctttccaatataaagcagccattgaacttgaactacttggtcgtgcaacagggagatcaaataaaatagttccaagacctcctccagctccatattcggagcttgtgccaccagctcgcgttctgagcaatatgccaactttcatggatgatgagagaaaccaaatggcttgtgctatttgtctgaccaataaaaaggatttggcatttggatgtggtcacatgacttgtagagattgtggatctaggttaaccaattgtccgatatgccgtcagaggatcaccaatcgtcttagggtgttttctagctgatagcagaatggaaaatcatgtacaaagtaaaattcaactaagggctaagaagataaatgtcttctgtacatttgttggtgtggctttcaagagtgcccaagaatgaccatggtgttgcataaaggtggtttcacattgtaggaatgatttaggagttgagacaattgtgcatgtatttgctagttgttcaattaggccatgtcccatgtgtttgaatttgaagaattgtattttaaccgctgcacattgtacatattgtttatatgtacttatgttaaaaatttatgtatgcaggatatccatgaacttatagataatatgataggttgcattttgtttaaacttaagaggatgtggtcacatgacttgtagagattgtggatctaggttaaccaattgtccgatatgccgtcagaggatcaccaatcgtcttagggtgttttctagctgatagcagaatggaaaatcatgtacaaaggctaagaagataaatgtcttctgtacatttgttggtgtggctttcaagagtgcccaagaatgaccatggtgttgcataaaggtggtttcacattgtaggaatgaattaggagttgagacaattgcgcatgtatttgctagttgttcaattaggccatgtcccatgtgtttgaatttgaagaattgtattttaaccgctgcacattgtacatattgtttatatgtacttatgttaaaaatttatgtatgcagg

SEQ ID NO: 29448 - DNA, 589 bp, Glycine max
  Clone ID: TF_GmC254_8
ccaaaagtcgtgcaacaggaagatcaaataaaatagttccaagaccttcttcagcctccatattcccggcttgtgccaacagctcgcgttctgagcaatatgccaactttcatggatgatgagagaaaccaaatgacttgtgctatttgtctgaccaataaaaaggatttggcatttggatgtggtcacatgacttgtagagactgtggatctaggttaaccaattgtccgatatgccgtcagaggatcaccaatcgtctcagggtgttttctagctgattgaagaatggaaaaatgtacaaaggctaagaagataagtgtcttctgtacatttgttggtgtggctttcaagagtgcccaagaacaaccgtggtattgcatagaaaaggtggcttcgcaatgtagggatgatttaggagtcgagaaaattgtgcatgtatttgttagtagttgttcaattaggccatgtcccatgtgtctgaatttgaataattgtattttaactaatgcacattgtacatattatttatatgtacctatgttaaaactttatgtatgtagagatcaggatatccatgaaaaaaaaaaa

SEQ ID NO: 29449 - DNA, 5328 bp, Glycine max
  Clone ID: TF_GmC23542_2
atgaagaaatcctcctaccctaatcccacccctcgccgccacgattttcaccgtccgccaccacccacccacggctgcggttgggctccccgccccgcctaccaccgcccctaccaccaatggaggccccgattccacccccacgccgcccgcatcgaccgccctccggagccctatttcagggtggagctccgcctcggcagcagccccctccaccgcgacgacgtcgaggccctgatcgacgaatgccactcccggcacgacaccttcactttctaccccgtcgacgacgtcgccgccgttctcagttaccggagctgggagcaggcgcgagacgccgtcgtttggttctgggaggcgcggctcgcggagaagcacgatttcacgccgacgctggattccaacgtcgtcgtcgtcaaggacgatgtggattgtcgccttcgaccggtgttcgcgaggcacgtgaaagggttgacggaagggaaggaggtgaagcggtggatggaggagagtgaacggttgtcgaaagaaatttctcggctttcgagttcgctgagtaagcccttgcgacttggcgtgcacaacgagttggtggagaagaagaaagggcttgttgatgagaagaatcttgttgaaaggaggttgaaggagtttgagtctgcgatgcagtgtttattgaagtatttggagggtggtgttgacgtggagggtgtgactgtctttaggtttgatggaggttttgattggaagcggattcattgtctgatcaaaagggagtgtcggaggcttgaggacgggttgcctatttatgcttaccggagtgatattcttcaggaaatacattatcaacagataatggtattaatcggagagactggttctgggaagagtacgcagttggtacagtttcttgctgattcaggcattggtactgacgaatccattgtgtgcacccaacctcgcaagattgctgccaaatcagtggctcaaagggtccaggaagaaagcattggatgttatgaaggccaatcaatcaaatgctgttctacattttcatcctcacgtgagtttgattccaggatagcattcatgacagatcattgtttattgcagcactacatgagtgataataatttatccggggtctcgtgcatcataattgatgaggctcatgagaggagcttaaatacagatttactgttgactttgttaaagagtttactttgtaggagggttgaaatgagacttatcattatgtctgctacagctgatgcaaagcagctgtctgattacttttttgcttgtggaatttttcgtgtgcttgggagaagctttccagtggatatcaaatatgttccttctgactatgcaggagattctggttctgctgttgttgcctcatatgtttctgatgttgtcagaatggcaactgaggttcacaaaactgagaaagagggaactattcttgcctttttgacctctcagatagaagtagaatgggcctgtgaaaagtttcaagctccctctgcagtagctttgcccttgcatggaaaactttcttctgatgagcaattccgtgtttttcagaactacactggaaagagaaaagtgatattttcaacaaatcttgcagagacatcacttacgattcctggtgttaggtatgtgatagattctgggctggttaaagacagcagatttgatcctggtagtgggatgaatgtacttaaggtttgctggatcagccagagctctgctgatcaacgggctggtcgtgctgggaggactgagcctggtgtgtgctatagactgtacacggaagctgattatcagtctatggacctaaatcaagagccggagattcggagagttcatcttggtgtagcagttctgaggatccttgctttaggagtgaaggatgtgcaaggttttgattttgtggatgctccaagtcctagctccatagatatggcaatcagaaatctaattcaattaggagccattgaactgaacaatgatgttcatgatttaacttctgaaggttggtgcttggtaagaatgggaattgaacctaggctgggtaaacttattcttggttgtttcaaacatggtttgggtagggaaggtatcatccttgctgctgtgatggccaatgctagtagcatcttttgcagagttggcaatgaatttgataaacaaagatctgattgtcttaaagtgcaattttgccattgtgatggtgacctctttactcttctctccgtgtacaaggaatgggaagctttgcctcgagaaaggaagaacaaatggtgttgggaaaacagtatcaatgccaaatccatgaggaggtgccaagacacaattttggagttagaaacttgccttgagcgtgaacatgacgttgttactccgagttactggcgttgggacccttgtatgccctctaatcatgataagaatttgaaaagggtaatactgttctcacttgctgagaatgtagccatgtactccggctgcaatcaacttggttatgaagtggcacaaactgggcaacatgttcaactacatccatcttgttcattgcttgtatttgctcagaaaccaagttgggtagtttttggtgagcttctttccatttccaatcaatatttggtctgtgtgagtgcatttgattttcaatcattatacgacctttgccctgctcccctgtttgatgtatccaaaatggaagagcggaagttgctaatgaagacactgtctggtcttggctgtattcttctcaagagattttgtggaaaagccaactgcaatttgcttgctcttgtttcacgtataaggaaagcttgtatggatgaacgcatcttcatcgaagtgaatgttgacaataatgaaatccacttatatgcctcttcaaatgatatggatatagcccttgggttggttaacgatgttctagaatatgagagaaagtggttacgcactgaatgtatggataagtttttgtatcatggttctggtttctctccacctgtagctttgtttgggtctggtgctgagataaaacatttggaacttgagaaacgttccttgagtgttgatgtgtgtcatccaaacataaatgaaattgatgacaaggagctcttgatgttttttgagaagaatacctctggttgcatctgtgctgtgcacaaattcacaggcaatacgagggatgaagatagggataagtggggcaggataacatttatgtccccagatattgtcagaagagctgctgagctagatggacgggagttttgtggctcatccttaaaagttgttccttcacagttgggaggggataaaacattttcgttccctgctgttaaagcaagaatttcttggcctcgtaggcttagcaggggatttgccatagttaaatgtgatataaaggacgttgattatatcttgagagatttctataaccttgcagtaggagggaggtatgttcgatgtgaagttggcaaaaagagtatggacagtgttgttataaatgggcttgacaaagagctttcggaagctgaaatatcagatgtgctaagaactgctacaactagaaggattttggattttttcttggtgagaggggaagcagttggaaatccaccatgcagtgctttggaagaggcactcctaaaagaaatttacccctttttgcccaaaaggaaccctcacattagtccttgccgagttcaggtgtttgcacctgagcccaaggatgctttcatgagagctttaatcacttttgatggaagattacatttagaggcagcaaaagctttggagcaaattgaaggaaaggtgttacctggatgtctttcatggcaaaagataaagtgccagcagttgtttcatagctcccttacatttcctactccagtgtatcgtgtgattaaggaacaactggatgaagtacttgcaagcttcaggaatttgaaaggtcttgaatgcaacctggacaggacatttaatggttctcaccgagtgaagataacagcgaacgccacaaggacagtggcagaagttagaagacctctggaagaactattgagagggaaaaccattgagcatgacagcctcacccctgcagttctccaactcatgttgtccagagatggctttagtcttaaaaactcattgcagcaagagactggaacttatattctttttgacaggcacaacttgaatttacgggtgtttggttccccaaacatggttgctttggctcaggagaaggtgatacagtccctcctttctctccatgaagaaaagcagttagaaattcatctgagagggagggatctacctcctgatttaatgaagcaaatgattaagaattttgggccagatctccatggattgaaagagagggtacctggggtagatcttacactgaacatacgtcgccacataatcattcttcatggtagcaaggagttgaaaccgagagtagaggaaatagtttttgagattgctcgttcaagccatcatttggttgagagatttggcaatggacccagttgcccaatttgcttgtgcgaggttgaggatggataccggcttgaaggctgtggccatttgttctgccggatgtgtttggttgagcaatttgaatctgctattaaaaaccaaggcactttcccggtatgttgtactcacagggactgtggagatcccatcctgcttacagatttgagatctcttttatttggtgataagttggaggatcttttcagggcttctttgggagcttttgtggcaacaagtgggggaacttacaggttttgcccttctcctgactgcccctcaatttatcgagttgcagatcctgggtctgctggcgagccatttgtttgtagggcttgttattcagagacttgtaccaggtgccacttagagtatcatccttacctttcatgtgagagatacaaagaattcaaggaagatccggattcatctctgatagaatggtgcagagggaaagaacaagttaagtgctgctcggcatgtggatatgtaattgagaaggtagatgggtgcaaccacgttgaatgcaagtgcggaaagcatgtctgctgggtttgtttagagttctttagtactagtaatgactgttatgaccatttaagaactatacacttaaccatataaattgccatttgcgtaccatttttctgagacttaacccccacaagcaaagtttccttttttagtttatataccggtgtgtgaacgctttttcccttacctttccctctcaactagattattcttttcttttatccttat

SEQ ID NO: 29450 - DNA, 1094 bp, Glycine max
  Clone ID: TF_GmC32907_1
ggggcgtgcgtatcgagaagacgacagaaggggactgttaaataaacctaatctttgtttagcttgttttgcaccttgattactggagcctgcaaccgagaagagagaggattttgggaagttgcagtacggatgcgagcactataagagacgatgcaaaattcgagcaccatgctgcaatcagatttttccatgtcgtcactgccacaacgacgccgcgaactcatctagcaaccccgcagatcgtcatgaacttgttagacgcgatgttaagcaagttatatgctctgtctgtgatactgaacaggaggttgccaaggtgtgttctagctgtggcgtcaatatgggagaatattattgcgagatttgcaaattctatgatgatgatacggataaaggacaattccattgtgatgaatgcggcatttgcagggttggtggtcgtgataagttctttcactgtaagaaatgttgtgcttgctattcagtgagtgtgcaaaacaatcactcatgtgtagagaactcaatgaagagtttctgccctatctgtttggagtaccaatttgattcaataaaaggcagcaccattttgaagtgtggacacacaatgcatatggagtgctatcgagagatggcaactcaaaatcagtatcgctgtcctatatgcttgaagacaatagtcaatgatatgaactgggaatatttagatcgagagattgaaggcgttcatatgcctgaggagtacaagtttgaggtttcaattctatgcaatgattgtaactctaccagcacagtatcttttcacatatttggtcacaagtgtttacagtgcggttcgtataacacccgtaggatttcgaaacccaaacaagaaggtttgggtgttagtggaacctaattataaaatcatcccaaaatttctattctattctttacattttgttttaatcacttttgcttattttcccgatgtaatatcaaagggaaataaaaggatatacattattattttgccgatagtattggcttatgttgtgaaatatattgtggatgacttgtgttacgtgcatgcgatttgttctagcgccttgtct

SEQ ID NO: 29451 - DNA, 1155 bp, Glycine max
  Clone ID: TF_GmC145275_1
cccagtccgaaccctctctccctctccctctcttcctctccctctcttccaaccattccgaatgcgaacaagttgttgttgttgaacggtatggtatatagtgtgtaggctgggggtccttttgctgtttttttgaacgtcctgaattgcatgctgggagtcacaccggggcccgttacttatgccttggctggcccaattcctgttaagataagtgtctactggtcaatgaacatgaatccctataacctgggattgtctggccctgggagtccatcctactatagttcttatgcggcaaatggtcatttgccgagaatggagattgatagtggctgagtgggaatatccttcgacaatttaccacttgtggaagagcctgctacaacagattctccacctagaagagatggagtcacgaacatgcagaccatccctgaagaatgcagtccaaagcttcatgagtctaatcgtcgtagccaggtcatatggcaagacaacatagcttctgataagattgctgtcgaaaaaatactggatccaggagtagcagctaggacttatagcaagacaattttctaagatgatattaagatttttgagaccctactgtacaaatttggtaaagttgtgaatagaagcaatggtgtttcaagataacttatttatctgcttacatacagaaaatataaattagatatttaattaacgaggaaaacttcgggtaaaaggtgtgtaatatgacagagtgcatacagaagaggcgagaaatgtccgaaattgccatgcagccatgtctatcatggtgaatgcatcaccaagtggcttagcattaacaagaaatgtcctgtttgcaacactgaggtttttggcgaggaatcaacgcattagcatcaaggtggcaaaagaggatcctttttgctctattaatttttgcttctcatccaactcaccctctccctcccattctcttttttaagttttaattttttacacgtaggtaggtgtagtatgaagaactatggcagctctcacacaatatatgttttgtttactagaaacaacctattggagtcgcatcttcttgtggttaatgtgtgattttgtgtgtattcatgcaatatatattctcttagcttttgtgccaaaaaaaaa

SEQ ID NO: 29452 - DNA, 1989 bp, Glycine max
  Clone ID: TF_GmC1422_1
agccgccgcaagcgatggcggactccggcggcgacctccggcggcgacctcgccggcatcatttgttcgatctcctatgagcccctcaacctcatcagcgaggatcttcaatcggtctccatctgcgtccacgtttttcacgagctctgtctgcggcaatggttggagtactcttcgaaagggaagaagcacacttgccccatttgcaagcagggttgcagggccagcgacgcttgctggctctattttcagtcagtgggagatgcgaacgatagtgtgaagcctcagaagagctttgaattggaggaagatgctggggttcctgcgtagggaggtgaatgtttcggggcttaattctcaggttgaagggcaaacaaaggaattggaaggacttaatgagaaggtatttttattttattttattttttaacggttgtgtttagatgggagagagagactaagaagcgcatcggaggagattgaaggatatcacgctttgtacttgcaaggagcaggcaaagatagagacagctttaaagaatgaggttttaaataaaaaagcatcaattccagcttcaaatgaaatcagaggtgaaatactctgtagccttctgttttatttgggacaagttaactatttacagcctgaattaacttgtaaagatttatattgaattaggagcttgagaagtcaactttggagtgttttagattaaaagaaagtaatatggctttgactaaagaacttgcagctttaaaattatgagtggagcttcattttgaattttgatcgagtaaccatattttgtttatgatataatttttgtttattttttttacttcttgctatgttggtttatggcctgcaccgtagagtatatctgatctggacattgatgaagaggaggttttgaagcttgccgctttgggtaaggggccaacagtaaagacacagtagatatattgaaaagatctctggtggtcatgcggaacaggagttataaacaattgatggccaagtgcaatattcttggaagaggtgaggcttggtatagcaaaaagctttagaaggctaaagagaagatcactaaactgaaggagagggtacaagaactggagacattaactgaagcaaaagagaacgaatatctgagcttgcaaactttcatcaaaagaacaaagcaaccgaattttgacacccaaatctggaattgacctgactgcaaacgacaacagtaaatattttcaatctttgaagatatagaactccaatgttactaaaaataaggctgtgaatgttagtaatggaagtaaaactaccttttctcttgatataaaaagagagtatatctcaattgatgaggatgatccagaaggcactaatgctttgcaaggatgttcaaaacacaactacaaagatcaagacagggatgatattgcttttagcaagccttctctagtgaagctagagtctgtgtctggcataaagactgaaacatcattgcaaggaaattgtactttggctgcgtctcctagagttgatattgacattggcattgacatggctaacatttcagctggtgctatggatgaagatgtaactttacaaaccaacattaaacaacccgtggtgaacattacaaaggagttaccattaacactttcaaattcagggtgataagaaaaattcactaagttcaaaaaggtcaaagtggtttgaaatcctagttgcaaagagtaaaggaatgcagatagaacttttttggggagagtcatccagtaatatattggtctgtatgggcctggttgggaaacccttgttccaaaaaggaaaggaatgcctcctttgtcccggaggggaaccaatggtagattaaataaatttattttttggaaaagttttcccccctttgaataatgatctttggggattttagctaaacgggtccgaaaatctagtaattgattgattgcttggcttcggctcct

SEQ ID NO: 29453 - DNA, 2092 bp, Glycine max
  Clone ID: TF_GmC1040_1
ttcctctctcagtctcactttgcctcgcgtctctcagtatgggttctggttggagaagagccttttgcactagcgacccagataattccacaatacgcaccaaacacagaacccaaagccctactccttcccccagaagctgcgtcagcctcggctttctctcttcaacaatcacagaattatcatcaaatagcagtcccaaatttcaaaccaaaaccaacacctcaaattcaaattctcctctctctcctaagctcaacctctccctcttcggaaacagtttcaaattcagaaataattgtggaatctgttcgaatagcgtgaagacagggcagggaactgccatttacactgcagagtgcggtcacgcgtttcacttcccatgcgtcgtttccgtttcccatgcacgcaccaacgtctgccccgtatgcgacgccacgtggaacgacgtgccgcttctgcaaaacaacgccgagaaacaaaatcaaccgattcatcatcatcgttccgattctgtctcctcctacgatgacgacgagcctcttccttctcctctcacatgctccgcacaaatcgctccaatccccgaagatgaagaaaacgacgacgtatccgagttccctggctttttcgtcgatccaaagcctcaatcctcgttgagacaaaacgacggtggtgattcgaggagcgttcgagtgaagctgatgccggagtgcgcggtcatatcagtttcgcaaagccacgaaacacgtgctttggttttaagagtgaaagctccaccggtgctgtcgccgccgagatggcggcggcctgccgatggatctcgtgacggtgcttgacgttggaaacagcatgagcggcgcgaaacttcacatgctaaagcgcgcgatgcggttggttatatcttctctcggcgcggctgaccggctcgccgtcgtggcttccgcggctgattccaaacggttgctaccgctgcggagaatgacagctcagggacaacgcgcggctcggcgcgtcgtagataggctcgtgtgtggccatggaaacagcgttggtgaagaagcaatgaacatagccgcgaaggttctcgaagatcggagagagagaaacactctcgctaagattttgctcttatcagacggtcacgataacgccaacaacaaaaatcaacggagattcttaagccacgtgtcttcttccatccggttcgattgtatcaaagttccggttctttcgtatggcttcgagacgaagagaaccggcttaatgcacgaaccgttagaggatgattttgcattatacgttgatagaacattgagtgtggcggtgcatgatttgagaattcagcttggtttctcggcgccggcggaaatccgagccgtttattcatgcagcgggggacccactgcgctgagtactagcgcggctcggcttggtgatttatacgccgaagaagagaaggaattgttagtagaggttagagtgcccacgtcagcattggggacccaccacgtgatgacattgcggtgtgttaatattaacaaagaccctgtgtctcaagagtttgtatacggtgcggaacatgtgtttacggtggtgccgccgcctaagagtattccaatttgtggcggtagggtggagcggcttagaaatgtgtttattacgagccgagccgtagccgagtcgcggaggctggctaagcacaacgatttttcgagtgctcatcatttgctttcttcggctcgggcgcttttggctcagcttggctcggctgaggaatacgtgcgtggcttggaagccgagcttgtggagcttcagtggcagaagcagcagcaacgggttgagagggaggcgaggtgggtggatgagagtggtgaggttttaacgccgacgtcggcttggagagccgctgagaagctggctaaaatggctaggatgaagaagtccttgaacaaagtgagcgacttgcacggcttcgagaatgctaggttttaataatgcttagttgtaatttgtatttttataaaaagaaaatgtaggttcccgaaaatgtataaaataaaataaaagtatggaattgtagttcaaaacc

SEQ ID NO: 29454 - DNA, 575 bp, Glycine max
  Clone ID: TF_GmC1719_4
gtttgagaagaaaaaaggagagttccgggtgaaagttgtcaagcagatcttgtgggtgaatggaataaggtatgagctgcaggagatatatggtattagaaattcaacggagaatgaccaaggaaaatgtgttatttgcttgtcagagccccgagatacaattgtccttccctgccggcatatgtgtatgtgtagcggatgtgcaaaggatttgaggttccagacagatagatgctcaatttgcagacaaccagttgagaggctgttggagatataggtagggtctgaggagtgaggaagatacactgttaactcctcaagctttatgtacagcccaactgttatacttcaacatttctccgtgtcttcttttcatggtgtcaccttacttttctgtattttccaataatcagaaaaacaaaagaaaatgtaatttatataggacttgcgtttcaacatgaacgacaggctggcattgcacataatttgtacaagacaatgcctccaattagcttgtttgtctgtgcttataaatggcttccattctatatgattaattaaatacattttctctt

SEQ ID NO: 29455 - DNA, 659 bp, Glycine max
  unsure (1)..(659): unsure at all n locations
  Clone ID: TF_jC-gmXLIB3563P041dc12a1
tcctctagagcggccgcttttttttttttttttttttttttttttttcggagaaaaacatctattgatataacgcaaattgcaaagaaattttgaatctaactgcccctatttacaataagaatctcaattctgaactgaaattaaaaagcttgttttccaaaaactaactccatccaaatcaatttcccaaaacccaggctctaaaacttcttctattgaagagtgaagttgaaaggctacggcttctagtcaaagccccaattctcccaaacaaattgcggaaaattctcccaaatccaccaccacgactttccctaactctgccgcttccaaccgccagagagattcttctaaaaccttcgttggagttcccgtcactctccatctccgtgtaaaccaccggcaagtggctctctccggcgaacctcccgacggcgaatcccccgcccggcaacctccatatggtcaaccctacagcctcctcctcgatctggccggcgactcttgtttccggcgcggtttgctccgacggcaactcgtggcggcacaccggacacgagtttcgcatcgaaagccacgggagaatgcaatcggagtggtagagatgcttacacggnatntcacgcgccaacgcgccaagctcgaaggcttccttgc

SEQ ID NO: 29456 - DNA, 519 bp, Glycine max
  Clone ID: TF_GmC631_3
ggccgcctgcagtccggccggattctggtcgcccagcatcgtcggctggagaaacacagaggggacacaaaaataagtgcgtccaacggaatataaagcatgagaaaaatgccctcccctcgggtgtctctgatgcggttgggagtggggacagggagggtttgtcattaggtaaaggtaaagcagcacaagtgtcattcatttctctgcaatggatatggatctctagcattcgcattcatcccctccttttctccatgcctccgtcttcacccgttattttcttgtcctgaatgcattcccagaatgttgtagagatggaaggcaagacagaaattcgtatgacatcagctgctgcctttgttgaaggggggattcaagaatcctgtgatgatgcttgcagcatatgccttgaggagttttgtgcaagtgatccttcgacggtcactacctgcaagcatgagtttcacctgcagtgcattctcgaatggggtgagagaagctcccagcgtcctattt

SEQ ID NO: 29457 - DNA, 1801 bp, Glycine max
  Clone ID: TF_GmC54531_1
gatcctccaaataatatatgcacattttatcagaaaggagtctgtgcttatggtagtcgctgcagatatgatcatgtcaaagcttctcgagagcaatcttctgctccatcttcttcagtaaccgaaccccagaccccagtttcagatactgttgcttttggaaatactagagctacatttaatggtgttgctacagctgcagagttttctctttccaggagtccttactttcttcctagtgaaccagcttggaatcaagaaccggtttggaatcaagagtttgggtataatgaacctttatcggctcctaacctcatattgaccggcgggcgccatatagcatatatttaacgctataaatggctatcctgatactttcccacgcgttcggagaggacaatgttggtcaaaccataatcacttcaccttctgagctttcaatttgttcatttgctgctgctggaaactgtccacgaggggaaaaatgccctcatattcatggggatctatgtcccacctgtggaaagcattgcttgcatcctttccgacctgaggaaagagaagaacatatgaagagttgtgaaaataagcataagcatcttgatgcattgaaacgaagtcaagaaattgaatgcagtgtttgcctggagcttgttctgtcaaagcctacagcagctgaatgtaagtttgggctgctgtctgaatgtgatcatccgttctgcatatcctgtattaggaattggcgtagtagtaacccaacattggggatggatgttaacagcacattgagggcctgccctatttgtcgtaagctatcatactttgtcattccaagtgtcatttggtactcaacaactgaagaaaaacaagaaatcatcgacaactacaaggcaaagctcaagtcaattgattgcaagcactttgactttggggaagggaactgcccttttggaactagttgtttctacaagcatgcatatcgagatggccgtctggagcaggtagttttgcgacatctaggggctgcagatggtgataccgtaattgcaaaagacatcaggttgtcggatttcctttctaacatgcatttaagatgaatggtgttgttcgtatgttccagtgctttttcagtaaaccatatgcacttgataaccccaagttttctgaaatgggtacctgagaaagaacctgcactgtgcattctgtcgttgttgtaataaagtgcatgtgttaaatggtagatggacatgctatgagggtataaacttaaaataagttcaatttttaaagcagataaatccaagtatggattgatggtggtatactctatttgaagcatggtggaaagcactcttttagccatcagtgagacttttagaagcatttcttttgtctggtggatttcaatgttaatatgcaaatattgatattggggtgatgaagtttttctgttcacattattgagatcttaagatatacctttttattgtatactgggattcccttgctgtgggtggcactgcaccaagagtcttgggaaagggttcaacatatgtatcggttttgttatctcttataggactttgtcatggccctttaggggcttatattgttgacccgtttccttttgatgaatatactagtataatcgaagtttcacccattgaatatacgattcctggtgaaatttcattcaatttaagaagcctgtttgtttaagggaaaaaaaaaaaaaaaaaaaaaaaaaaaaaaaaaaaaaaaaaaaaaaaaaaaaaaaaaaaaaaaaaaaaaaaaaaaaaaa

SEQ ID NO: 29458 - DNA, 718 bp, Glycine max
  Clone ID: TF_LIB4390-013-R1-K1-H10
ccgctttctttctctctcgccctctctctgcgttgttggagaacattcagaaaaaaaaaggagagtgagccaaaaaaaacaattcagaaaatggagaacaacgcattcagagatcgaatcttggaggacaatgaacacgaagaaatccctgattcctttgtttgctgcgtttgtctggatctattatacaagcccattgtgctatcttgtggtcacatatgctgtttctggtgtgtctataattcaatgaattgtctgcgggagtctcaatgtccagtatgtaggaatcaatattatcacttcccaacagtctgccaattgcttcactttttacttctcaagatctataccgctgcttacaagagaagggaaaaccaaactcttgaggaagaaaagcaatcaggattctactcccctcaatttgatcctgatacatgtgaatcacaagctaaatttggtcattctgggtcagctgccaatgaaggagatgatggcaccatctattatgatggagagtctgatattattggaactcctgctaaaggaaaaaaaatgcctcaggaagagctttctgtacaaaggaaattatcagttgcagatgtgacttgtacgatgtgcaagcaactgctctttcatcctgtagttcttaattggggtcatgtgtactgtcaaacttgtgtcatcaacatagatgacgagatgctcagatgtaaagttt

SEQ ID NO: 29459 - DNA, 1834 bp, Glycine max
  Clone ID: TF_GmC12260_1
gttgtcccgatccccgggtcgacccacgcgtccgaaaaaagaataataattttcatctaaaaaaaaaccaccgttgaatttgacagtcccggcgaggcatgttcttgctccgagtccactcagtggaagaggagcaccctctggatccccgaaccatcttccaatcccaaaccaacaaccctaaattcagccaacgcagaggcgcgctccacttgttccgaacctcttcccactcctctccctcttctcttctcttcatcctcgccgtccccaactacctctccttccacgacttcattcccttctgtgggccccacctcgaccgtctccaccaccttctcttcatcaggaacgacggaacagaagatcgctatagcgtcttgatcgagttcgccgatcactttgccgccgacgcattttataccaatttcaatgccaagaagttttctcctgcagaggcagaggtgtgccatattttgtttctgcaatccgtggagtattcaaaatatgcagaagctgcggggactcctcctcctggttgtacggaaataccaacttgtccggtttgtcttgagaggttggacccagatacgagtgggattctcacaacactttgcgaccactcatttgattgcccttgtgtttcaaagtggacgtatttgtcttgccaggtttgtcgattctgtcagcaacaggatgagaagccaacctgttttatttgtggaacattagatgatctctgggtttgtatgatttgtggatttgttggatgtggaagatataaagaaggacatgccattgctttttggaagggtactcagcattgctattctcttgattttaaaacacagcaaatttgggattatgtgggtgacagttatgtccatcgactgaaccaggacctgtctaaaattgatggcaagttggaggagatgaattttcgctgtatgtcactggaaggagattgtggtatgtgcgaatgccgtgaagatttgggaattaatggggcccttttcaacagcaaagttgaaacgattgtggatgaatacaaccgtcttcttacatctcagttggagacacaaagacaatattatgaatctttactagtggaggcaaaaagtaaaatggaaagttccatgtctgaagcagtggagaaagctgcagcttctgaaatgcaggatatccaaaatgaactggaaaagtgtacagaagaaagaaatgccattgctgaggtcaatcagaaactcataaaaaatcaagagatttggcggaagaagtttaaagaagctgaagagagggaagctaaatcaattaaattgatgaatgagaggataattgatttggaggaacagattagagatatcaagatttttctagaagcacaaaaaacaattgataaaatgtcagattcaaatgggatcaaggagggaacagtcctgccggtggcttatgagcaatcttctccaggccacagtaagagaaacaaaaagtctggccgaaggaggaattagttgcaacctcaaccagaacacaatattcgaacttatgggtagtctgctttttaggagggaaggacactgcttctgattattacactgatacttgttgatatatagaggcagttccaactcgtggccatggattgctgtctgcatattttagatgttgtatagtttattcttgtaaacagttagtttaacgaatttcgtggtcctaaccctttcctctctgatgccgttcgtggttacgatggtaactaaccaaaaattagcaagtaacaatttagctccattgcaatgtcagagtcatattttcagtaaattctttattaatc

SEQ ID NO: 29460 - DNA, 763 bp, Glycine max
  Clone ID: TF_GmC138647_1
gaccaggcagaggataggctgcaacaaatacctgcatgtggccatacatttcatatgagctgcattgatctttggcttgccacccataccacctgtcctctctgccgcttctccctactaaccactgctaaatcttcaacgcaggcatccgatatgcagaacaatgaagaaacacaagccatggaattctctgaatcaacatctcctagggatctagaaaccaatgtcttccaaaatgtctctggagaagttgccatcagcactcactgcattgatgttgaagggcaaaatgtgcaaaacaatcaataggagcatgatgatgcaaaactctttcaggtgtatcaagttgataatcaattctactatcaaaatgatgaaatccagatatattgacaaacttatcccttccaactcagttgaatgaagcctccagagtgtgcgcagcaactgcacagattgatacttcggcaagaaatgtcttcattcggggaactacagctttgatggtacatttgaattgactcatcattattgtaacttatggtaccctgaatgtgtcttttaagcattctaattttggttaatgtacctaagatagtttacatcacaagtgaaaagtattttatatattgctggtttttcttcttttttttcctgcgttttttcgttaaaaatgcaaagggtttggttttggatttagatcctgtcttatccattttgtcgttcccactaatgaatagcatttttgatgcatgcatacttc

SEQ ID NO: 29461 - DNA, 521 bp, Glycine max
  Clone ID: TF_uC-gmflLIB3275P162c09a1
gccaggacttagttttttatttatattatataaataataataataataataatatttcctaaccatgctcacaattcacagcatgtaatgtgagataagtagcctcactgattaaaggcacaaaattatgtaaaaattcacagggtatacccagcccaagtcccattgcaacataactttcaaacaagctaggaacttgccccaaatacacggattctctgttggatttgaaccctgcagcaaggacaagtagccttgccttttcttccatactcatcactgcaactagcacacataacttggtgcgcacatggcaagaaaacaatggagacttcatctttcatacatacaatgcattctctgttgctatttatttctttctcagaaaagtcctccagattatctaattcttgaagcagcctagcaatggtctctctttggggctttgcacccttgcagtcgcttgtaggtgaagtgcttgactggttatgcaactcagcagactgagcagatgctttaag

SEQ ID NO: 29462 - DNA, 1983 bp, Glycine max
  Clone ID: TF_GmC6133_2
gcgttcaccaagagttgattattatttgaacatcctctctctctctctcaacaccgattccagaatattccgaacgtcatgttccatcgccgttcagatccagagaattgagttgatggggggtaacaattctaaggaggataataacaattggaggcagaattcatctgtgcgttcaaggtcctctgcgtcttcttggggttcatatcctgacccccaatcaggttatggtcacgggggttacgcgtatgagccacaacagccttcttatgctacacagcagccgtattatgcccaaccggcggcggcgtcgacaaactatggcaatgaacctcagcctcatgctagcggcagagtggccggccacagaaatgagaagcgcttagacaggaaatactctcccgtcacagataactagtccgcttcgtatttttgggttttctgagaagtgcgtgtgttgatggggggtcaaaattctaaggaggaaagttggaggcagagttcatctgtcaggtcttcttcttcttcttggagtgcttacttggatccactatcgagttatggtttcaatgaaccgcaaccatcatattcttcttatggctatgaagcttatggtggcgatggaatggtacgctatgatagtacaaagctagagaggaggtactcaagaatttctgatcattacagttccatagatcaggttagtgaggctcttgcacttgcaggccttgagtcttctaatcttattgttggtgttgatttcaccaagagtaatgagtggacaggcaagaattcattcaataggcgaagcttgcatcacattgggagaggtctgaacccttatgagcaagcaatatcaattattgggaaaagcttggcagcattcgatgaggataacttgatcccctgctttggatttggagatgcatcaacacacgatcaagatgtcttcagtttctatccgagtgaaagattttgcgatggatttgaagatgtgttgagtcggtatagggaaattgttcctcatcttcgacttgcaggtcctacttcatttgcgccaataattgaaatggccatgagcattgttgaacagagtggaggccagtaccatgtgttggtgataatcgcagatggccaggtaacaaaaaatgttgacactaaacatgggagaccaagtccacaagaacagaagactgtggatgccatagttgcagctagtaaatttcctctttcaatcatattggttggcgttggagatggaccgtgggacatgatgaaggaatttgatgacaatatcccagctcgggcctttgataattttcagtttgtgaatttcacagagattatgtcaaaaagcatccctccttcacgaaaagaggcagcatttgcacttgctgcattgatggaaattccttctcagtacaaggcagcaatagagcttaagctactgggtagtcggcaagccaatgctcctcaaagacatgctcttccacctcccagatatagttctcatgctgcaaggtttgagccaagtatccctcctcaacatggcaacagccacccatttgccacagctccttctgccccaagttccacttctgacaatcaactttgtcccatttgtctaagcaatgcgaaagatatggccttcggatgcgggcatcagacatgctgtgaatgtggacaagatcttcagtcatgccccatgtgcaggagccccataaatacaagaattaagctttactaatcgtatgtggcttgggaattggtattattttttttcttatttttgtgttgtgccagtcacaattctttggttttttcttgattcgttaaattcatcaaaggttagaagtaggtgtggttgggtgcaacacttgatcagatgtatgtttccagatatgaaacggggaattctccatcaattattgtagatatattcatttgatgaattatattttttctttttttttcttcctaaaa

SEQ ID NO: 29463 - DNA, 322 bp, Glycine max
  Clone ID: TF_9204912
ggaaggcattaccgaaagtcatgttacatttgcaaaagcctttgtggaagggggggttcaagaatctcttgatgatgcttgcatcttatgccttgaggatttttgcaaaatttatcctgccactgtaactaattgaaagcatgaattccacctgcactgcattcttgaatggtgtcagataagcttccaatgtcctatgtgttggcaacctattctctagagggatactacatagtaagaactgcttgaggcaatatatctagaaaggagctatatggataccccatttaaaactgctgcgagttttcttcatccaacactt

SEQ ID NO: 29464 - DNA, 534 bp, Glycine max
  Clone ID: TF_GmC1738_6
ccacgcgtccggcgagaagacgacagaaggggaggatggagcagagctgcatgcttttccctgcaaccatcatttccatttgtcgtgcattgtgaaatggctgaagatgaatgcaacttgtcctctctgcaagtacaatattctcaagggaaacgaacaagtgtgacagaaaacgaagaacctcccaagtcccaactgggtgtttcaacaactgttgtgtaatatgtatatataatttcaagccaagaaagagtttacttccctactcgctgggttttgatggttgtttcgtttagctgtttctgtagagaaaagatatatagagcatttattgacgaataagttagcccctgtagtctacttagaattatttcgtcctttgttagattcaaaaatgtccaatttgtaggttgttcatttcttttctgacggaaactggattgtttcatttgctactggttgagtaatcgtaggctttattacaaaaaaaaaaaaaaaaaaaaaaaaaaaaaagcggccgtcttagaggaacca

SEQ ID NO: 29465 - DNA, 1120 bp, Glycine max
  Clone ID: TF_GmC1722_1
gtctcgaggctctttgtgcttataactattaaataaggagtttgatgacaggttcccagcccgggtcttggggtcgtttcgctttggctcctccaacgaaattatgtcaaagaatattcctccgtctcgaaaagaggcagcattcccgccccaaccactgatggagattccttctcagtttaagcccggctcgaggcttaatctcttgggtggtcgaaatgcaaatgctcctcagagagttgctctcccaacaccatcatatggttcagcatctatgggcatttcaaaaccttatggttcagcatcttttggcgcttcaaaaccctatggttcagcatcctttgatgccccaaaaccttatggttcagcatcttttagcagttcaaaaccttctcatgctgctagctttgagcagagtgccccttcttattatgacaacacggaccctgttggcacagctcctcctgccccaagttcctcatatgacaatcagctttgccccatatgtctgaccaattcaaaagacatggccttcggatgtggacatcagacatgttgtgaatgtggacaagatcttcagtcgtgtcccatctgtagaagccccattaacaccagaattaagctttactaggcggcctcttccgttgtgaattaattattttgttgtgtaagctaaaattctttgatttttttaaccttctctggttgtatacaaacgttagatcagctgtgtctattgatgaaaaatggtacaacaaaaaaatatccaaaccaattaaattatttggttttatttggtttggacttgtaaaaaaattcttcaaaccccaaccgaacaaatgtgaacaagaatttgtttggtttgtttcttgggttgtccaaacaaaaagaaaatgttaattcgaccattttagtatccagagtaaattggtgaaagaaaagcaatatttcagcacatgtagtcaactaattcttatcataaataacaaatcctaaagttatacctaatgatagaaatctgagtcatgtttttttattttttaatcggtaaattgttagtggtacaacgttctagttttttgttagctacaggaatcgaacccctgaccttatctaccct

SEQ ID NO: 29466 - DNA, 396 bp, Glycine max
  Clone ID: TF_GmC1722_3
ttttatatgtacaatattaggattggatttgctatgattttctatgaacttattaacaaatcgaattggtcttttgcagctttgccccatatgtctgaccaattcaaaagacatggccttcggatgtggacatcagacatgttgtgaatgtggacaagatcttcagtcgtgtcccatctgtagaagccccattaacaccagaattaagctttactaggcggcctcttccgttgtgaattaattattttgttgtgtaagctaaaattctttgatttttttaaccttctctggttgtatacaaacgttagatcagctgtgtctattgatgaaaaatggtacaacaaaaaaatatccaaaccaattaaattaaattaggatgatgctgatagccacgat

SEQ ID NO: 29467 - DNA, 631 bp, Glycine max
  unsure (1)..(631): unsure at all n locations
  Clone ID: TF_GmC1722_4
cagcatttgcactttcagcactaatggaaattctttctcagtataaggcagcaatagagcttaatctcttgggtagtcaaaacgccaatgctcctcagagagttgccctcccaacaccatcatatggttcagcatctatgggcacttcaaaaccatatggttcagcatctttcggcgcctcaactccttatggttcagcatcttttgatgccccaaaaccttttggcagttcaaaaccttctcatcctgctaactttgagcagagtgccccttcttattatgacaacagggacctagttggcacagctcctcctgccccaagttccacatatgacaatcagctttgccccatatgtctgaccaattcaaaagacatggccttcggatgtggacatcagacatgttgtgaatgtggacaagatcttcagtcgtgtcccatctgtagaagccccattaacaccagaattaagctttactaggaggcatcttccgttgtgaattaactattttgtggtgtaagctaaattctttgattttttttaatttttatcttctctggttgtatacaacgttagatcagctctgtttctattgatgaaaaatggtgcaataaaaaaaatccnncccnatt

SEQ ID NO: 29468 - DNA, 882 bp, Glycine max
  Clone ID: TF_GmC883_1
gttcgccatcttccatagaatacggctgcgagaagacaacagatggggaatggagaagtgagcggtgagaggaaacagaagagagaagagcaatcggtgagtgaatggaatggattcaggtcctccggcgaacgatttgtgttcagtgtgccatggcaactttcatattccatgccaagccaattgttctcactggttttgcggaaattgcataatgcttgtgtggcagcacggatcagtgggttgttcatgcaagtgcccactgtgtcgtcgagccatcagtctcttagtccccacagaagagtctctgaggcaacagcaggaccccgaagtttcccagattctgtcaaagattcatgcctataaccgtttcttcggtggccaacccaccactctctatcagagactgcgagatcttccctttctcttgcacaggctgctcagggaattcctccaccctcacagatcccttcctcttctcattcgcgctcgcgtctttgttgttatgatagcgagtgttatatacctcttcagccctattgacatcattcctgaagggatattaggagtagttggtttcttagatgatctcctaattgtgctcatctgcttcctacatgttgctgccctttatagatcagtactctacctccgtcatgggggttcctgaacatgttctacaattttacaggtaaaatgagatgatgatgcctagataggtgccggatatggatagtgggcattattctttcattttcaaaattgaactactttgttttctatgtacatagacaagttcaatttcaaatagtggaattagtaatggaaattacaatgaaaaagctctcttttaaaaaaaaaaaaaaaaaaaaaaaaccaaaa

SEQ ID NO: 29469 - DNA, 1709 bp, Glycine max
  Clone ID: TF_GmC247_3
aattcggctcgagatagaaagggaaagacaaagagagctgcagggcttgttggagcaccgagctgtttctgattttgctcatcgcaaccgtattcagtcactgctcagaggtagattcctccgaaatgaaagaactgttgaagatgagaggccaccgtctatggctgcaagtgaattagttcagctaagacaacggcacacggtctctggtttaagggaggggtttcgttcaagattagaaaatattgttcttggtcaagcaggcaccagtcctgattccacatcaaatagtaacgcgagtgaaacaagaggtgatgggagccaagcaaacagtctggtagatggccaacaagaaaactatgaacagcagattaggagcctggaaactgatgtgcgtcagttgcctaatcgaacaggaactttggagagtagcacaagtgagagtattagttggcaagaagctagtaatcaaggggggaattggcaggaacaaattgctgaagaagggggaggaaactggcaacggagtccatttgatcagacgagagatggaagggcagtcagtgattggccacaggaacctcccagaaacttaactggggaagatcctcatccccaggaagctcaaagaatttggcatgatgataacacaagggaaactgttggtaattggtccgaaggaccttctggagcttcgaggaatcgccgtggggttcccataagaagattcaatagatttcatccacctgatgatgataatgtatacagtatggagcttagagaacttctgagcaggagaagtgtttctaaccttcttcgtagtggtttccgtgaaagtctggaccaattaatacagtcatatgtggaaaggcaaggtcgtgcaccaattgactgggatttgcatcggaacttgccaacaccaactcctgcctctcctgaacgggacccagaccagcagggtgaggaacgtgatgagggtcaacatgaaaccattaacaggccttcactggtgttgccttctccaccagtacctccgccacaacctctggggcaccaggatttgcatcaaactggatggtctcgccaaagcatgcatcgttctgaaattgagtgggagataatgaatgatttaagatcagacatggcaagacttcagcaaggcatgaatcacatgcagaggatgttggaggcctgcatggatatgcaactggagttgcagcgctctgtcagacaggaagtatctgctgctctaaaccgctcaggtggtgagaatggatcgagtgctgagacatctgatgatgggtctaaatgggggcatgtgaagaaaggaacttgctgtgtttgttgtgataaccatatcgattctcttttgtatagatgtgggcacatgtgcacttgttcaaaatgtgccaatgagttaattcgtggtggtggtaaatgtcctttatgccgagcaccaattcttgaggtggtccgagcatattccatactgtaaaaaggaaattaagaggacatagagaagaaaaaaaagtctcaggaagttgatctcaattctaaaggtgtcgaggttcttatttataagtgtttagtagatgcctttgtttttctgattatatggaactccacgaattgtataattggattagcaaatggcgctgttgattcatcattcttacgtaaataaatagttgccctgattattctttgaa

SEQ ID NO: 29470 - DNA, 412 bp, Glycine max
  unsure (1)..(412): unsure at all n locations
  Clone ID: TF_13240189
gctactttataatgagatatctgagctaaggaaatcaataaagggctcatggaaatgcagatagaattacaacaatccatgaaacaagaggttcaaacagttaaaaaagaagaaaagaagtccaataacaggactccaaagaaaggcaactgctgcatttgctatgagatgaaagttgactcagttttgtacaggtgtggacacatgtgtacatgtctcaagtgtgccaacgagttgcaatggaacagtggaaaatgttctatatgtngtgctaaaatagaggatgttgttcgcgtatatgttgacggttagcctgtcacagcggacagaatctcactccagaggactatgcttagtcctgaaacttagtaaactgctacaattaacaccatacaccacaaatgactttctc

SEQ ID NO: 29471 - DNA, 1580 bp, Glycine max
  unsure (1)..(1580): unsure at all n locations
  Clone ID: TF_GmC1712_1
caattcgtccgtatggctgcactaggagtacagaagcggggttttcagtcaaattgaacggaaccaccgtttctctctctctcacgcacacatggtgctgccactgtcactcttctcttctcctttctgcttcgccgattctctatttttgcgcgcaatcgattgtatgctttgggccagtcgttaatgataacttgaggtctggatgatgctttctgattggttgtttacatattgtaattcagaatgtggaactttgcatcgaattgcattgctggaactgtgggactgaaaaatgattcaaagcctactcattctgcttcggaatgttctgatgatgaaaactctgttataggcagagaggaagggctggaatgcccaatatgctgggaatctttcaatattgttgaaaatgtgccctatgttttatggtgtggccacaccctttgtaaaaattgtatcctcggactgcagtgggctgttgtgaaatttccaacactgcctgttcaacttcccctttttatctcctgtccatggtgcaaccttctgtctttccgtttagtttaccggggaaaccttaaattccctcgcaaaaactactttcttctttggatggttgagagcatgattggtgatagaggggatggttgagaacatgaacggtgatagagtgaagtcacattctactgtttgcggggatcatcaaccagtgtggccaattatagacagtttaaccaacggaagccaagtaagccatgacagccttcagggagggcaagtttgccatccagagtcttcaagttccaatcattatcatggtgataccagtaattacttaagtatagaaacactgcatgcatctctgcggaagtcattggttttatttgttcacttgacagcaaagttcccattgatcattatatttcttttgattgtcttatatgccataccagtcattgcagccattttggctctgtatatacttgttaccattctgtttgctctcccatcatttctcatcttgtactttgcatatcctagtttggattggcttgtcagggaaattatcacttgagatcaaagctgtatttcttctgctttgcaagcattatgaatgtaactttgcctcaccttgtggccccttcatccagtgtcttctacttcgtaattggtcaacatttccatttgcagctgtatcttttatcttatcatatatagccccagtcaatctcagtacgctttttgaatctttttagctctggttgagcttggctggttaggaggagggatatcagtttttggcataaactatttggacaaccaaggccgtggagtgaataaggtaatgaatcgtgattttgccttttcctggtggcaaatggttgtttttatctgtatttgaacttcagaagaaccccctaatttattcatcaagtgggtcattatcagaaaagctgtttttttttttttcttttcatgggcacatttggatgctcctatgaatactgctgacagtatttttgctaattgtaatctgtaattattattagtagagctattttcctggccaanaaaaaaaa

SEQ ID NO: 29472 - DNA, 642 bp, Glycine max
  Clone ID: TF_GmC1712_3
tttgggtgcgagaagacgacagaaggggcggaaccaccgtttctctctcacggtgctgccactgtcactcttctctactttctgcttcccagattctctatttttgcgcgtaatcgaatgtggaactttgcatcgaattgcattgctggaactgtgggactaaaaaatgattcaaagcctactcactctgcttcagaatgttctgatgatgagacttctgttataggcagagaggaagggctggaatgcccaatatgctgggaatctttcaatattgttgaaaatgtgccctatgttttatggtgtggccacaccctttgtaaaaattgtatcctcggactgcagtgggctgttgtgaaatttccaacactgcctgttcaacttcccctttttatctcctgcccatggtgcaaccttatgtctttccgtttagtttaccggggaaatcttaaattccctcgcaaaaactactttcttctttggatggttgagagcatgaatggtgatagagggaaatcacattcacctttctgtagcgataatcaacaacactcaattaaagacaatttaaccacgggaagccaagtaagccatggaaaccttcggaggggtcaagtttgccacccagagacattgagttcc

SEQ ID NO: 29473 - DNA, 1759 bp, Glycine max
  Clone ID: TF_GmC66639_1
aatggaagtgagaggttggaaaggaaggaccgcataccaaccacaagtcactcttctgttcttctacacactatcttgatcttttctattgcccttttccttcactttactacttgcatccaattctctcgcgaaattaataaaggaactttaactttcgcgagcgacacaaacgcaatcaaatcaaatcatagattgatttggcaaccccaattcccttttgattatttttttttttttatgaattaaagcaatgggtttggttgcttagtgtttttttggacgcacgaaagatgattccttggggtggcctcagttgctgtttgagtgctgctgctctttaccttctcggcagaagcagtggcagggatgcggaaattcttaaatccgttacaagggtcaatcagctgaaggaactagctcaactgttagatgcagaaatattacccttgattgttacaatttctggaagagttagctctgaaaccccaattaactgcgagttcagtggtttaagaggtgtaatagttgaagaaacagcagagcaacattttcttaaacacaatgatgctggttcctggatacaagattccgctttgatgctatcaatgagtaaagaggttccttggtatctggatgatgggactgatcgtgtgcatgtggttggagctcgaggtgcttctggttttgcattacctgttggaattgaggcatttgaagagtcgggtcggtcacttgtacgtggaactttggattatctgcaaggtctcaagatgcttggagtcaagagaattgaacgggtacttccagttggaacttccttgactgttgttggtgaggctgctaaagatgatgttggcgctattcgaattcagcgaccccacaaagggccattttatgtctctcccaaaacaattgatcaactaattgcaaatctggggaaatgggcaaggtggtataagtatgcttctgtgggcttgacggtgtttggtgcttatctgatagccaagcatgctattcggtacatattggaaagacggcgccgcagcgaacttcaaagaagggttcttgctgcagctgctaagaagtcgggacaaaataatgatgttgaaaaggccgacagcttatcagatggtgctaaaaaggatcgcttaatgccagatttgtgtgtaatatgccttgagcaggaatataatgctgtttttgttccgtgtgggcatatgtgctgctgtacagcttgttcttcacacttgaccaattgtcctctctgccggcgacagatagagaaggttgtgaagactttccgtcattgagtgttgagcatacatggtaatccaacaaaaaaaaaagtcacatgcaatgaggaattgtgcttaagaatccaggagcaacaaattggtgaattagatattttttgcatgctttgtctgtgagcaattctaaaaaccaacggcctttacagacatatcaagacagcgatgcttttagcatcaaaacctgtacatatttatcagaagaagttatgttgcttctatctgctgcgaaattttatattcttacaggatgtattctactttttattgagtgtttctcttctgatatactcttacttaccctgtggaattctttttaaagtgaaaacactttgttaatcgtaccaggagctacttattgtatactcgagtccttaacgtgcgtatgaactattttatagattaaaaaaaaaaaaaaaaaactcgagactagttctctctctctc

SEQ ID NO: 29474 - DNA, 775 bp, Glycine max
  unsure (1)..(775): unsure at all n locations
  Clone ID: TF_GmC12260_3
gggtcgacgctacgatacggctgcgagaagacgacagaaggggatctcagaaacaatctatcaaacacatattccgataaacagaaacaccaccgttgaatttgagaatcccggcgaggcatgttcttgctccgagtccactcggtggaagaggaccaccctctggatccccaaaccatcttccaatcccaatcccaatcccaatcccaatcccaatccaacaaccctaaattcagcgaacgcagaggcgcactccacttgttccgaacctcttcccattcctcgctcccaacccagacctctctttcttctctcctcttcatcctcgccgtccccaactacctctccttccacgacttcattcccttctgtggaccccacctcgaccgtttccaccaccttctcttcatcagaaacgacggcaccgaagatcgctatagcgtcctcatcgagttcgccgatcactttgccgccgacgcattttttaccaatttcaatgccaagaagttttctcctgccgaggcagaggtgtgccatattttgtttctgcaatccgtggagtattctgaatatgcagaagttgctgggactccgcctcctggttgtacggaaataccaacttgtcctgtttgtcttgagaggttggacccagatacgagtgggattctcacaacactttgcgaccactcatttgattgcccttgtgtttcaaagtggacgtacttgtcttgcccaggttgtcaattctgtncagcacaggatgagaagccacctg

SEQ ID NO: 29475 - DNA, 515 bp, Glycine max
  unsure (1)..(515): unsure at all n locations
  Clone ID: TF_LIB4280-025-R1-K1-G6
ccacgcgtccgctttctctctctataactctttctcacccgctagggtttccttttcatcgcatcttgagtttgcaacctcgtcttgtgatttccatggagggtgctgggatggaagagaataatattattaatgatgatgataataataacaagtctgaggcgcatttgacttctgccgctgcttttgtggagggtggaattcaagacgcttgtgatgatgcttgcagtatatgccttgaagctttctgtgatagtgatccttccacggtgacgagctgcaagcatgagtttcatcttcagtgcattctcgaatggtattactatttggcttttcattaattgattcttttgggttaatcatggggattaattttgacgggactgtactgtgtcggtaatgatgcgcgctttgcttacttattattattgctggggactgctaccactggtatanctgctgcaatgttttcttggtcactgatgtggttttctcaagtaaccantttgtgtggc

SEQ ID NO: 29476 - DNA, 815 bp, Glycine max
  Clone ID: TF_GmC3032_1
gtctttgactgggtattgcaagttacaactcctgcttcgccctcagtagagcaggaccttgagcagcatggaaaggatctccttggcctacttgggaccagcactaccatcgtaacaactggtcacagaatgacttaactaatcagcatctagtaattgatttggagattattaacgacttgagaattgacatggctcgattacagcaaaggatgaataacatgcagagaatgctggaggcttgtatggatatgcagcttgagttgcaacgatctataaggcaagaagtttctgcagctctaaatcgctctgctggttcatcaggaatacatgattgcgagtcaccagaagataaatctaaatgggaatgtgtaagaaagggactttgctgcatatgctgtgaaagcaatatcgattctttgttgtacagatgtggtcatttgtgtacatgttcaaaatgtgcgaatgagttgcttcaaagcagaaggaagtgcccaatgtgtcaagctcctgtggtggaggtgatacgtgcttattctatacaataatttgacattaatataaaggtcacacttttaacaaaatacaggattctaacaagttttatttcctggacgtttccaggtacactttttcgttttttttttttttttttataattttcttactgtgattactgtatttatgtcgagtgcaccaatggaacacatgatggcatttttttgcggccatgattctcatatgaataaaaattgtacgtcgtttaaaaaaaaaaaaaaaaggttctagatcgcgattttttggggccatgattc

SEQ ID NO: 29477 - DNA, 531 bp, Glycine max
  Clone ID: TF_GmC386821_1
ccacgcgtccgtgttcctccactagctaagctagtcgctactcccaatctcagagcgcgccgccggtctccaccgcggccaagaacagtgctactagccaagaaagctggggaacaggctgcttcctgggacgaggagcaggacgacaagggatctggagccggagcccccgatggcggtgacgggaacctcggtggcagccgcggcgacgatgctggcggcggcggcggccatcttcatcaccttcgtcatctgcttctacctcttcctgtgcgcgaagcggtaccgcggggccgccccgaccatcggcggcgacagggcccggccccgcttcgtgttcgcgggcggcgcggggtgccacggcggcctcgacgaggccgccatcgcggcgctgccgagggaggaggcggcggcggcgggcggggactgcgccgtgtgcatcggcgagctggccgcgggggaggccgcgcgggtgctgccccgctgcggccacgcgttccacgtggagtgcgtcgacatgtggctgcgctc

SEQ ID NO: 29478 - DNA, 529 bp, Glycine max
  Clone ID: TF_jC-gmro02910011g03a1
ggctcgagggcggactccggcggcgacctcgccggcatcatttgttcgatctcccatgagcccctcaacctcatcagcgaggatcttcaatcggtctccatctgcgtccacgtttttcacgagctctgtctgcggcaatggttggagtactcttcgaaagggaagaagcacacttgccccatttgcaagcagggttgcagggccagcgacgcttgctggctctattttcagtcagtgggagatgcgaacgatagtgtgaagcctcagaagagctttgaattggaggaagatgctggggttcctgcgtagggaggtgaatgtttcggggcttaattctcaggttgaagggcaaacaaaggaattggaaggacttaatgagaagctttgtacttgcaaggagcaggcaaagatagagatagctttaaagaatgaggttttaaataaaaaagcatcaattccagcttcaaatgaaatcagaggtgaaatactctgtagccttctgttttattttggacaagttaactattta

SEQ ID NO: 29479 - DNA, 1069 bp, Glycine max
  Clone ID: TF_GmC5878_3
ggggaaagtgacaaaacttgaatggaagaaggcatatctttaaattgaattgatggccgcgcgagacctggtcaactctcgtagtgctgttgtgcaaacggttaatggtgtcaaccgcaagtacaatgatccaagagctggaaggaaggggaggatttctagccgtgctaatgaaatttcaggaactggtgtagatgattttgagtcaaggagtcttgatgctgatgatttaaagatagaactacaggctaggaaacaacgagaggcagctctggaagctgcattagccgagaaggaatttgtggaagaacagtaccggaaaaaaactgaagaggccaagagaagagaagaagccttggagaacgatttagcaaatatgtgggtccttgttgctaagttaaaaaaagacgggggtgctgttccagaatcaaacatcaatataaaaaaagttgatgaggaagcacatacaaatgatctgaaaactaatggcattgaaagtgatattgtccccaaggagcagattttagatgtatcaataccagaaaatgaaatagccaatgaagaccctttggttgttcgacttaaggcacgcatgaaagagatgagggataaagaattcaagcatcttggcaatggagatgccaattcccatgtttgtaaagtatgttttgaatcttcaactgcagcaattcttcttccatgccggcatttttgtttgtgtaaatcttgctcacttgcttgttctgaatgcccaatatgccgcaccaatatttcagataggctttttgcttttacttcttgactcttcaaaaaaagggttttatctcattgaactaatatatccgtgtggccacaggtgcaattctttcattgtatgtaaaactgtttaaaagttatatcgataatatctttcttttactctaccctggaaattgtataatagggggagaccaaggggtgggaaaaaggaatgtaaaaaggaaattgaaagggtgttaaccaccctgccgaagtacatgtgcacatagtgtgtttgttttaatgtaataaagcagattttttgttgaaa

SEQ ID NO: 29480 - DNA, 861 bp, Glycine max
  Clone ID: TF_GmC5878_5
ttctagaagaggaatgcattaaaaaggttgaagaggcccaaaaaaaagagaagcctcgttggagaatgatttggcaaatatgtgggttcttgtggctaagttaaagaaagaagggggtgccgtcccagaatcaaacatcaatataaaaaaagtggatgaggaagcacataaatatgatcggaaaactaatggcattgaaagtgatattgtccccaaggagcagattttagatgtatcaataccagaaaatgaaatagccaatgaagaccctttggttgttcgacttaaggcacgcatgaaagagatgagggataaagaattcaagcatcttggcaatggagatgccaattcccatgtttgtaaagtatgttttgaatcttcaactgcagcaattcttcttccatgccggcatttttgtttgtgtaaatcttgctcacttgcttgttctgaatgtccaatatgccgcaccaatatttcagataggctttttgcttttacttcttgactcttcaaaaaaaggtcttttgcaattttttatacatacgagccatattctgtacaagtacaaatttataacatgttttcattttttggctgttgaaaatttccagggttttatctcattgaactaatatatccgtgcggccacaggtgcaattctttcattagtatttttgtatgtaaaactgtttaaaagttatatcgataatatctttcttttactctaccctggaaattgtataggccaaggggtgggaaaaaggaatgtaaaaaggaaatggaaagggtgtaaacaacactgctgaagtacatgtgcacatagtgtgtttgttttaatgtaatacagcagattttttgttg

SEQ ID NO: 29481 - DNA, 1148 bp, Glycine max
  Clone ID: TF_GmC1712_4
tacggctgcgagaagacgacagaaggggacgcacacatggtgctggcgctgtcactctggtcttctcctttctgcttcacccattctctatttttgcgcgcaatcgaatgtggaactttgcatcgaattgcattgctggaactgcgggactgaaaaatgattcaaagcctactcattctgcttcggaatgttctgatgatgaaaactctgttataggcagagaggaagggctggaatgcccaatatgctgggaatctttcaatattggtgaaaatgtgccctatgttttatggggtggccacaccctttgtaaaaattggaaaaaaaaaaattcaatcttttaattctcactctatcatgatttttgcgttcaattgcttccaccttcggtttaaacttggtacacctctgtcacaaatgatatgtttcaaacttgatgctttgaccccgtcattagtgaccacattgaggtccaaatgatgcgtgtttcctgactatttctatagtattgtgacttgattcagaatgtggaactttgcatctagtttaattgctggaagtgtgggtctgaaaaatgattctgcaaaaccaactcaccctgcttcagaatgttctgatgatgagacttctatggtaaccagagaggaaaggctggaatgcccaatatgctgggaatcctttaacattgttgaaaatgtgccttatgtcttatggtgtggccacaccctttgtaaaaattgcatccttggattacaatgggctgtggtgaaatttccaacgctgccaattcagcttccgctttttatctcctgcccatggtgcaaccttttgtctctccgtttagtttaccggggaaatctgaaattccctcgcaagaactactttcttctttggatggttgagagcatgaacggtgatagagtgaagtcgcattctactgtttgtgggggatcatcaaccagtctggccaataattaaagacagtttaaccaatggaagccaagaaggccatggcatcccttggagagggcaagtttgccatacagagtcttcaagttccaatcaatatcatggcaataccagtaattacctaagtatagaaacactgcatacatcactgcggaagtcggttggttttatttgttcat

SEQ ID NO: 29482 - DNA, 715 bp, Glycine max
  Clone ID: TF_GmC1712_2
gcttcagcggctatgcctcgttaattcttccgatcttatttcacatttcatttccccatttttctcgcatttccttcaattagggtttcttttttcttagctgttgcaattgattttcattttactcacctggttcggttttcacatttgtttaaacttgttacacctctgtcacgattgatgtggtccagacttgatgctttgatcccatcattaatgaccacagtgaagttcaaatgatgcttgtttcctggccatttctatagttttgtgacgtgattgagaatgtggaactttgcatctagtttaattgctggaagtgtgggtctgaaaaatgattctccaaaaccaactcactctgcttcagaattttctgatgacgagacttccatggttagcagagaggaaaggctagaatgcccaatatgctgggaatcctttaacattgttgaaaatgtgccttatgtcttatggtgtggtcacaccctttgtaaaaattgcatccttggattacaatgggccgtggtgaatttcccaacactgccaattcggcttccgctttttatctcctgcccgtggtgcaaccttttgtctctccgtttagtttaccagggaaatctgaaattccctcacaagaactactttcttctatggatgggtgagaacatgaacggtgatagagtgaagtcacattctactgtttgcggggatcatc

SEQ ID NO: 29483 - DNA, 885 bp, Glycine max
  Clone ID: TF_GmC399_5
cggacgcgtgggttctgaaggtaggccatcatttgtactctcaacttgcagcaatgaaatgacagctggatccatatgcggatcatctgatggctggtcaatgcgcatcttctctgagctggtggcatcatcacaaagggaaaggtggtcttttgatagtgagtgtttcggatctggtcgtcacaagataagtggatccagtagcaggttctcgtattctccctccatggaactacaatcttgtggggcttgctcaaagctattgactgagagatcaacatggagcaaccagaagtttatttccaacagtgacctgtcagttgttgctgtactggtctgtggccattcatatcatgcagaatgtttagaggctatgacatcggaggcagataggtatgatccagcatgtccaatttgtatggttggagataagcacttgtcaaagttgttgtccagaaaaggtcttcgggctgaatcagacataaaggccaagaaccacaagatatccagaaaccgtgtagttgatagctaccttgatggtggttttgatgtttttgatcgtcaaaaaggcattgatttgagaggaaaagtgtcaaaatggaacctagctccagtgcaaggagctcatttggaaagccattcttgaggcggcacttttcacttggatccaagtggagccgttccctgtccgagaatgattctgccaggaagaaaggcttttgggcaagatatcgttaagattgagttccatttgctgtaagagtcaatcattctctaattatagtaataataacaccatcaatttagaattaatattttcgatctaaactaactttactgataactttgaatgctttaaaataattaatttttacttttgaccag

SEQ ID NO: 29484 - DNA, 983 bp, Glycine max
  Clone ID: TF_GmC1125_1
gcctcagcctttatgggatcggccctcacgtcataccaattggtcccagagtgacataaataatcagggttaaggaattgagggggatattgttaagaacttgagaattcacatggttaggctccatccaaggatgaataatatgcacagaatgctggaggcctgtatggatatgcagcttgagttgcaacgctcaataagacaagaagtctctgcagcagatgaccaagtggaattcatcacaggaatacatgacggtgtttcaacagacgataaatctaaatgggaatgtgtgaggaaaggactttgctgtatatgctgcgaaagcaatattgattctttgttgtacagatgtgggcacatgtgcacatgttcaaaatgtgctaatgatttgctccaaagtagaagaaagtgtccaatgtgtcaagcaccagtggtggaagtgatacgagcttattctatacaatagttttgacattaaagggtcacacatataacagaatacaagatcctaacaagttctatctcctggacgtttccaggtacgtttattttaataaattttttctgttcttgctgtgattactatatttatgtcgagtgcaccaatagaaaacctgatgtctctttttgtggccatgattctgaaaggaataaaaaaagtattttgtttgatttggttgtttgagttttttttctttcaattctatattgttatcaaaatcagatcggttgtcatgtaaatttgctttttctgttttcagcgtattgtttgtaggtttcttaatgaagaaatagccgaatttatgtgacaagtgacggctcagttcacgcttgggttatgtactatctagaaaaacatttttttcccataactatttgacattttgtttttgtatagaattgacattttttccttatatatttgatatttcttacatgaagggggggggggggggggggggggaaaaagggcgcgccgc

SEQ ID NO: 29485 - DNA, 548 bp, Glycine max
  Clone ID: TF_GmC1125_2
gtctctgcagccctaaatcgctcaactggttcatcaggaatacatgacggtgtttcaacagagataaatctaaatgggaatgtgtgaggaaaggactttgctgtatatgctgcgaaagcaatattgattctttgttgtacagatgtgggcacatgtgcacatgttcaaaatgtgctaatgatttgctccaaagtagaagaaagtgtccaatgtgtcaagcaccagtggtggaagtgatacgagcttattctatacaatagttttgacattaaagggtcacacatataacagaatacaagatcctaacaagttctatctcctggacgtttccagcgtattgtttgtaggtttcttaatgaagaaatagccgaatttatgtgacaagtgacggctcagttcacgcttgggttatgtactatctagaaaaacatttttttcccataactatttgacattttgtttttgtatagaattgacattttttccttatatatttgatatttcttacataaggttaataattttattattaaatttttattttatat

SEQ ID NO: 29486 - DNA, 1442 bp, Glycine max
  unsure (1)..(1442): unsure at all n locations
  Clone ID: TF_GmC30762_1
gccccacgtctcgaactgagattaatactttggtaccaatctcattgattaaaataaaaaagcttgtgagagacagataagggaaacggtgtgccacgaacacgagctacttgttacagaatacaactaaagtaataataacgtttaaaatgtaactccaaggtccaaacttcgcttctgggtgtgactccaaacaaaaactactacttgcttagcacacaatattatgaaaaccaccgcagaggttgtttcatctcattgtcttgttgtagcagagtgctctcaatccagccccacacaactttctgctatggaacctcagattctgaatttggggtgcatgcattacagaaggagatgcaagatcagagcgccgtgctgtgatgaggtttttgactgtaggcattgccataatgaagctaagaattctgaggaggttgatgctgtggatcgtcatgatgttccacgccatgaaattaagaaggttatctgctccttatgtgatgtagagcaagatgttcagcagtactgtataaactgtggaatatgcatgggcaagtacttttgtactatatgcaaattctttgatgatgatatttcaaagaatcaataccactgcgatgaatgtggcatttgcagaactggaggcaaggataattttttccactgcaaccgatgtggatgttgctactcaaaggtaatggaaaaggggcaccgttgtgtagaaggagcaatgcatcacaattgccctgtttgctttgagtatctttttgatacagtaagagaaatcagtgtcttaccttgcgcgcatactatacatttagactgtgtaaaggaaatggaaaaacatcagaggtactcatgtcccgtttgctcaaaatccatctgtgacatgtcaagtgtgtgggagaagcttgacgaattgattgcctcaactccaatgcctgaaacctacaaaaacaagatggtgtggatactttgcaatgattgtggagtaaactctcatgtacaattccatattgtggcccataagtgcttaagttgcaactcatacaacacaagacagatacaaggagtacctgccacatcaagctcttctagggtaactgaaatggtgagatgaacatttgattgcaaaaaggtctcttggaatggaaactgttagactattgatgtgatagagaaattagttgcaagttgttataatttaaatttcaatagaaacagctcttgttgaacagagttactctgttatgacactaaaattaaactctagttatcaaacttagatattaggaggataaacttggtttaggatgtgttgtattagtgttcttaaaacctaagaaacaattagacttcattgtcaatgccatcatggcattatctgaaaatcatgtaaagattcagaacaccgataannnnaannnannnnnaaaaaa

SEQ ID NO: 29487 - DNA, 753 bp, Glycine max
  Clone ID: TF_GmC5878_2
ccacgcgtccggttctaacatacatcaaagatattgctagatgttcaaactgttaagacacccgagtgtaactttcaatctctgtaattttcgaatttgttggacaggggatggttaggtctgagaaaacaaataattttttgatatttactgcaaaagtttataacttatgctgaaaggtcttcaaagattcagtgagattaatgatttcaggcgcgcatgcaagaaatgaaggaaaaagaactcaagtaccttgggaacggcgatgcaaattcccatgtttgtaaagtatgttttgaatctccaactgcagcaattctgcttccatgccgacatttttgtttgtgtaaatcttgttcacttgcttgttctgagtgtccaatatgccgcacaaatattacagataggatttttgcttttacataacagagggctctatcccattgaattaatatactccatgctgttacgggtgcaattcttttattagtttgcctgtatgtaaatccgtttaaaagatatatcaatatcttctttcttttatactaccccaggggaactgtattatagggggggggtggggggggggggacaaaggggtgcggagaaagaatgtaaaaagaaaaaaggtgtaaacagcactgctgaagtacatgtgcacaatatacgtttgttttatgtaatccagcagaattttgtttccccatcctctgtatgttctttactgagtgtaagagctgaggtttcttattg

SEQ ID NO: 29488 - DNA, 932 bp, Glycine max
  Clone ID: TF_GmC5878_4
aattaaggaaataagaactcaagtaccttggaaatggcgatgccaattcccatgttgaaaggtcttcagagatttagtgcgatttatgatttcaggcgctgaagaggccaagagaagagaagaagccttggagaacgatttagcaaatatgtgggtccttgttgctaagttaaaaaaagacgggggtgctgttccagaatcaaacatcgataaaaaaaatgatggcgcagaacacataaatggtccaaaaactaatgacgttgaaagtaatattgttcccaaggagcatcttttggatgcaccgaaaccagatgaggaaatgcccaaagaagagcccttggttgttcgcctcaaggcgcgcatgcaagaaatgaaggaaaaagaactcaagtaccttggaaatggtgatgccaattcccatgtttgtaaagtatgttttgaatctccaactgcagcaattctgcttccatgccgacatttttgtttgtgtaaatcttgttcacttgcttgttctgagtgtccaatatgccgcacaagtattactgataggatttttgcttttacataacagagggctctatcccattgaattaatatactccatgctattacgggtgcaattcttttattagtttgcctgtatgtaacggcgtttaaaaggtatatcaatatctttcttttatactaccccaggggaactgtattatagggggacaaagggggtgcggagaaagaatgtaaaaagaaaaaaggtgtaaacagcactgctgaagtacatatgcacaatatatgtttgctttatgtaatccagcagaattttgttgcccatcctctgtatgttctttactgagtgtaagagctgaggtttcttattgattccatcctgctgcctggatttggatctaagagaaaatatatgtttcggaaagtga

SEQ ID NO: 29489 - DNA, 732 bp, Glycine max
  Clone ID: TF_GmC32907_2
ataaaggacaattccattgtgatgaatgcggcatttgcagggttggtggtcgtgataagttctttcactgtaagaaatgttgtgcttgctattcagtgagtgtgcaaaacaatcactcatgtgtagagaactcaatgaagagtttctgccctatctgtttggagtaccaatttgattcaataaaagccccccccattttgaagtgtggacccccaatgcatatggagtgctatcgagagatggcaactcaaaatcagtatcgctgtcctatatgcttgaagacaatagtcaatgatatgaactgggaatatttagatcgagaggtgtgtggaactattattaaattttgttttgaaatattttttgttggtctatgtatgaccatgttttatgtctttgaactctaaagtaatattccacatgactttcttggagacaaggaaaattcatggggataaaacaactaggaaatgagccttggaagacattttgtatcaaatttttgctatgattgtaatggttggatggttgttgtcatatataaataaaatgcaactagcatggtgagttgcatatttgctttgaggcaaaaaaaaaaaattctctctgtacataggaaaacatgaggtaattgtagtaattgtctattgtgagggatgctttggcaccgtagcttattacaaaaaatcactttttgcttaagcggatggtcctggagaaatctgttgtcac

SEQ ID NO: 29490 - DNA, 1440 bp, Glycine max
  Clone ID: TF_GmC137799_1
ccacgcgtcctcgagccgaatcggcttaaagaaagagtgaccgagagcgatccgagagagagagagagagagagagcccgatcttcctctatcgatctctgctctttcctcccccctttcaagattcgttgcattttctcatttctcgcgaattccgaaatcgcgttccgttggctctcgattcccacgctcctcgttcacgattattcgttgcattttaccatttctcgagaattccatcaacgaaatcgcgttccgttggctctcgattcccacgctccacgttcacgattttgattgagatgaaacttgaaagggcttgatagtcaacaagggaagagaaaatgctgatgcccaggttcatgggaaagtgcttctgttttgggcaatggctgcaatgattactgcctctgcattgtaaatttgctcatctttcatgatgtggagttttgcatcaaatgcccttacaagcattagattgaaaataggctccaaacagccaagtcttcttcatagtgaataccgtgccctaggtctcgtcttatggcccagcagagaggaagggctggaatgcccaatatgttgggaatctttcaacatagttgagaatgtgccctacgtcttatggtgtggccacaccctctgtaaaaattgcatcctaggactgcaatgggcagtggtgaaatttcctactcagcaaatcaagattccattcttcatttcttgtccatggtgccacctgttatcattccggatcatttacaaggggaatcttaaatatccttgcaagaacttcttccttctctggatggttgagagcctgaatggtgataggcataaagtcttttccacttgcacagacaaccaaccaatctggtctcccaagtgcaaccttctgggaagccaagttactaattgtaacctaagaagggcctcagtaagtccttttcctagattgctgggatctaaaggtgatgttcgtgacaatgatggttcaacacaccactttcttaatcctaaattgcgctgttattttagttctacactttctagtcactattctttttgctatatcatcatttctcgtattgtactttgcataccctacgatccagaggctggtaagagaaataacatcttaagatatagccttcagcagactgtttctctggattgattgtcgtactctggtaatttctgtttgttacttttaggtttttatattcttatggctctatagcttttgcaatttttgtatcaactttaagtttcatcttgagaggaactttattttttggcagttgtatttttattcttaatttcctttttctgaagtgggtaattaaatattttgtacaaagaacaaggttcacttgccgaaaagtacatgtattcgaatgactatggttatgtgatacttatagaaaatgtttaatgcaa

SEQ ID NO: 29491 - DNA, 2951 bp, Glycine max
  Clone ID: TF_GmC399_1
actccgggccggaattcccgcgtcgacccacgcgtccggaaaagacagcggctcgagcattttcgttttccaacaacctctaccctaacgccgtcataacggtttgtgcttccgcgacgcgacgcttcaactgtgaaacgcacgcgacgtagtttatataaagcgccgtccctttccgtttgtgcagtcagcaagacgatgacctgtgccaaattattttccgtcttttctctcagtttctaatttccgagaggaagtaagttattgtttcttgctggaaattgaggtggcttttgagttttctattgtgattttcggctatcatgggatcagcttgttgtgttgctgcaaaggatcctaatcttcctaacagaactggggatgaaagtttgcatagagatgttgtgtgttcaccatcggggagctttcaatgggatagccgggggcgttttgctgatgaaattgagaatccttcatatcacacctcccatgtggacagtagaaatgtcagcatggagctaaaaggttcgttaagttctgaaagaggtaatttatctgatggtggaagcattgttgagaattctgtaacacctatttttctgaagtcccctgttgatgaggcattggttgcaaatctgatgacccccacttctgatctgtccatgtcaagcaatttttctacagtggtgaagaacccggcggggacacgtgaaatactgacaagagagagaaaagaagatgcagtgagtcacagtcatagaatagaaacagaggcaccatttccgttttccaacaacctctaccctaacgccgttataacgggtcgtgctttcgcgacgcgacgcctcaactgtgaaacggacccgacgtagtgtatatacagccccgatcctcaacaccaaatctttaatttacaagacatacagaagtctaaaggcctataacttaccctttgttcaatcacaattaagaccatctacgcaacagtactccaacaagatgggcacatcgatctccagcacaccctctgttgagacagatttctgatagtcgaatcatgggtctgaaatcgccagacaactcaatttctgaaggtaggccatcatttgtactctcaacttgcagcaatgaaatggcagctggatccatatgcggatcatctgatggctggtcaatgcgcaccttttctgagctggttgcatcatcacaaagggaaaggtggtcctttgatagtgagtgtggaatctttctgggtcacaagataagtggatccagtagcaggttctcgtattctccctccatggaactacaatcttgtggggcttgctcaaagctattgaccgagagatcaacatggagcaaccagaagtttattgccaacagtgacctctcagttgttgctgtactagtctgtggtcattcatatcatgcagaatgtttagaggctatgacatcagaggcagataggtatgatccagcatgtccaatttgtatggttggagataagaacttgtcaaagttgttgtccagaaaaggtcttcgggctgaatcagagatgaaggccaagaaccacaagatatccagaaaccgtgtagttgatagctaccttgatggtggttttgatgtttttgatcgtcaaaaagatatagatttgagaggaaaagtgtcaaaaatggaacctagctgcagtgcaaggagctcatttggaaagcctttcttgaggagacacttttcacttggatcaaagtggagccgatccctgtccgagaatgattctgccaggaagaaaggcttttgggcaagatatcgttaagatttagttccatttgctgtaagagtcaatcattctctaattatagttgtaataacaccatcaatttagaatgaatattttctatgtagcctaactttactgataactttgaatgctttaaaataattaattttgaatcttgacatggctggtcaatgcgcaccttttctgagctggttgcatcatcacaaagggaaaggtggtcctttgatagtgagtgttttggatctggtcgtcacaagataagtggatccagtagcaggttctcgtattcgccctccgtacttctcaaagttgttgtccagaaaaggtcttcgggctgaatcagacataaaggccaagaaccacaagatatccagaaaccgtgtagttgatagctaccttgatggtggttttgatgtttttgatcgtcaaaaaggcattgatttgagaggaaaagtgtcaaaaatggaacctagctccagtgcaaggagctcatttggaaagccattcttgaggcggcacttttcacttggatccaagtggagccgttccctgtccgagaatgattctgccaggaagaaaggcttttgggcaagatatcgttaagattgagttccatttgctgtaagagtcaatcattctctaattatagtaataataacaccatcatttagaattaatataaattccagtcaggttgatgtggttcatatgaactgtatgaatataaacgtcctttgacaaatggagctgagccaaagcagtgacgagcgcaagaaggcagaggaagcaaatgcacatttatgaagatagttatgcttcagttgtttttatggtaatagaggcagacttgcttcattctacctgctgcagatagcaaaataaggtttaacaatcaatcatacgctggaaacttaaaaatgtgtttttaactattgtatttatattttcaatgaatacaaattaacataactttgcaagttaagtcaagtgaaaggagttagttatgttgcccttgagagaacaaggcgaatctgaagattgtcatttgtcagacaggatcactgaatgttgtaattgatttaatgttggctcaaatatgatgcttagaagttaaaaaaaaaaaaaaaaaaactcagactagttctctctctcc

SEQ ID NO: 29492 - DNA, 1766 bp, Glycine max
  Clone ID: TF_GmC287_1
ccctcgcgtccgcatagaccccacgcacacactgttctgttcattcgtgtcggctcgcatttcaagctttagcgccaatattcagcttccgttcattccacgcatttctcgttcgtccgattcgtcgttctgcattccatttccttttaaattttacattttcaaattctttttgcagcttaaaatttaaagaatttgaaaagctcactcagttctcgctcgcgattttctcactctctcgtccgacgctcgcaatactcgctacgaccctcgctctactctctctgtctcacgcgcagtggtgcagagcgtctctcatctctgcgatttagatctttgttagacaagcactggatagtgatctgaaatcatcgttgaaatttttctgccttttatttcaagacatgtatggttaatattggacagctgaaatgagatgcaatgcatgctggcgagaagtagaagggcgagccatttccacaacttgtggtcacctattatgcacagatgatgccaataagatactcagcaatgatggagcatgtcctatttgtgatcaagtcctttcaaagagtctcatgaaacccgtggacgtcaatcccaatgatgaatgggtcaatatggccatggcaggggtatctccacagatattgatgaagagtgcatatagaagtgtgatgttctacttggggcaaaaagaactggagatgcagtttaagatgaacaagattgttgctcaatgccggcagaaatgtgagatgatgcaagagaagtttacagaaaaaatagaacaggtacatactgcttaccaaaagatggccaagaagtgccagatgatgcaacaggaaattgagagcttaaccaaggacaatcaagaacttcaggaaaaatttgctgaaaaatccaggcagaagagaaaattggatgaaatgtatgaccagctgaggaatgagtatgactcggtgaagcgatctgccatacagcctgcagacaacttttattccagaaatgagcatgatttgttctcgaacccacctaatataatggatggcagagaaatgggcagaaaaggtgggctggtattcactcctgccactccaggaccaagagaggatgtctggccagcaaggcagaatagcaacaactctggtcactttgatctgtccgtcggctcaccagcgaaacaaacagtcattgcaggggatgctggaaacagaagggctggtgctcatcctgtttttggacctggtgctactaataacccatccatgactttgaggaacttaatactgtctccaataaagcggcctcagctctcacgtaaccgcccccaactattcacgttgtaggcacaaaggaggaggctaaccttctataatatcaggaaaaacgaatctaaagtttgcacaaatcagtttgtagtttgcgtgatgtgctaatgatattttagacttccgtttctatttcttacctcaaactcctatagatgaagagctgctaacatgaacaatttatatatcattttagttccctagcttcaatctgtagatagataattcccagcgtattatacggtgattagagaaaactcaagtgaagccacagccccatttggtttcttgtagcaaagaatgaaagcatgttctttagcatttttaacatgaacattttgaacttttaaaaatgctatttgttcacattgttggaagacttgtatgtcacatgataacatgtatattgtcgatcaatatcctcgttcagcaggc

SEQ ID NO: 29493 - DNA, 502 bp, Glycine max
  Clone ID: TF_GmC5791_3
gatattttaggagctcagacggtatttttttaagaagactgtaagaagagaattttaatttctcactttttagaaagaaattgaaattccagatttttagttgtttaaaattctgttttaaaattccaaattttaaattttttataaaaagcatccaaacaataaattctaaattacagaaatttaaattctctgataaattactttcctcaattaaaattctctatccaaacgcactattaatgaaattgtgatgcaatatataccattaggagcaattgaaaattagttcttaccttaatgtggtgcaggtccgtggcctgccctgtgctcacaattttcatgttgaatgcattgatgagtggcttcggcttaatgtgaattgtcctcggtgccgttgctcagtatttcctaaccttgatcttagtgctctgtccaatatccgttctgagtctgaacaatcttctgccactgctgtgacaagcagagatatgacaggcca

SEQ ID NO: 29494 - DNA, 739 bp, Glycine max
  Clone ID: TF_GmC135433_1
gaattcggcacgatggattgaacaagatgttgagctaacacatggacatatgcgtgtactgcgattggacattgttaacatgtcataagagcaattgctggctttgaaagagaggatgggtactgtgagcacagctctaacagaggaaacactatcagaatgcgtaaagaaaagtgtttaccagtcctcaccatctgacaaagaagctgagagatgcaaagaacataaggatgatacaacacgtcccattttgcaggaggaatatgtggctgcagaagaagtggggagtttgcaatgcgagcacatgtatcatgtggcttgcatacagcagtggctacagctaaagaactggtgccctatttgcaaagcatcagtggcacagtcaaattcatcaccatcctaatgatcccatcaattgcaatgttaggccagacgagggagactgatttctttgtacccctcttgctgttcatttttttcttcatcacttttgtacaaaatacagttgctcctcacttatttttattggtcatttgtacatagccaatattttcattcccattatacaataatccaagccattggcctgatatagactggaacttcttgatcattatagaataatccaagccattgctggaacttgttaatctgctggtgcaatgtttttcagccttcatcttatgttccttttttttaatccatacataaagaagcactaaggaattcggaaggaaaa

SEQ ID NO: 29495 - DNA, 2362 bp, Glycine max
  Clone ID: TF_GmC241_1
atgccgcgtgcgcatgcacgcagtccgaccccgcgatacgaagtgaactcctcacgagtccgacactgctatcgctctccgctctaattcaccgatccactggataagtatgaagaataaaaacagtcgagctaatcggaaagctcgttcggtgaaaccccccgattcctgtttatcttcttccaattcaaacaagaaatggatggttccctataaattctacgatgtcaagggtcccaattccgagtcaaaccctaatgttgactcgtctagttgggttttgtgcaccgaggttcaattggaaaccattctgttgaaaaacattgaaattatatacaatgacactgtgccaaagcttgttgctttgggctacagtgaggagattgctgtcaaagcgattctgtacaatggacattgttacggtgccaatgatttggcaacaaacgtgctgcacaactccttggcttgtttgacaacggggaccttggacttgtctgagtccagccctgcgttccctgatatgaagaagcttcaggagtactctttgatgaaccttgtgtctttgttgaaagaggtgaggcccgatttaagtaggggtgatgctatgtggtgtctcctcatgagcaatttccatgtgttgaaggcgggcgccatcccggttcctgttggaaacacgtgccctcctcctcctcctcctttgcccgagcttgagaacacgggatggagatttgcgaaagagggaggcttgggttttcctttgaatgggctcttttctgatactgatatgactatacggttacagagagatattgaattcccaaaaagatttgaccttactcctgccatgaaaagcttgttgaaaagaaatgttgcaatgtttgctgatggttttagggctaactcaaaacaggtgcagccgcaagccagtgaatttcctaggactggctctgtttcgaaattgggttcttcatctgcttctgggactgctgcagtccttggtgagcagcctggtgactctcacaatcagaatgaccaggaggacttgaactctgtgatgagtaaatttcttgatctaaatattgatgataatgtggagtttgtgccagaagacgacaaggaggaggtgatagtcactctagttaatcagataaaggatcttgagaaacaggtcaaggagcggaaagattgggctcatgagaaggcaatccaagcggcaaaaaagctaagcagtgatctgattgagctgaaaaagttcaagatggaaagagaggagaataaaaaactgccgaaggagacaggggcagctgaggagctggacaacccaaccatgatgagactctcagaaatggagaatgccttgagaaagactagtggtcaaatggaccaagcaactgcagctgtcagaaaacttgaggcggagaaagctgaaatcaaagcagagttagaggcttctaaattaagtgcatcagagtcagtcacaagctgtttgcaagttgcaaaaagggagaaaaagtgcttaaagaagcttctgacttgggaaaaacagaaagtaaagatacatcaggatatttcagatgaaaaacagaagatattggagatacaagaagaactagctcagattaaacagtgtgcaaaggaaactgaggtaacgaggaaggaagagttgaaggctaaggaagaagccttggcactaattgaagaggagcgccgttctaaggaagcagctgaggctaatcataaaagaaatcttaaagctttacgcctgaagatagagatagatttccagcgtcgtaaggatgatctccctaaggctggagcagagattcacgccttaaaagcacctgcacggtctactactttgcctacaagtgagtctgaggatgcagagccccagagagagacacttgctaagcttctgctagagttagataatgtgaaggatttttctggaaaagaaatcaacggtgatagagaatgcattatatgtggaaaggatgaagtttcagttattttcttgccatgtgcacaccaagttatgtgtgctcgttgcggtaaagagtatgggaaaaagggtaaagctgtttgtccatgctgccgggttccaattgaagagagaattcctatatttggggcatgttcgtagtcttacatcggtaagctatgaatattttgcagaaaaactatgttctgccgtagcttatcttttgaatgtctgaaaatgaaaatctattattactaccttgaaaataagataggtaaatactaacatgtgctttgaaggcactagtcaaggattaaaaaatataaatgattttaggatatgagtaaactgtaaagacctgagttgtttatgcaacaaaac

SEQ ID NO: 29496 - DNA, 2435 bp, Glycine max
  unsure (1)..(2435): unsure at all n locations
  Clone ID: TF_GmC35912_1
ggacaaggaaagggaaaagagaaagagagagaaacttcgaggaaacgaccttcaccgttcatcaacctcaattgaacaacaacatcatcatcatcaaaacatcccattcttattcttagcatttctcaatcactgccacactgatactactgacacgcccaccttccatcttattgctcttcaactcccactactgcctctctctctctctctctcagccccttcaaggataacgaatttatgggtggatcaatttcaaaacggaggcgttctaggcaacgttcggcctcaaattttcttcctcggtatcaacaacctcatttcccacaaagccaagataatgggtctgtggggcattatgggtattcatctcagagctatagtggtggtcgtgctccagaacaagtaaagagcttggataggaagtatttaaggataggtgatgattataagagcttgaagcaggtaactgatgctctggcaaaagctggcctagagtcttcaaatctcattgttgggattgattttacgaagagcaatgagtggacaggtggaaggtcatttcaaaggagatgcctgcatcacattggtcatgaacaaaatccatatgaacaagctatatctatcattgggaaaacattgtcttcctttgatgaggataacttaattccctgttttggttttggagatgcatcaacacatgaccaggaagtttttagtttctatccggatgagagattttgtcgtggatttgaagaagtgttggaacggtacagggagttggtccctcaattaaagcttgcaggaccaacatcatttgccccagtcattgagatggcaatcaccatagttgagcaaagtggaggccaataccatgtgttagtgattatagctgatgggcaggtgacgagaagtgttgacactgagcatgggcagttgagtgcacaagaaaagaaaactgtagaagctattgtgaaagctagtgaatatcccttgtcaatcatattagttggagttggagatgggccgtgggatatgatgaaacaatttgatgataacatccctgcccgagcatttgataatttccagttcgtgaatttcacagaaataatgtcaaagaacatggatcggtccagaaaggaaacggagtttgcactcgctgccttgatggaaataccctcccagtacaaggcaacactagagcttaatatattgggtgcttgtagagggaaagatatagaccggattcctctcccaccgcctctatatggtgcagcatctttcaattcccccaaaacttcccgtcaatatagttctcgtcccagtgcaccatctagcagacatgatgttagcacaaaccctcctgcaacttctgcttctgataatcaggtttgtcccatttgcctcaccgatcctaaggatatggccttcggttgcgggcatcagacatgctgtgattgcggacaagatcttgagttatgccccatttgcaggagtaccattgatactagaataaaactttattagatgacctcttaaaacttgtccatgacttttcatgttgaggtatgaaactgggttttcgacaaattttcttggtgatgactggtgagggaggaggatggggggcaaaaagagcttcgcattgtacatatttatatttatttattcaagtctatgctttgagcgcattttatactagagttggatttttgcgttgttattatattaattttgtggcaattcatcaatataacattccatgcttaatatattgggtgcccgtagagggaaagatatagaccggactcctctaccaccgcctctatatggtgctgcatctttcaattcccccaaaacttcccgtcaaaacagttttcgtcccagtgcaccatctagcagacatgatgttagcacgaaccctcctgcaacttctgcttctgataatcaggtttgtcccatttgcctcacggatcctaaggatatggcctttggttgcgggcatcagacatgctgtgagtgcggacaagatcttgagttatgccccatttgcaggagtaccattgatactagaataaaactttattagatgatctcttgaaacttgtccatgacttttcatgatgaggtatgacaccgacgaatttctttgtgatgagggagggacgagagaatgaagggttgaaaagagtttcgcattgtacatattttttatttttgatatttatttattcaagtctatgctttgagcgcattttatactagagttggatttgtgttgttattatattaattttgtggcaagtcatcaatataatgttccatacttctaaaaaaaaaaaaaaaaaaaaaaaaaaaaaaaaaaaaaaaaaaaaaaaaaaaaaaaaaaaaaaaaaaaaaaaaaaaaaannnnanaaanaaaaaaaaaaaaaaaa

SEQ ID NO: 29497 - DNA, 1964 bp, Glycine max
  Clone ID: TF_GmC1087_3
acgctgcgagaaatcgcaagaaaggggaatgtcagcttttcttcttttatatggcaccccttgctttttctttttcatctcccaacttagaaattgaattcaacccaacactactaatacactgtgcctgactcacttggaaacctaacctagggctttttttttttttgtttatatattttttggattgttgtgtccatccatcaagtggtgtttgtgtataaattttgtgtggtttgttttctggattaggatttggtttctgtgtgctgtgttaaaaatagtatcaatcaatcagaaaggaaaaagagagagttagggaagatgagctggcgcagggtattgaattcagcacaggccttggctgcacacactttccttttgtgcttcactctcttcctcgttctcaagctcgatcacaatctctcttcttcttggtgggtaatattttcacctctttggatgttccatggtgttgtggctcgaggaaggttttcattacctatcgtggctatgctgcagttggtctaaagatagtgtttcttcccttactaacatttgaaatcattattctcattgacaatttcaggatgtgtaaggctctaatgccaggggatggagaaaatatgagtgatgaggctatatgggaaactcttcctcatttttgggttgctatctctatggtgttcttcattgctgctacagtcttcacactcctaaaacttagtggtgatgtaggtgctctgggctggtgggacttgtttattaattttgctattgccgagtgctttgctttccttgtatgtacaaagtggtccaatccagtcattcatagaaattcaagagaagccagtagttcatcttcaactacgattacatatcttgactggaacagtggtttagtggtttctacagacgaaaatcaacaccaggggagaatgtgtagccttcaagacataggaggtcatttcatgaaagtaccaattattgtattccaggttcttctttgtatgcatctagagggaacacctgcttgtgctgtacatatacctcttccagttattttctctccccttttcctactgcaaggagctggggtaatgttatctgcatctaaattaggggagaaacttgtgcttctgctacgaagtggagctggtggaggaatatattttagattttcttcaagagctcatgattgcttggggttcttgcatcatggttctagattattaggttggtggtcaattgatgaagggagtcgggaagaacaagcacgactataccatgagggagcaattgggtataatacattttgtggttatcctcctgagattgttaagaaaatgccaaaaaaggaacttgctgaggaggtttggagactccaggcagctcttggcgaacaaactgaaattacaaagttcagccaacaggagtatgaaagacttcaaaatgagaaagtgttatgcagagtttgtttcgagggagagattaacgttgtactgctcccatgtaggcatcgtgttctttgcagcacttgctcagagaagtgtaagaagtgcccgatttgccgtgactccattgctgagcgtctgcctgtatatgatgtttagatgttaacttggtcaacttttttcgtgttaaaagatcatagaagaaagggactagacaacatgttttaacagggtgaatatacttagtacagtgttggcagtgacattaattcgacaccaacttgactgtctaatacagcatcaaaggataggaagaaaaatagagcatccacttgatatactttggattttgagtttgatttgttttgttttgcattcagtctcttctgtaatttgtatatatatactatctttttacaggctctacaattgagtgatgagtgttgaatttgagtctcttttcggttccttggccttcactctcatctgtaagttgtatatattctagct

SEQ ID NO: 29498 - DNA, 503 bp, Glycine max
  Clone ID: TF_jC-gmst024165h11a1
ggctcgagctcgagccgaatcgtgttgagatttgaccaattttttgttcatatcttgtggtatcaggagaaagtgttatgcagagtctgtttcgagggagagattaacgttgtactgctcccatgtaggcatcgagttctttgcagcacttgctcagagaagtgtaagaagtgcccgatttgccgtgactccattgctgagcgtctgcctgtatatgatgcttagatgttaactagggcaacttttttcgtgttacaagatcatagaagaaagggactagacaacatgttttaacagggtgaatatacttagtacagtgttggcagtgacattaattcgacaccaacttgactgtctaatacagcatcaaaggataggaagaaaaatagagcatccacttgatatactttggattttgagttcgatctgttctgatttgcattcagactcttctgtatttgcatatatatactatctttgtacaggctctacaattgagtgat

SEQ ID NO: 29499 - DNA, 1701 bp, Glycine max
  Clone ID: TF_GmC1334_1
gacgattgccgctaaagactcagccttattatacagacacggcgttacacaaataccgtacactgctccaagccaaagaccgaagacggagccgaaaatgactactacttgcaaataattcccatttttttctccgaaactcaaaacttttcatttgaagagttatcatgggatcagcttgttgtgttgctgcaaaggatcatactattcccagcactagcagaactggaggtgaaagtttaaatagaaatgctgggccgtgttgctggtgaaattgaggatccttcctttcacacatctcgcagagtcagcagaaatgtcagcatggagttaaaagggtcattaagttctgaaagaggcaatttatctgattggggaagcaccctggataattctgtaacacctttgtctctgaagtcccctgttcgggagcatttggttacaagtcagatgactccatcttcaggtctatccatgtcaagtaattgctctgcagtggtgaagaatctgattgaatcaccagagattgcagaatcttcaataccaaatcgttcagtaccttcagttttctcaatccctacgacagatccaatgactaatcataattatcacaatcttcctaactcaacaccatccagatgggctcattgttctcccggacacccactgttaacacaaatttctgatagtcgaattctgggtcttaaatcacctgacaactcaatttctgaaggcaggccatcatttgtactctccaactgtagcaatgatatggcaacggcatcccaatgcggccctgtgatcggctggtctatgcgcaccttttctggatgggtggccccatctcaagtggaagggtgccctcttgctaccgtgttttcaggttcagctcgtcccaagattcgtggatctagtagcaggttctcgtattccccctccatggatttacaatcttgtggggcttgctcaaagctcttgaccgatagatctgcatggggtagccagaaatttattgccagcagtgacctctcagttgttgctgtactggtctgtggtcatgtttaccacgcggaatgcttggagactataacgccagaggcagatagttatgatccagcttgtccaatttgtatggttggagaaaagtacatgtcgaagttatccaaaaaaggtctttggaccgagtcagagactaagaccaagaactacaagatatccagaaaccgagtagttgatagctacgtagatggtgggaatgatgtttttgatcgcctaaaagatatagtttcaaagatggagcctagtagctccagtactaggagttcatttggaaaacccttcctgaggcggcatttttctttgggatcaaagtggagccggtccttattggagaatgattctgccaggaagaagggcttttgggcgagatgtcgcagagactgatttcccctagccatagcttttagtcgcaggagttcttcaattatactagtaacaccaaccaagttagaattttatattttctatgcagtctagctttagtaatagtttagatttatttcaaattttattttaacttgtcaccaaaagttcccaccatgttgacgtggatcatattgattgtatgaatgaagcgtcttttggcagaatcagagccttagcaatgacgaacacaaggatgcgaaggaaacaaatacacca

SEQ ID NO: 29500 - DNA, 369 bp, Glycine max
  Clone ID: TF_LIB4164-010-Q1-N1-H1
aaatgccattgattctccatttgaataaactacatatgctcgagagctggttccaaaagtcccatgttgcatttaaaatgaaggggctggccacatcacacagactctctacctattctggaaatgctgtcaaaataagggatattagcccccaacttgggacatattttcttcactttgaagtgactaacatttcttaagccctcctacaagttgctcccagaagcaaatacctcaggcctacaaactgggcaaaccttgtctattttcaaccaattgtggatgcactctggatggttcagatgcttgcaggacataactgtcaaggtctcaccatctctataagccacccggcgaatgacacactaa

SEQ ID NO: 29501 - DNA, 580 bp, Glycine max
  Clone ID: TF_GmC1151_1
agcgagttttccgaagaagaggaaatccggtgcatggcgaactgcaagcacattttccactgcgcgtgcgtggaccgttggatcgatcacgatcagaagacgtgtccgctgtgcagaagtacgttggtgccacatcagaagctcgaagaatacaaccagcgactatgggcggcttctggagtttcgcagttttattaccaagacgattacacggcttccctctgaatttttctttttctttttccacttatataattatatatatctttttttattatggtggggggacttgacagctagtgtagccaaatgtatatagctaattaaaacaaaaatattgtatcaatcaaaaagtgagatttttttttggattcgtatatacattttcccaacttctatttctatttactacactattattagttattataaaaattaattaatttttaattattttataggataatttatgatatgattgaatgaaagggttaatttttcttatggattattattctttgttgttcaagaaaaaagggattttattcacaaagaaatgatatgagttggttattgtaat

SEQ ID NO: 29502 - DNA, 1427 bp, Glycine max
  Clone ID: TF_GmC6780_1
acggacggaaggaacccgaagtgagctgaaaaaacccaaggctcttgacaagaccgacagaagggggaagttgaagatctgaaaccctaattatccaccgatcgatctggtgtggagggtgtgaattgtgaatttgtgattgtgggaaaaagatgccgcagaggcactcgaagaacaacaacgatcttgcgttcttcacgtacgatgagaagcgaaaactaggttatgggacccagaaggagaggttgggcaaggactccattaagcccttcgatgcttgctctctctgcctcaaatccctaattgatcctatgagctgccagaaaggccatctcttttgcaaagagtgcattcttcagtgcctcttgtctcagaagaaagacattcaaaggaagcttgcagcccatgctgctcagcagaagcaagaaaaagaggaggaagaagagaagttgaagttgcaaaaggctaaagagcttgatgcatttgatcaacaaaatcatggtgctgtaccacaatacagcgacagaaattatagtcgtgataagaatggtttccatggggcaaacagtgtgaaggtcacttcctatgaggaggaagcccttcggacaatgaaggcattttggttgccttctgctacaccagaagcttctattaaagtagatgcaccttctaacagtactatctgtccggaaggcaatgagaaactgaagttaaagacacttttccctgtgcagtttactgaggatactactgagcagaaaaaaatccaaggctcttgacaagacctacatttgccctagctgcaaagttactctcaccaacacaatgtcgcttgtggcccttagtacatgtgggcatgtattttgcaagaaatgtgctgacagatttatggctgttgataaagtttgtcttgtttgcaacaaggcgtgtaaagagagaaatttggtgaatttggagaagggagggacaggttttgccggtcatggggatcatcttgaagccagagacttcaagcatttgggaagcggtagtggtttagggctggttagacctgcaatgaaaacttgacgctttattgatttaggttgttgggtgtatgatatagtccattcaggagaagaaaattgtgctttaacttctcttgatgaagttaccttgttaccgcgatacacattattatctgtcttattatcttatgatgttctacttcgttttattttatttttacttttttttttggtttatcccagataaacctttataacgtaaaaaatcagcttgattcattaatgactagcgattggcaatgttaaatgtaaatggatgcattctctgctgtattcttatttattattgtgaaaggatgctgtctgtcaacactgtcccgattcttaaacaaatgaaaaaattggcacagatatatatcg

SEQ ID NO: 29503 - DNA, 549 bp, Glycine max
  Clone ID: TF_GmC6780_2
gcagtttactgaggatactagtgagctgaaaaaattcaaggctcttgacaagacctacatttgccctagctgcaaagttactctcaccaacacaatgtcgcttgtggcccttagtacatgtgggcatgtcttttgcaagaaatgtgctgacagatttatggctgttgataaagtttgtcttgtttgcaacaaggcgtgtaaagagagaaatttggtgaatttggagaagggagggacaggttttgctggtcatggagatcatcttgaagccacagacttcaagcatttgggaagcggtagtggtttagggctggttagacctgcaatgaaaacttgatgctttatttaggttctttcaggagaagaaaattgtgctttaacttctcttgatgaagttaccttgttaccgtggtaaacatcattatctatcttatctatgatatgatgttctacttcgtttattttatttttacttttttttgtttacccgagataaacttaacgtgaaaaatcagcttgatccattaatgactagcgattggcaatgtt

SEQ ID NO: 29504 - DNA, 1593 bp, Glycine max
  unsure (1)..(1593): unsure at all n locations
  Clone ID: TF_GmC76377_1
gctggtctggtggggcctgctctctctctggctcggaagcttgggtccggggctgcctcggttggtggccagcatctgtgcgcccccttacgacccgtccatcctgctccccctttctctctctaaactaaacagtaggggtagcagagagagagagagagaatgaagcggtgcatggacacacatcaaacgctacgaaaagaatcctgatgatgacgcaatgactctcccttcacacgatgcttggattcacacttcacacacactcctccccagatggaaatctctttccctccctcatcagcagtcaactcttccaatttctatatcaagagttaaccaagttgatgcagcgagattggacgttgaaatgtcagccatgttgaaagaacagttggttaaagtgttctcattaatgaagccaggaatgttatttcagtatgaagccgagcttgatgctttccttgagtttcttatttggaggttctcaatttgggtggataagccaaccccaggcattgctctcatgaacctgaggtacagagacgagcgtgcagtagaaccaagagataaagtccgaactggtctggagggacctggactcactgttgctcagaacggctgcgagaggattgcagatgtgggtggtcagtatatatgggctcgcttacaatccttctctgcttttcgtagatggggtgatactgagcagagaccattggctagacgtttatggatcttgatacaacggatagaaggaatatatagagctgcttcatttggaaacctgttgatatttctttgcactggaagatatcgaaatcttattgaaagagccttacgagctaggcttgtatatggaagcccgaatatgaatcgtgctgttagctttgaatatatgaaccggcaattagtttggaatgaattttcggaaatgttattgttgcttctcccccttcttaattcatcatccgtgaaaaatctccttcgacctttttctaaagataaatcattaagttcagctgaggatggctcagcatgtcccatttgtcaggctactcccacaattccttatgttgctctaccttgccagcacagatattgttactactgtcttaggacacgatgtgctgctgctccatcgtttaggtgttccaggtgcagtgagcccgttgttgctatgcaacgacatggtggtgtcccttcagaatgattgattgttactaagaatcagggaaacattctttagagttagggagcatttgatctacttacagaattagcatataaaatactacctgaaattgtggtggtattcttttccccttactttctctttattattattattattattattattattattattattattattattcacatttaattgggaaaacaaatcaaaatatcttcacagaatcacttactcggttcagtgggaagcattctttcccttgtaacaatgtatcatttagttaccccctcatacatttctttccgttattttgaagttaaacttcttgtaaattgtatgtgttgtgattggatatacatactaaacgannngctctcctataaactaaaaag

SEQ ID NO: 29505 - DNA, 637 bp, Glycine max
  Clone ID: TF_uC-gmroLIB3259P253e08a1
aacttaaaaataacggaaagaaatgtatgagggataactgaatgatacattgctacaagggaaagaatgcttcccactgaaccaaataagtgatgctatgaagaaatttgatttgttttcccaattaaataataataataataagggagaaaccaactaaagagaaagtaaggggaaaagaataccaccacaatttcaggtagtattttatatgctaattctgtaagtagataaaatgctccctaacgctaaaagatcgtttcttagtaacaatcaatcattctgtggggacaccaccaagccgttgcatagcaacaacaggctcactgcacctggaacacctaaatgatggagcagcagcacatcgtgtcctaagacagtagtaacaatatctgtgctgacaaggtagagcaacataaggaattgttggagtagcctggcaaatgggacatgctgtgccatcctcggctgaacccgatgatttatctttagagaaaggtcgaagaagatttttcacagatgatgaattaagtagggggagaagcaacaataacatttccgaaaattcattccaaactaattgccggttcatatattcaaagctaacagcacgaatcatatttgggcttccatatac

SEQ ID NO: 29506 - DNA, 846 bp, Glycine max
  Clone ID: TF_GmC74179_1
acccacggatgaagggacgcgtgggcggacgcgtgggcggacgcgtgggcaaggagctggggtttgtcctgcagcttatagattaatagagaagatagttcttctactctactgtggagatattcctgaaagatactcagccatagcatcaaaatcccgtgagtgctttgggttctttcgacgtgggtcaaggttgcttggttggtggtcaatagatgaaggaagtagagaggaagaagctagacttttttgtgctgggagtcctgggtataatactttcacccctgatacggtgaagaaaatgcctagggcagatctggttgaggagatttggagactacaagctgcattgggcgagcagacacaagttacaaaatttagccaggatgagtatgaaagacttcaaaatgagaagatcttatgcagaatttgcttcgaggagcagattaatgtggtcctacttccctgcaggcatcacattctttgcagcacttgctgcgaaaaatgtaaaaggtgccctgtctgtcgtggaccaattgaagaaaggatgccagtatatgatgtgtagactgagttcaatgaagatgtataggtatcttactgatcatacagcttgtgattttagacgaggcaagcactgagaattatcaatttctcttctcatagatatgatgaacatcagaagttgtatagaattttaaacgtgttaccccccctcccttaatttttcttccatagtgcatttttgcaattctgaagggattgccaatagttgcattgtcttgaattttggtaccataaggatttatctacaccaaaaatgaaagatgacatatttgaggtatt

SEQ ID NO: 29507 - DNA, 1427 bp, Glycine max
  Clone ID: TF_GmC74179_2
ggctcggaattcggctcgagctcgagccgctcgagccgttttcataggatgtgtagggctttggtgcctggagatgatgaaaatctgaccgacgaagcagtatgggaaactcttgcgcacttctggatttcaatatccatggtcttctttattgctgccactgtgttcacccttctaaagatatgtggtgatgttgcagctctaggatggtgggacttgtttattaacttcggcattgcacagtgctttgcgtttcttgtttgtacaaagtggcacaatccaactattcatggaggctgtcatattacagaaccatgctcatcgtcaaataccataagatacctagacttgaggacaggaggcttagttgtttacacagatgaagatagacagcaaaatgggttctgcaatctacaggatatcggtgggcatattatgaaaattccattcattggtttccaaatacttctttttatgcatttagagggaacaccatccagtgcaaagaatctgccccactgggtcattttttccccactttttttgttgcaaggagctggggttttatttgcagcttatagattaatagagaagatagttcttctactctactttggagatattcctgaaagatactcagccatagcatcaaaatcccgtgagtgctttgggttctttcgacatgggtcaaggttgcttggttggtggtcaatatatgaaggaagtagagaggaagaagctagacttttttgtgctgggagtcctgggtcagtactctacccgcaagaagtaaaatgagtatgaaagacttcaaaatgtagcatccatttactattaaaagtagtatatctacaacattctgttaagtttgtaggttatttttgttcattgtttgtacttgaatgactgtcaagtgtatcaggatctaacactcttcaaattgaatggtaaatgtatcaggagaagatcttatgcagaatttgcttcgaggagcagattaatgtggtcctacttccctgcaggcatcacattctttgcagcacttgctgcgaaaaatgtaaaaggtgccctgtctgtcgtggaccaattgaagaaaggatgccagtatatgatgtgtagactgagttcaatgaagatgtataggtatcttactgaccatacagcttgtgattttagacgaggcaagcactgagaatgatcaaaatctcttctcatagatatgatgaacatcagaagttggatagaattttaaacgtgttaccccccctattttttcttccatagtgcattcttgcaattcagaagggattgccaatagttgcattgtcttgaattttggtaccataaggatttatctacaccaaaaatgaaagatgacatatttgaggtattatctgttttccccccatgcttgagagctttaaaat

SEQ ID NO: 29508 - DNA, 496 bp, Glycine max
  Clone ID: TF_21602652
ttgtagttaatttttatttttattttattatttattttattttatatgatatttattataattatttaactttatcttttctttttgatttatattttactctcttattttttaaaatttattttattaatttcttcctttaataaaaacgaaaattaatttaaattttaaaaaaagaataaataattcattcattatttggttttaatttggaattaaacttggaatcaatggtgcaaatcaacacactcttacgaaattggattgttaaatcacttcgctatggtggttacggaataataacctctccctttaaagttattataaatcaaaacgaggaaattagagtggcaaaagagaagaattagaaatagaagggaaagtatggaggaagtgtttgatatgtgaaggagaatattcagaagaggagattcgaatgagtttggagtgttttcacagttattgtaaagaatgcattgaactaacctcttctact

SEQ ID NO: 29509 - DNA, 410 bp, Glycine max
  Clone ID: TF_GmC1149_5
ggctcgaggagttggggagtcgaaattgtgagcacagttatcactttcagtgtataaaacaatgggttgcacaaaaaaatttctgcccagtatgtaagcaacaagttgcggctcgacactgagtgactcaacccttctgtttttttggacagcttccattctcatccataaatttgtgtatagtttttcatatccaatacaagcaagagttttcattctttgctgtcaattatcatttcatctttcaaaattcctgcatcctctgcgaggaatcggcaattatatgttatcgagtaaaggtttatattcgggctgagacctttgcatattatacgcaagagttgccttgcttaagagcagttattattatttttttgttttgggtttttaatgaagttgtgtctgtgacg

SEQ ID NO: 29510 - DNA, 255 bp, Glycine max
  Clone ID: TF_700973284H1
acaaacccgaggtgcatcctctgaatcaattaatgctctgccgacttataagttcaaaatgaagagaaataaaagcaaaggggaaagcaactcagctgttggtgaaggtggagttgtggctgcagaactgaaaaggaacgtatgatctctggagaagatgcagcttgctgcatctgcctggctaagtatgaaaataacgatgagctgagagaattgccttgttctcacctatttcataaagattgtgtcgacaag

SEQ ID NO: 29511 - DNA, 448 bp, Glycine max
  Clone ID: TF_LIB3093-023-Q1-K1-C5
cgacttgttcacatcaagtgcaacagtgagagctttaccttgtgggcattacatgcattcatgttgctttcaggcatacacttgtagccactacacatgtccaatctgcagcaaatcactgggagatatggcggtttactttggtatgcttgatgctttattggctgctgaggagcttcctgaagagtacagggaccgctatcaggatatactctgccatgactgtgatagaaagggcacttcacgcttccactggttatatcacaaatgtggatcttgtggctcatacaatacccgggtaatcaagagtgaggcagcaaattctagctgcctttagtatgcttattttttgtaatgaaagtacagagcttgtaaatatttgtatagccaatccaattttccccaaaccaggaaactggttacctttcattttatacacaatgcgagt

SEQ ID NO: 29512 - DNA, 422 bp, Glycine max
  unsure (1)..(422): unsure at all n locations
  Clone ID: TF_LIB3093-047-Q1-K1-B9
gatgaattgaacccaaatactaacgtggtttctcttcaccgattccctttatatacactttttcaattacagttacaggtaatggattaaacaattattagtcggttaataaacacactctctctctactaattctcatcgcattccttttcctctttctccttccaattgagaattcgtttctctaattgacgcanagttcacagtgaaattagtgcaatggaagcggatttcgtcaccagtgacatgctcacactcacgcaggacgctttttacgccaacgataatgatgatgtagctgttgaaggggaaagatgtggaatatgtatggatatggttattgacaggggacttctggattgctgtcagcactggttctgctttgtatgcattgacaactgggctactatcactaatctttg

SEQ ID NO: 29513 - DNA, 432 bp, Glycine max
  Clone ID: TF_GmC76829_1
attcggctcgagcaaattgtcaaattcacattactctctcttcactctttctccgtcatgactacggaaccagacgttgaatccaagtatgcccacaacggcaagggcatggtgggcaccgccattctcctcttcattctcataataatcattattttcttccacacctacgtccgctcctgccgccgtcgccgccgcttctctcattcgcttccgaccaattcctccgccgccgcctctctcgacgacccgtgcctcgacccttccatcatcaagtcccttcccacttttactttttttcggcgacttccaccgctctctccaagactgcgccgtgtgcttatcggagttttccgaccgcgacgaaggccgcgtgctcccgaattggaagcactcttttcacgctcattgcatcgacacgtgggatcgggt

SEQ ID NO: 29514 - DNA, 361 bp, Glycine max
  Clone ID: TF_6455111
tcaccttggagctcccgtcgtattgtgagaagtggagacatgcctacaattggggttcttccttgttgtcatgcttttcatgctgagtgtttggagcaagcgacgccaaagacccggaaaagtgatcctccttgccctgtgtgtgtcaaattggaggaaaattcccctgatcaacggagccatttgagattgaggactggttttccaaagcttaaatcatctcgtgacaatggaccgtcaagaccttggggatgtgtacaggtaagtgattgtgttgaaagggctctgcatgcaccaccaagcaacacaatgttactgcttaatcaaaaccgcattaagaacccttctttgaaaagaattt

SEQ ID NO: 29515 - DNA, 231 bp, Glycine max
  Clone ID: TF_LIB3087-010-Q1-K1-D12
caagaatggatgatactggaagtaattcgtaactgtcgaatccatggatgctgcacttggagaaactcgatctcgaactcaagagccctctatgtttgagttagcacaagaggccggtgttactaccatgcaaccactcgtactgcaatacatgtctggctgattgcataacggctgggcctagatgtgctgtttgaacggcaacgtatgctcaaacgaatgtaaggcatg

SEQ ID NO: 29516 - DNA, 819 bp, Glycine max
  Clone ID: TF_GmC1579_1
tacggctgaaggcggaaaaactctgaccgagtccgagaggcatcatggcgacactggattccgacgtgaccgtggttccggccggcgaagcctccaccagcgccggtccttcttcgtccaccaagaagccgaagcgattcgagatcaagaagtggaatgccgtttctctctgggcttgggatattgttgtggataattgcgctatttgccgcaaccatatcatggatctctgtattgagtgccaggccaaccaggctagcgccactagcgaggaatgcactgtagcttggggagtttgtaaccatgcttttcacttccattgcataagccgatggctcaagacccgtcaagtatgtcctctagataatagcgagtgggagtttcagaaatacggtcactagaactttgatgcggctgagctacttccatcttggacatttggattgtagcatttctatcaactttatagctctacatgttgtctttgcttgcctattggagttttattcaaaagagtcacttctaaatgctttcgcatatagttacgcccccagttcctaattcgatcatatccttctctaacaatgtggcaaaacggtggtgttaattcactcaatgacaagatttatggaatattatagcatgcaaataaaaaaaaaaaacatctacctccccccctccgtcccccctgcccccctgctccccccttttcctccccgcgccccccccattaccctcctcccccctcactcccacccaccctcgcccactcttggccccccctcccctcctttctctcttttatacctctcccccacc

SEQ ID NO: 29517 - DNA, 649 bp, Glycine max
  Clone ID: TF_GmC1579_2
tgactactttcccaaggctgaaaaactctgaccgattccgagaggcatcatggcgacactggattccgacgtgaccgtgtttccggccggcgaagcctccagcagcgccggtccttcttcgtccaccaagaagccgaagcgtttcgagatcaagaagtggaatgcggtttccctctgggcttgggatattgtcgtggataattgcgctatttgtcggaaccatatcatggatctctgtattgagtgccaggccaaccaggctagcgccactagcgaggaatgcactgtagcttggggagtttgtaaccatgcttttcacttccattgcataagccgatggctcaagacccgtcaagtatgtcctctagataatagcgagtgggaatttcagaaatacggtcactagaactttgatgcggctgagctacttccaacttggacatttggattgtagcatttctatcaaatttatagctctacattactgctgataaaaaaaaaaatagctctacattacttgttgtcttttgcttgcctattggaattttattcagaagagtcgcttctaaatgctttcgatccaacatcattatttctaactgtggcaaatacggtggtgttaattcactcaatgacaaaagatttatgg

SEQ ID NO: 29518 - DNA, 1609 bp, Glycine max
  Clone ID: TF_GmC1361_2
tccacgcgtccggttttgtagatctctggtatcccaagtgggcgatcctacagcgatattctcttctctcctcctatgcgccttatctcatcccaagtggtcattctctttttctctatcactgctgcctgcaaacaaaagatatttatattgcattaaaaagatgaaaaaaaagggcaagagtgtgagagggtgtgtggtccttttaagttgaacatgatggaatggccgtctttctcttttgggtcttcccaaatcaggaaacactttctcatcttccctttcccagtctcacacccaaacctcatggaaggctctgtcaacgaacgtcttgattttgggaagatgggatatgggtgcaatcattaccggagaagatgcaggattcgtgctccctgctgcaacgagatctactcatgccgtcactgtcataacgacgctgcgagcttgttgaagaatccctttgatcgccacgagctcgttcgccaagatgttaaacaagttgtttgttcagtttgtgacactgagcaacctgttgctcaagtttgcacaaactgtggcgtcaaaatgggagaatacttctgcaacatctgcaaattcttcgatgatgatgttgagaaagaacaatttcactgtgatgattgtgggatctgcagggttggtggtcgagataattttttccactgcaagaagtgtggatcttgttatgcaattggtctgcgtgataatcatttgtgtgtggagaactccatgcggcatcactgtcccatttgttacgagtacctttttgattcattgaaagacacttttgattcattgttatgaaatgtggtcacacaatgcaccatgaatgttacctggagatgataaaaaatgacaaatattgttgtcccatatgctccaagtcagtgattgacatgtctaagacatggaagagaattgatgaagagattgaagcaaccgtcatgcctgaagattatcgaaacaggaaggtttggatactatgtaatgactgcaatgacacaacagaagtttacttccacattcttggccaaaaatgtggtcactgcagatcatataatactcgtgcagttgcgcctccagttcttccccaatgaccagattcttgggttcaagaagggaaaactgtcagcagaaaattaaagttagcaccctgttattattatagagggctattgaattaattgagcatcaaaagtgattggtgtattgtgtcctagatagttttcttaggttattcttcctccaacatatggagtgggattgttgtctcttggttattgggctggtatgaacatctttatactgtaacagagggaaaacatttttcccggtcatgaattgctggtaatagtgatgtatttgatactgggtgattgattgcattgtcagccattgtggttctctataatttggtcgggattatttgatccttgtagtttttctcgcacattggaataaactgtgatcgttagttttgatcattctattcccagccattattttacaaaagtggaaatagtcatctttttgtggttaaattgaccattccctacagagttgaatgaattgaaacttattatttttt

SEQ ID NO: 29519 - DNA, 252 bp, Glycine max
  Clone ID: TF_700875744H1
ggaagagtatgagaatatggacgatgtcggcacacttcaaacttgtggacatatctaccatgtgagctgcattattccatggctaacgatgaagagcttctgtcctatctgaaaagtatctgctttacctgaaagtacgaaggcatcatgcacttctggaatataaattactcccattatgtgtatagatttggacatccccaaaaatgacgacacgagcctgtatttggaaacgtaatcacaagcatgcta

SEQ ID NO: 29520 - DNA, 763 bp, Glycine max
  Clone ID: TF_GmC1714_1
ccacgcgtccgtgcttatactaactaactcttcttgagaaactctttctcacacgccaagagtaacatgggatttccagtggggtacacagagttgatgctgccgaaggtgtttctgcaggtgctatccgtattgggcttgataagaaaactcatcaccgtcctcttgtgctacatgggcttccacgatttcttcgaatccgacattgcgtggccggagagggcgccggaattccagtcggtgtgggcggtgctcataagggaaatcctaccggtggtgaagttctcggagatggagatggagatggcggaggcgccggagagctgcgcggtgtgtctgtacgagttcgagggagaggacgagatcagacggctgacgaactgccgccacatattccacagagggtgtctggaccgttggatgggatacgatcaaagaacgtgtcccctgtgtcggacacccttcataccccaccatatgcaagctgccttcaatgatagactttgggctgcttcagggattcctgatttctattacaatcatgaatgactctagggaaaaaaaatcctagatttggggacgggagtgttctgtttaggttgttgagtatgtgttcagtgttcaatgttcgtgtaaatattatacaaaatggaaagcggagaattgttgttaaaaaaaaaaaaaaaaaaaaaaaaagatgatgagaacaaaaaaagaaagggctaagaataaaataatttaaaaacataaagacatttatttg

SEQ ID NO: 29521 - DNA, 2546 bp, Glycine max
  Clone ID: TF_GmC266_1
cttccctccaaaccttgtgattcccttcgaatcaaagcaaaacttagcagttcgattcttggtcaccctctgagacacaacctcaccttcctgacatatccttcacaccaatcttcccttcctcctcttctatatacacttcatcatctctatcccctcttcatattttttctattcttaacctttctctacagtatgtggttgctgaaaggatcatgttgttgaagctttttgtgatatatgtctgattatgttgctaggagttaaagctggtgcagacccagaaaagatcttccaatcaaggtactagttccatccatcaacaaagttgtcaattgggatgcttcaatttcaaggttcttttgatgcaaacctgtgcttctaaaaaattcaattacttgatctctcgtacacgtcttggacaaattctcaacacaacggcaaaaagagaacatttaaaatgaattctaggtgcttccttgttcatccacaacaagagtatagcatggttcggcggttccgtagtgtaaagcattcaagtagtctggtcaccttgcacctgaccctttacatctttccttcttgttcctttttttatttctattacactttcattctccacctcttcttcacactcacttagattttttcacctccaagtctctttctgttcaccatgttattgctaaacggttcatgacatgcccttgaaaaaccttggttggtattaattgtagcactagctttgattttggtgccaagttcttgagctgtggtggtgctgaccctgaaaagttctccaagtccaacatgagataaggctgaaatattggagctggtttcaattagtagacaaatttggttgctgactttcgtattcgtgtgtcttcaatagatggtatttttaaatagaaagcatagttgacaatttcttgaatgttgttgtttcttgccttttgaattatctccaagacttcaaataagttggctctctcctacaattttttaaatgctattatgttcagtattgagaatcaaacaagacttggtctcaggcacaacaggtttttcaattttggactagttctgatttgcatacttatatagaggcaaaaggggtatcctctttttcattatcctctattcatacatatccaaagacaacaacatttcctttcagtacccctattagttgaatcagcatggcttcatttccttcaaattctgcatgggaacatagcatggccagtgcacaacaaaacagtaaccctcatgcttcctcaccttctttcatgactagagtggccatgagaatatctagatcaagatggttcactttcttgagaagagtattccattaccaaaacggaccaagatccaatctcggctccaaccctttcaattccagcacttggatgatgctggagttgattgctttgttggtccaaatagcaagcacaacattcactttggccatttcgaagagtgagaagccaatttggcctatgagagtgtggatagcaggttatgatattggttgtgtccttaatcttctgctactttgtggccgctaccatcaacttcatgtgactcaagggaataatgctcttagcctctctgaattggagcagcagagaaacaatgaagaatcaagtgtgtacaggacttcacatttgatagacaaatgccgtagttcactagagcttttctttgccatatggttcgtgatgggcaatgtatgggcctttgactcacgttttggatccttcccacaagccccaaaactccaagtgctctgcatcatcttgctttcttggaatgcaatatgctactctttccctttcctattgtttttgcttttgtgttgttgtgtgccactaatgagcaccctccttggatacaacatgagcatggggtcctctgctagaggggcatctgatgatcaaatctcacaactcccaagttggagatataaagggcttcattccaacttggacattgccaatgactctcaaagcagtgaaagattgatcaaccaagatccagaatgttgcatttgcttggccaaatacaaagacaaagaagaagttaggcaattaccctgttcccatttgttccacctaaaatgtgtggatcaatggctaagaattatatcatgctgccctctttgcaaacaaggattacaaaggtagcaataggacgaggcagaaaatacacaagaacattcataatcttatacattcccaattattttgttttatctcctttggttacacgagtgagtttgtacatgtacagaagaggtcaccagtaaccaaaactacattgaatacttggttcttaggagtgaatcaatccctttatttttcaaattagtttgtttttacaagtttttcctcccttatcctgccatctaaatattgcaaggtgagcatatagttgtactgaataatgaagtaaatatttatatttgctccttaatttttatacaataaaattatttggactgcgtttcctgtttaatttaaaagcagttatttgggctt

SEQ ID NO: 29522 - DNA, 1688 bp, Glycine max
  Clone ID: TF_GmC266_4
ggctcgagattgaatggcaatgtacaaatattttcatatcgtttgatcatatatgattttattttgtgattaagtaaaattcatgtaagatttattatcaaatattaaagaatattgaaaacaatatattaaataacaaaaatcctctttggtacgagttttttttacacaaattacgcttgaaaattttttcttgttgcaaatttgaagaaacagaaaagtaaattaacttagtcccatgcagtgtgtacaggagctcacatttgatagacaaatgccgtagttcactagagcttttctttgccatatggttcgtgatgggcaatgtatgggcctttgactcacgttttgggtccttcccacaagctccaaaactccaagtgctctgcatcatcttgctttcttggaatgcaatatgctactctttccctttcctactgtttttgcttttgtgttgttgtgtgccactaatgagcaccctccttggatacaacatgagcatggggtcctctgctagaggggcatctgaagatcaaatctcacaactcccaagttggagatataaaggggttcacaccaacttggaccttggcaatgactctcaaagcagtgaaagattgatcaatgaagatccagtaagtgaaataactatcatacacaaaattagtaacatttagattttgctattaatatgcatattctctaacacactttaacattggttaaaatttgttgaaaattataaaattatgagtgtgacacattaaataagtatgacatacaaacttttacgatatttaataaattttaactaacaataaaaagagtatgttaaaagaagaaattatttgtagtcggaaaccattatgtctatgatctacaagcaatcctcgtgtgatacatagtcaaatgttttaatttaggggaaaaagttaataaaattatacatattacataaaaattgattggaaatatgaacacataataatctcaagtcatgtaataatttttcactaaaagaaatgtgttactaatatttctcctatgtgtatatatggagcatgtgtaggtgagaacatgttgtcaataaaggaactaatctggggtataaatgatcaagatttgatttatgtttttttctctctcacttttcaccatatatacctcatatatatgtgtgcatgtttgttttcatatataattattttttattgaattgatccgtttgtgttgttgggtgaattaacaggaatgctgcatttgcttggccaaatacaaagacaaagaagaagttaggcaattaccctgttcccatttgttccacctaaaatgtgtggatcaatggttaagaattatatcatgctgccctctttgcaaacaaggattacaaaggtagcaataggacgaggcagaaaatacacaagaacattcccaatcttatatatattcccaattattttgttttttccccttttggttacacgagtgagtttgtacatgtacagaagaggtcaccagtaaccaaaactacattgaatacttgttcttaggagtgaaccaatccccttacttttcaaattagtccactgtttttacaagtttttcctcccctaccctgtcatttaaatattgcaaggtgagcatatagttgtactgaataatgaagtaaatatttatatttgctcctt

SEQ ID NO: 29523 - DNA, 1491 bp, Glycine max
  Clone ID: TF_GmC668_1
cacacacaccaaccatctcattataaattgctaagtttttcaactcatcatcaattggcaccttttgcttcagaatgaatgcttgaggttgaggagaaccagaaccagaagcatgaatcaacttggtggtgttagcgttatccttctggttctctcagtcttgtgtttccatgttagagcacagacttctgcaccttcttcaggagatgctgtctccaatttccagccaagccttgctgttgtcataggaatccttggtgtcatgttcttactgacattctttcttctcatgtatgcaaaattctgtcatcgccgccatggcggcgcttcggccgttggagactcagaaaatcaacttacttttgtgagatcaaggtctagattctcaggaattgacaagactgtcatagaatcactccccttcttcagattctctgcactcaaagggttaaaggaagggctggagtgtgcagtgtgcttatcaaagtttgaagatgttgaaattctgagacttgtaccaaagtgcaagcatgcttttcatattgattgcatagaccactggcttgaaaagcactctacctgtcctatttgcaggcacagagtcaaccctgaggaccacacaaccttcacatattcaaacagtttaaggatgttagcaggtgaggaatctaacatagagatcttggttcagagagaagaggaagagcatcatggttcatcaagattcagtgtaattggaagcagcagctttcggaaaacggtcaaggaagaagaattactcatccaaaaaggagcagaagatagtgatggtaaccagaaagggtatcataaacacaaccacaggattactatatctgatgttgtgttcaagcacaggtggagcaacgtgagttcttcagaccttatgtttctgaattcggagatgctcaatgatacatcaagcaacagattcagcagcaacctggaatcaattacaagaggggtagtggtggaaaatgagcaaattatgaacatcaaggaggagatggagaggaagatttcctttgagaacaaagttgttggtgcactaaacaacatcgtttcagatcataaggaagatcctccttttacatcagattctgcaccaaagtatgtgaacccgggtgagaaaaggtcaatgtcagaaatcactgctgtttctagatttggagatttaggcatgaaaatgagggtcttgaaggattctgattcccttcaaaacaaccttaaagaggaaagaatgaggcagatttggtttccaattgccagaagaacagctcaatggtttgtgaatagagaagaaagaaggtctctgcaatctcagaataataaacaacagccattagatgtataatccaatccaatccaaccttcccgaggtacacatgtttggtttcattccttgattaacaactacatgtagatttcaggctgtttttttgttgattagtatatagttaagtaaagcaaaaa

SEQ ID NO: 29524 - DNA, 1104 bp, Glycine max
  Clone ID: TF_GmC153_1
ccattccagctggctttcaattcattttctccattaccccaaaatttgggctctttcttatcctttctaatctaatcccaccatcatctcataaccaataaacaacaaaaagaacatcagcagcagccatggccctgaagtttgcacctttctgacacacccaggttctcccaatttgggttgggcaccatggaaactggaataatccagggaccttggggatttcgctctctatccaaattcgttttatgcaccatttctggggcccttaccgtgtgttttgcccttgctggggccctgacaggagctatagctggtgctctagcagctaaggccactaagagtggtcttctccggggagtttcattgggtgccattgccggctctatactctctgtggaggtgttggaagcttcccgtgcctattggtgtatggagcaaactggctcacggagtgcatcatctatggcagatttcatagaggaacttgttcgtgggaggcttgttgaggaatcccttacacctgctattttaactgcttacaatttgcagtttgagcaggttggcattgcgaatacaggctatgttgagactcatgatgttcatggcttagttgcacccagagaaacctgctgtgcctttgagatcatatgatggggtaacccctccaatgatctcaaaggcagagaatacctgctgtgcaatatgtttgcaggatattgaagtaggggaaattgcaagaagcttacctcgctgtcaccatacatttcacttgatatgtgtggacaaatggcttgtcaagaatgattcttgtcctgtctgcagacagaatgtataacttgttccttgggcaatttgagattatctttatgggcggatgtatatgttttattatttgtttctttacatacaaactgagattaccattaagttttgtatagttgacattggcattttgtactattctgcgatgtaattgttaaataatactatttggtatgaaagccaatgcccaataacaaatgttttgggagaaaaaaaaatgagaaaatggtaaactttgaaaagtatatcaatgaatgatttttctttctttattgaccc

SEQ ID NO: 29525 - DNA, 729 bp, Glycine max
  Clone ID: TF_GmC627392_1
tgccacactctatgcaacaatattttccagatccactctcatctccctccatagaatattagaatacttgaccccagcttctacctctgctccgttaattaatggatcctcatcttcctaagaatggaacccaacaacaccatggtaccccaacaccttccccagcttcagttgcaaataatattataataccacatcctgaattccggataccttcctttaaagaacatcacaaaaatgttcctcaactcgcgatgattgtcatggcatgcatggttggcgtcatcatgtttctctgcgccgtgtccgtactcataaggtacttctactcaagaagatatagccgcaataaccaaaacagaagagtcgacgcccccatattgttcgatttgaacggagattctcctccgagttcggataacgatgatgacgtggaggagttggcggttgtccacccgatatggtacatccgtacggtgggtctccaacagtccctcatagactccatcacggtattcagatacaagagaggcgaaggcatcatagacggcaccgagtgttcggtttgcctcggagagttcgaacacgacgagagtctgaggttgttgcccaggtgcagccacgccttccacatcccttgcgttgacacgtggctcaggtctcacaaaaattgccccttgtgtcgtgcacctgtgctacgcgacgaaactgacggcgcgcatgtgatca

SEQ ID NO: 29526 - DNA, 1249 bp, Glycine max
  Clone ID: TF_GmC938_2
tcctcgagccgattcggctcccagattagagtagtagtttgtgttgcgattgacgacgacgataacgacaacgacgaagcatcatgtcttccggcggcggcggaggcggagcaaagccgttcttctgccacgtgtgcagtcagaggatcacgtgctccgatgagtcggaacccttctgcccgatctgtatggaaagtttcgtagaagaatgcaaccctaacaaccctaaccctaatcttttcaccgagaatgaggaatcttctgattccgaaatctccttctccctgctccctctctttctctcctccgtatccaggtcccgacccgaacccgacatgttcgacccgatggttttcctccaaaaccacattcagggccttcgcgccgacggcgccaacatccaagttgactttggccacccttccgagcagcaagggtttcgcctccctgcgaacatcggcgactacttcatgggccccggccttgagcagttcattcagcagctcgccgacaatgatcccaaccgctacggcacgcctcctgccgccaaggacgccgtcgagaatctccccaccatcaccgtcgacgacgagttgttgaactccgagctgaaccagtgcgcggtctgccaggacgagttcgagaagggctctctggtgacgcagatgccctgcaagcacgcgtaccacggcgactgcttgattccgtggcttcgactgcataactcatgtcctgtgtgccggtatgaattgcccaccgacgacgcggaattcggctcgagtgaggttcgcgggaatggcggtgacggcgggtcgaggactggtgggagtggcgacagtggtggtggaagctgcggtggaggcggaggggggagtaatagacctgttcgcaggactgttagaatatatttgcggcatcctgatgctgctgactccgcgcaggacagtgctgaaaggggatgggagtggggaagttgggattgaaatttatgttttgttgttgtaaaactggaaactatcttgtgcagctcagagtttccgtgaatagattgctagcattgccatgtttacaatagtccttgtgaggaatgtaagagatgttatttcccgtgacaagaactttgttcgatcagaggtccttttttatgtagtagatagctggaacatgggattgcatgaaaacacccaactattgagattttaggtgctgttattgagcgttgataagaaacttctcgttacttttgtac

SEQ ID NO: 29527 - DNA, 668 bp, Glycine max
  Clone ID: TF_uC-gmflLIB3275P147a09a1
gacccaagaaatgtaagtttaatggtaaacaaattgtatgatttgtatagttgttacacggtactcgccgttcttctgatccctacacgtcagggtaattacacgaatactagtcatgagctactaatcttgatacatgacgagagtaagttacagttgtagaagattataatcacacgtccataaataaaaattagatgaggtattcaaaccatgtcagcgatgatatcattatgtccattgtcactccaaccagatccagctcgaaatttacatacagggcatgtcccttgttggcgcagccagggatcgatgcagttagcgtgaaactgatgcaagcaaggtaagctacgcagtacgtcaccaacatcaacttgctccaagcatacactgcaagtgagctcatcatcagaggctttcatgctcccaacagcagttgaattatcttgcttcttctcagcaggagtggaagatgatgtttgttgcattgaggaactaccactgtaagcaaaagcagctttttgtcaaacaatcagtactataatttatttagagtgcatatatagactccataaaatttccagatgaaggactaaattcccatttcaactagcattttaagtcaataatagaaactggcaggtgaaagtgtactggacagctaatat

SEQ ID NO: 29528 - DNA, 780 bp, Glycine max
  Clone ID: TF_LIB5118-056-A1-PF1-F7
gtacacctgaaccctaatgacactttccacactccattttccaccatgaccttctttttcttttctatttctttctcctcacggaatttccgccgcaggccaccgcgcagcctccgaacacgctgacgccgccgccgcagcaggaccgctttacgaggctgaagttcgacaaatccatggccatcgttctgctgatcctggtggtggtgttcttcatcctagggttcctctccgtgtacacgcgccagtgcgcggagcgcaggatgggagggaggttcgacctctccatcttgatctcgcgccggcaacgcggcctcggccgcgaagtcatcgaaacgttcccgacgttcgtgtactccaccgtgaagagcctcaagatagggcgcgccacgctagaatgcgccgtgtgcctaaacgagttcgaggaggatgaaacgctacgtttcatccccaactgcagccacgtgttccactccgactgcatcgacgcgtggctcgcaaaccactccacttgccccgtctgtcgcgccaatcttacttccaaacccgatgaccggtgttctgctcctatccaaaacccggatccggagcagcccgttttaacctcatcaacccgacccgaaaccgtgggtgctgatttgcttagtcagaaccgtacaccgccgcgaccatagtcaacgggtcttagtatcgcgagttggttttcgcggtctcactcgacggggcactcgctggttcaacccggggagaaattgtgaacggttacgctgcgtttgcctg

SEQ ID NO: 29529 - DNA, 645 bp, Glycine max
  Clone ID: TF_LIB4390-049-R1-N1-G9
ccaatcttatctcattaattttatatcactaacaagttctacctataaaatttcatagatacgttgggtaaaaaaagaaaaacattcattgtatatgtaggaataagctacaaataaatcatcctcccattttttttaaattcatgggggtacattagtaagtcatacttcccaattgaaaagctttttccatggccctcaaaattgacaaaagctctccattaatcaagttgctaggttccaaatttgctatgtcattgttattgaaggatgaatgattcccccttccaatctcacaaatcacaaacctacaaactgggcactggcccttacttgttagccatggtactatacaatcctcatgaaacatgtggttgcatggagtgagcatcacctcttcattgggatcaaaatcttctaaacaaatagcacagctcttgctatcttcatcattttctctctgcttctctttcaaaggctttgcagcattgtttctgtagtataagctcaccctcctagcatacctctttggggggagggtcatagactactttcttaagcttgctcaaagctgttgattttggtaatttctaccactgggagagccttgtgtgcttgtttggaatgggggatctttgagggggg

SEQ ID NO: 29530 - DNA, 1447 bp, Glycine max
  Clone ID: TF_GmC1689_1
tcgcgatctagaactagtttcaccccctaaattctccatcagagacacaatccactccttaattccccaaaccaaacacgccgttaactaactcaccaaccctccctcctttacccgagagatcgattctctctgtaagtaaatcttgccgttaactttctcggaaagtcggaatttcccggaaaatggaaggaggtcgccggaggataacactttacgatcaaatgaaagccggcaacagcagccgatactcactcgccagcctcatgctgggcgatgtcgttttcaagaaggtggaagcagaagaagcagaagaagcagaagccgaagccgaagcgagctgtgagctgagccgaagccggactctccaagacatcattcgcgaagaaaaacctagcaacagcagcaacaacacgaaggatcgcaactcttggagagccttcacggcgaagcttcggctcaagcgcgccatcggctcggcttggtcctccaccaccactatcactaatcacagcaatgatgatagaaatttacctaatatacccgaaactcgccatgactcggacgagttgactcagcagaacgacatcgttgtggacggcgccaacgattcggatccgatcgcgccggccgggtcaccggtggaacacgtggaagccgttggcaactcctccgacggagagaacaaccacgaggcggtggttggagtgtcgctgatggatttgttggcgggaagcgaagcaagaaatggatttatatagagtgagcgatgatgacgatgatgtggcagaatatgagaagagagaagaagaaaaaggtacggctgcgagaagactacagaggggggtggagtataattgctgcgtgtgcatggtgcggcataaaggcgcggcgtttattccgtgcgggcacacgttctgcagaacgtgttcgagggagatttgggtgagcagagggaactgccctctctgcaacaatttaattttggaaattcttgatattttctgaacctggtaataattttcattaatctttcaatataacctttttaatctctatctatgaatttttctttttctttgggtttggggaagaaactatttctactattagattaggatcatgtggttatgatgaatttgtacgtgacatgtgattatgatttgtgattaacaaaatggaattagtaacgtgtcatgaagattggttagaatcaaatgtaaaggagtggattatggatgattttatttacacatttactgtgtgtcatatatttggctcacgtgttcatgtgatgagatgctgtatcttccggtggattctagttgtgcttagacgataacgtgttactagtgagagagtggacaagctatggaatgataacttcaaatgtggtttacacgattgtatatatttatctttttatttttaatttggctattgatgg

SEQ ID NO: 29531 - DNA, 2293 bp, Glycine max
  unsure (1)..(2293): unsure at all n locations
  Clone ID: TF_GmC1738_1
gtcatctgtcatttcgttcactccatagaattgcagtcaggaacacactacacaactaagaatcacaccacactctgacctcaacgttttcaacaaccatttctcttcccatcaacggttcaacgcatcactgcacaatcacttccttcttcaaatacttctcctctcatcttttgtctcctttctcttcaatcaccgttttcccaaaacaattctcttctcttctaattctcatcacgcaaccgcgtaactaaaatctccgtttccgttcaattccttcataactctcctccactttttattattatcattatcattatttaattatttattaataatagtagtaataatttcattcccctctttgcttcgagtttaatcaaaatttcaatcatgcagcgctctcactctctctctctctagagagctcggcctgcctcgagccgctcgagccgggaagaactaacaagaggcgtaagcgtaaacttgtccgaagaataacaccgggaaagaaagagagtgaagaagggtataagcgtccttgtgaaggcactagggtgttctgaactgatcctctccctgggtctggcactgtaaaattcaacgtcaaccccataatatactttgaagaaacgcttccatcttctctctatttgtttcaacttcagttatgcgtttctctctctagccagccatcatcactatgtcatccccaaactccgtccctcagtcccacgcgccgctccttctcccgcgccccgatgccgccgcccgcctccccatcctagcgctcctcctcggccgccgcggccactccgccgtggtccgggagacggcggcgcgtgagctggaggagcgccgcgccgactggacctactcgaagccggtggtggcgctcgacatgacgtggaacatggcattcgtgctggtctcggcggtgatgctcgcctgcaccgtcaaggagaaccccaacacgccgatccgctggtggatctgcggctacgcgctgcagtgcctcgtccacgtggccctcgtgtggctcgagtaccgcaggaggaacgacgctcccagggacgaggaatctgctgccagcctccaatacgacgacgtcaacgatagcgacgaggacgatgttggaacctccgggagttcctcttcctccggattcacaaaacgatgtgcgtcattgaataccatgatttcattactttggtggatggtgggcttttattgggttgtctctggtggtgatattctgctgcaagatgctccacgtttatactggttgtctgttgtctttttggcatttgatgtcttctttgctatcttttgtgttgttttggcatgcttgattggaattgccctctgttgttgtttgccctgtattattgctattctctatgctgttgcaggacaggagggtgcatcagaatcagatctcagtatacttccaaaatacagatttcaattgttaagcaatgaggaaacacctggtgagggaggaggatcaatgattcctatggagaccagcaatggttattcggtgaatgaacgaacactttcacctgaggatgcagaatgctgtatatgcatctcttcttatgaggatggagctgaacttcacgttctcccttgtaaccatcatttccattctacgtgcatagtgaaatggttaaagatgaatgcaacttgtcctctttgcaagtataatattctcaagggaaatgaacaggtgtgacaatactaaaggcgatcaaagatatattatatcaagctgagttttattatataacagctcagggttttcaaccgctgatgcgtatatgtagataatatcaagacatgaaaaaatagaacgtctcccaatttgctcggtttagctgtcattgttttgttgcttaattgcttcagtagagaaaaaggtagaggtaagaaggaaaggtgccgtatagagatcttttaaataagttaacgatttcatttgatccttatttctcctttattagtcatttgaaaatcgtcatatttcttgtatcaaatttgtttatatggaagaaaacaatggaaagtgtggcagtctaactttcagcttatggcaggtgtggattttttagttatttgtttgtttgtgttggtagaaaaaaagataattgctttattcagagttgttcaatttgtggattgttcattacttttctgacggaaactagattgtttcatttgctgctgttgagtaatcacaggcttaattcaaccnaaaaaaaaaaaaaaaaaaaaaaaaaaaaaccgcccg

SEQ ID NO: 29532 - DNA, 1468 bp, Glycine max
  Clone ID: TF_GmC5691_2
tggacgcgtggggggaattctcattcggagcttgggatttttattagacatggcaacattccctatggcacttggccattacttgtatatatggcggcttcatggcatggctttccatctaatagatgcattgctatttctaaatatacgtgcattgcttagtgcaataataaatcgcataaaaggctttatcaggctaaggatagctctaggaacacttcatgcagctcttcctgatgtaacaactgaggagctaagagcatatgatgatgaatgtgctatttgtagagaaccaatggctaaggctaaaaggctaaactgcaatcatctcttccatcttgcatgtttgagatcttggttggatcaaggcctggctgagatgtatacttgtccaacatgccgaaagccactttttgcgggtgtgcctggaaatgaaacaaactctgatgcggggacgatatctagtgatgagcaacttgcacggcaaataagtgctggattggatcggccaaactctgctaggcataccatgcctacaggattctatccaaatcagacactaaacactcctgaaggtgttccttggaggggtgcagggctggactcaggttggttgcattcttggccaaatcaaggtgttgatggggccggtccatctactgctatcagaacagttggattaggaagagttcaaatgatgatgcggcatcttgcatctggtggagaaacctatgctcagactaccttagaagataccgcgtggaacctttggcccattaatccctctcaagcttctgcaagtggttcaaccattcctccccctggtggaagattgcctgaaagaactggtagtttacatttaaggactgcttcacagtcttctaatgataatgttgcaaatatacttgccatggctgagactgttcgggaggttctacctcatattccagatgacatgatattccaggacttgcaaaggacaaattcagtcacggttactgtgaataatctcctccaaatgtgatgaatcaaggtattattttactcctcaaggaatatgaagaagggcatagagttactactacaattgtccttggaaaggcataggctttcattttatgtatatagagtcagcacattcaatctgttgtactcaagaaagatagcagaaaatataggcattttctttctttctttgtcttctccttgaatctgtagtaaaataaatgtggggtgtgttcccaagttgggtaagttcctatctgtcatggttccatttcaattgtaattttgaatttgctgctacctccaaaatatgatgtaattttctttccactccccactccattttgtggggttggcagagagagtgaggggaatatcaattatcttcaagtgactcaatctgagtcatgcaacatctaattcaaatgtgatctaaaactataaaatagattctctattaaaa

SEQ ID NO: 29533 - DNA, 1279 bp, Glycine max
  Clone ID: TF_GmC1201_1
gtgtggatggctgccgtgctttgcagggcccgtgattttcgtaggcagcgtcctgcgctgacgggggtggggtacctcctcctgctggtccgggcctcggttgggttcgcgcttcatgtggttggtgtctactggtggtatcagaatgatgatctaatgtatccattgatcatgcttcctcccaaggatataccgcctttctggcacgcgattttcatcatcatggtcaatgatactttggttcgccaggctgcaatggtattcaagtgtatattgttgatgtattacaagaatagcagaggccgaaattatcgtaagcagggtcaaatgctgactttagttgaatacctcctcctgctttaccgtgccttgttgccaacaccagtttggtatcgtttcttcctgaacaaagaatatggaagcctcttttcatcactgatgacaggattgtatctaacatttaaactcacgtctgttgttgaaaaggtgcaatccttctttgctgcagtgaaagcattgtcgcgtaaagaaatgcactatggggcttatgcaacatcagagcaggtcaatgcagctggtgatctttgtgctatttgccaggagaagatgcatgctcccatcttactacgttgtaaacatattttctgtgaagattgcgtatcagagtggtttgagagagaaaggacctgcccattgtgcagggctttggtaaaacccgcagaccttaggtcatttggggatggctctactagcttgtttttccagttattctgaaatcatatataaataccaaccaggaagtttttttctgctttgaagctttactttttcaaagcagcagtcacgatctatatacatcaacacatgtaaaatgctctggaggcaattgtggggatactctttgaagatgaatgcagctgtatactggtcatgcgttcatataatgtactagcaaaaaaggttgagtgtatctaaatgaccctgtaaactaggaagtcgattgaaaatataatattaaacatgactcttcatttgcaaggaatgaaggtctttctccgaattgcatcacgattctgtcatatagtgccaaatcaaactgttaattttaaatatattttttatttttgaatctctctttatgtgggctttgatgcacacctcaaggagtgttgcccacgggcagattatggttaaagatctcgcacttcatgtattaaatctgtggatactagtttatttttgtagcagttaatagttaatttccccatgattatgtgct

SEQ ID NO: 29534 - DNA, 1521 bp, Glycine max
  unsure (1)..(1521): unsure at all n locations
  Clone ID: TF_GmC6412_1
gcgttcacgcgtgctcccacgatctcttcgctaattcaaatttcatttcgtcaatcactcctaacttctgggttgcaaaaatgaattcggacacgacttcctattggtgctacagctgcacgcgcttcgttcacatacaagaacagaacgacgtcgtttgcccgcgctgccacggcggcttcgtcgaaaaggtcaccgccccccaatcgtcaaggcaaggcttccgccgccgacgccgcaacgccgggaaccactcggcgttcaacccggtgatcgtgctccgcggaccgggagaggacgaggagagcagctttgagttatactacgacggcttcgacggcgaggggctccgcccgctgccatccaccatgtcggagttcttgcttggatcgggattcgaccggttgctggagcaggtttcgcagatcgagatcaacggcctcgggagggctgagaatccaccggcgtctaaggcggctatagagtcaatgccgacggtggaaatcaccgagtctcacgtcgcgtcggagacgatctgcgccgtgtgcaaggaagccttcgagcttggcgcgttggcgcgtgagatgccgtgtaagcatctctaccactccgattgcattctcccgtggctttcgatgcgaaactcgtgtccggtgtgccgccacgagttgccgtcggagcaaaccgcgccggaaacaagagtcgccggccagatcgaggaggaggctgtagggttgaccatatggaggttgccgggcgggggattcgccgtcgggaggttcgccggagagagccacttgccggtggtttacacggagatggagagtgacgggaactccaacgaaggttctagaagaatctctctggcggttggaagcggcagagttagggaaagtcgtggtggtggatttgggagaattttccgcaatttgtttgggagaattggggctttgactagaagccgtagcctttcaacttcactcttcaatagaagaagttctagagcctgggttttgggaaattgatttggatggagttagtttttggaaaacaagctttttaatttcagttcagaattgagattcttattgtaaataggggcagttagattcaaaatttctttgcaatttgcgttatatcaatagatgtttttctccagaaatgatcgccgaaggggactcgagagaaagattgttcttgctgcagaacatacgttctgggggaagaagacatgcttaattacttgatttttttaatgttcatatagtatgttttagccgcaaattctttgtaagcattgtttttagttttatgtcctatgttttcccaatatgatgaaaggagatattaatgattaaaaaaaaaaggacgggaataccgaagtgaggtgccatacccgggaatttcattctactcttggagctaactttttgctggtgctgatgattattggaattatggtcatgttggcctgttggcctgatgatgatgatgacactntgcatatcatgcgtttcatct

SEQ ID NO: 29535 - DNA, 1542 bp, Glycine max
  Clone ID: TF_GmC196244_1
ttttttattaaagaaaatataccattaaaatatataaaaataaataactttttcaaaacactcaagctaacaaaaataaactgaaccaaacatgtagttattgtgagactcgtaatagacatgtaatataatcacgcatcattgttcttagtaacattaaaaactgatgataagcctaaatcctttgaattatttccagaaagttcgtgcaagagacatctatgccttgaagttgaatgaactacatttggaagatatataaaactacaatcatgccaccaataccagatgaacgcaaaatcataatgcgaacttctgaactggcatgtgattcagcaaaaacaggagctgccaacttttaatgaccataaacatccagttcttcctcggactcagctggtagccactgagtcactgactattttggtctcattcttcagctctagaatcagcaaccaatcaagctagcggtaaatccataaataaccaacattggtgacagcctcaatttgaattcagaaactcgctaacggtgacaaacaaggaggcaggttcaattgaccatactcaaactgtacaacgagacatactggggatttataaaagacagtataccctcaaagaacaataatgatgacaaagataaaaaaaatgtcaaccaacttgcctccagataattatttacggtatacaatgagcagatgtacataaccattaagaagccatcataacgaagaataatcaaaacaactatcgctacgacgtaaacgagtatgcagcagcagcaactacaataaacgcctgtattgaattatattaacaagttgtgcctattatactgtgaaccacaagagatgcaatttccccaacatggctgccaggagcttttctgactacacttcgtcttgaccatgactggtacttttcaagatgttgtacttgcagagggggcaagtagcattgatatgcagccatttgtccacacaggcacagtgaaaatggtggctacaaggaagttttctaagttcaaccccatcatcataagcagaaaggcagatgcaacattccgcatcctcgtcagaaagaacatgttcaatgggagaatcagcatcgcattcaatcattattcctccagcagctccttgtgtattcccagcatgtttctcattagtttcagttctttggaacttgaattttgacaactgctcaatgtcttcttttgatgccccttcctggtctgcaactgcatacaggagtgcaatgataccggacggacggtcgcaaacagcaataccaacgatgcatgctagtgccatacagaaaacgacaaagaaaacatcaaaacccaggaaggctatacataaccagtagagcaggggagaatctcggaccaaagattcactatcagctgacacccaatagaatccaacaacccaccaaataaacgaaaacattgtgttggctgattccaaatgctttgccatacttataccatcgtcgtcgaactgcgccaacgacacgtagtgtccagagccgtccatc

SEQ ID NO: 29536 - DNA, 814 bp, Glycine max
  unsure (1)..(814): unsure at all n locations
  Clone ID: TF_GmC41583_2
cccaaaccaacaaaatgcttgaattgagtgaatcccactccaaaaacttgcactttcccctcactcacatcattctcttcttcacatgtttcaaactttctaaagcacaatcctccatggagccagttcccacctacatcacccaccacagctgggagccttctgtcgtcatcaccgtcggcgccatcatcatcgccctcctcttaatgggaatcatctcaatctaccttcgccgctgcgccgagtctcacatcatcatcaccacaacccaaaccaccaccaccctaccgtgctcctgcgcgcaggggatcaacagggagctcctcaacacgttcccaacgctcttctactccaacatcaaggatctcaagaaggggaacgaaacgctcgaatgcgcggtttgtttaacagatttcactgacaaagacgcgcttaggctgctccccaaatgcaatcacgtgttccaccctcactgcattgattcctggctcgcgtgtcacgtgacatgcccggtttgtcgcgcgaatctcagccaggaatcctcccatgtttccataaccgtccctcctcataacgaggaagagggttccagaaacacaacaacaaacgaagctacccaaattgagcaaagtacaagcaatgacgttggtcaagtttgtcttggagatcctacaccgaccagtgatgcggctaanataatgtatataagtgaagagcagcaacagcaacactcgtcttccgagccgacttttgaanttgagttagacccaacacanattctactactactactattaacantaatggtggcgat

SEQ ID NO: 29537 - DNA, 478 bp, Glycine max
  Clone ID: TF_uC-gmroLIB3258100e08a1
gaacaaacacacgttggtcactcatttcccaatcaaccatgaccactaattaactagtaaactcgggaagagcaaaaaaaaacatagcgtcgatggccactcggcaccactgtctccgctccggtgcttgacgagttgaaatcatcgaagaaaattttgtctcatccaacaaagttttttttttttttttcatatatacagtcaagaaatatttaagaaactgggtcatgcatttaccaactttgcgctagagcttgttggtcagcatggattttgggaagaagagaaaagcgaagggtcgagtttggctctgcaaaaagggcaaaaagggtgcttggagagccaggtgtcggcgcattccaaatggaaggggtggttgcaaccgggaaccaccccaaccggttgctttgtttcgatcttgtccaggcagacggggcatttgtttcccatgagaagggccttttcggtgattttgggg

SEQ ID NO: 29538 - DNA, 2771 bp, Glycine max
  Clone ID: TF_GmC552_1
atcttcacggcttttttcattttctttgtcaccgtaagcatgacggcccgaggccctccaaagcctctcgaatccaaactcaacagaacattcatttccctataaattcgacgtcgtttcgttccgctctcactccaagaaaacgttttgcgacaagattccaatcggagctcagaaaaaaaagaaacctaatcgccgatcgcgtcgaaagtccctaagcttacatcctgcttctagatagttggtaatcttatctgagggtagtagctagtaccatgggagaagtggcagtaatgcactctgagcctctgcagtttgagtggcaatgacattagtgtgaatatgactgagaaggaagtgtatcctccagaatcaaatgtggagcgcttacctggagaagaatcgagtcaatcaacagaccacaaaaatatcaatgacttgcaagagagaggatatatggagtcatggatgtcagcattaccggagaagatgccgtatcagggccccatgttgcaatgagatttttgattgccgccattgtcataatgaggcaaaaaatgatatcaacattgatcagaagcatagacatgatattccacgacaccaagtcaaacaggtgatttgttcactttgtgggactgaacaagaggttcagcaaaactgtataaattgtggtggtttgtatgggacaagtacttctgtggaaacatgcaagctttttgatgatgatatatctaagcagcagtaccattgcagtggctgtggaatttgcagaactggcggaagcgaaaatttcttccattgctacaagtgtgattgttgctactcaactaattctgaaaaacagtcacccttgtgtagtaggatcaattgcatcttgattgcccggtttgttttgagtatttgtttatatcagcaaacgatgtcactgttatgccttgtggacatacaaatccataagagcttcctgaatgaaatgagagaacatttccagtattcgtgccctctctgcttgaatatcagtctgtgacatgtcaaaggtttgggagaaatttgacatggagattgctgctacacgaatgcctgagcaatatcaaaaataaaatggttttggatcctgtgcaacgattgtggtaaaacttctcacgttcagttccattttgtggctcaaaagtgtccgaactgcaaatcctacaatacacgacaaacatgaggctgagcaagtggccacgattattcattggtttcgtcaaaagccttcacttgagttctcttgatgttgttgtgattcgtgaaggcagtgaaaatgcatgtgtgtccattgggtacgtggatgtgcacgtgggaatttgaatttggagtgcacgatgagccacattcaaagggatagaataatggttctttttcttatatgttgatttggagtggggtagtgtaatttgttggggcgccactagttggaatagggcccccgagtgttagagttcgtgtttgttttagcttagcaatttggctaaaagtgtttctatttttttgggtctcaattgataagtattctagttaaattactattaagtgaaattcatgcttctaattatttttattattctattcaagatatttataatcctgccgatgtcttaacgtggataatgatttcatttttgaatattgataacctagtcccctggagtagtgttaatattctttttggcagtgaacacacagtccactgtcttgtttcctagttaatgaagtgaagggttataatttgatccaaaggaatctgccaaggtgcagatgatgttgagtttttatgttcgtggttgttgctactcaactcttctgaaaaacagtcacccttgtgtagaaggagcaatgcatcatgattgcccggtttgttttgagtatttgtttgaatcaagaaatgatgtcactgttatgccttgtggacatacaatccataagagctgcctctgcgtgaggcgggcacgttccccggtgccgccccctcctgctttgtgcagtccgtgtatatacactagttttgatgtgttctcctcttggagtagtgctgattggagctgcattaatcgattttgttgttgctgatttcaattggtctgcggcagtatagaagaaatcaacgatgcattggtgtttacctggcttgatggggtgactgaatatgcctttagaagttttaggattatttctaaatgtgttcctacatgcaggtccctaaagcttacttcctgcttctagatagttggtaatcttatctgagggtagctagtacctgggagaagtggcagtaatgcactctgagcctctgcagttcgagtgcaatgacattactgtgaatatgactgagaaggaagtgtatcctccagaatcaaatgtggatcacttgcctggagaagaatcgagtcaatcaacagaccacagaaatatcaattacttgcaagagaaaggatttatggaatatggatgtcagcattaccggagaagatgccgtattagggccccctgttgcaatgagatgtctgattgccgccattgtcacaatgaggcaaaacatgatatcaacattgatctgaagctgacacatgatattccacgacacgaagtcgagcagtgatgtggtagactagaactttagcacaaatatttacatctctgcagtctgcactctaggcaggaacgatgacatgtttgaagggagttccttttttttcccctcaattttgtgtctcaatctctttttttta

SEQ ID NO: 29539 - DNA, 813 bp, Glycine max
  Clone ID: TF_GmC552_10
tgataatttcttccattgctacaagtgtggttgttgctactcaactcttctgaaaaacagtcacccttgtgtagaaggagcaatgcatcatgattgcccggtttgttttgagtatttgtttgaatcaagaaatgatgtcactgttatgccttgtggacatacaatccataagagctgcctgaatgaaatgagagaacatttccagtattcgtgccctctctgcttgaaatcagtctgtgacatgtcaaaggtttgggagaaatttgatatagagattgctgctacaccaatgcctgagcaatatcaaaataaaatgggttggatcctgtgcaacgattggggtaaaacttctcacgttcagttccattttgtggatcaaaagtgtccgaactgcaaatcctacaatacacgacaaacatgaggctgagcaagtggccacgattattcattggtttcgtcaaaagccttcacttgagttctcttgatgttgttgtgattcgtgaaggcagtgaaaatgcatgtgtgtccattgggtacgtggatgtgcacgtgggaatttgaatttggagtgcacgatgagccacattcaaagggatagaataaaggttctttttcttatatgttgatttggagtggggtagtgtaatttgttggggcgccactagttggaatagggcccccgagtgttagagttcgtgtttgttttagcttagcaatttggctaaaagtgtttctatttttttgggtctcaattgataagtattctagttaaattactattaagtgaaattcatgcttctaattacgcaaaaa

SEQ ID NO: 29540 - DNA, 1363 bp, Glycine max
  Clone ID: TF_GmC271926_1
gaacaagatcaaaattcaccccaacccaaagtgaacagaactgctttcccaaacatgaaaattcccaataccatactcaaactcttcctcttcatcctcttgaacccatcccagatagcaatagcactagcaagtatagaagcatgtttagacagcgtttgccaaactcacgagccagtaatccgattcccgttccgcatagagggagagcaagagaattcatgtggccacccagggttcagcgtttcttgcaaccacaacggccaaacactacttaacctatcttactgcggcgaagaactcagaatccaaagaataaactatgccgcgcagcaactatgggtgaacgaccccaacaactgcctccccaaacgcctcctctctcttaacctctccgcctctcccttcgacgctgtttaccgccaaaaattcaccttcttcaactgctccttcaacttggagtacctcgtccgtcgttaccgtccaataagttgtctcagcgattctcccaagtacctcgtttttgcgacgccttcttcgactgtgtttggacacttgtcgtctgtgtgtgacttggtggcgacggtgacggtgccggttcagtcgccgtttaatgatcgagtgacgtcgtcagaactcagcgacgatctgcgattctcgtgggactcgccgtcgtgcgggaggtgcgagtcgcacggtggacggtgcggattcaagagcaacgagacttttgagcttgattgttcccttgtcccttcaaaagggatttcccatggtgcacgttacgccatagtcatatgcataggggcaacagctttgttgtgctgcatgggagtattgaggtgcatccacagctggttaagaatcgggaaccaagatgggccttgggctaatgaaacggtgccagattttgaggctctagcgggctcacggcccacaacagtcacgggcctcgacaggcccacaattgaatcgtacccaaaaatagtgttaggtgagaacagaggcttaccaaagaagggtgacaagacctgctcaatatgcctatcagagtacatacccaaagagacagtgaaaaccataccagaatgtggacactgctttcatgcacaatgcatcgatgaatggcttccactgaacgcgtcgtgcccaatttgccgaacttctccacgaaagttaccacaaccacgtgctcgatcatcaccacaataatgctttaactttttatctctcatatttatatacgaatcactttaccacagaagatttttaagacaggcataatttgataactattacattctcctgcattgtaatgtgaaacatacatatcttacaactagtaatgtaaatatttctttgc

SEQ ID NO: 29541 - DNA, 723 bp, Glycine max
  Clone ID: TF_GmC1196_1
cggaccgtttattaaagccttttggggtctagtgaggagaagttgcagtgcacagtgtgcttggaggatgttgaggttgggagtgaagcaaaggagatgccatgtaagcacaagttccatggtgattgcattgtctcatggctcaaacttcatggttcttgtccagtttgcaggtttcagatgccatctgaggattcaactcttgaagccaatgtgggagttggaaatggggacaatcagaacagtgagctggtcagagctggagaagagagaccaagaaatggaaggaggaactggtttcctgtgctgcaatcatttaacaattttcttccttatccttgatcaatactttgttgggttttaaattgcagtcgtggttgtggctgtggttgtggtctccttgtgatccttgactttgtgagaaactgcaaaaagatgcgattgatgctgcaattgtgattgcaatgctgtcgcggagagctaaagaaccttgatgctgctgccaaaattgctgtcacggaccgtttattaaagccttttggggtctagttttcctcaccctcatcaagcatgaacagctaagtctagacactgtcatgcctctaaaatccttcctaattgtatatatcatttagatttccttgtctgactttcttgtaccattcaaatgtatatgtttgtcaataatttgcaaaaacagaataaacttaattattattctct

SEQ ID NO: 29542 - DNA, 961 bp, Glycine max
  unsure (1)..(961): unsure at all n locations
  Clone ID: TF_GmC310374_1
aaaacgtaactctcaatttcttagcccccttcccttcctttccctcgttgactttgtaacataatatctttcagtagccaaaaaaacaaccaatacttcattcctagggaatctcattctcatccatcaccatggctaacataaacacttttttcaacccctttcaatccaaaacaatcttctagcaagcactttttcatggtttcatcatcatcaagatgaacaacacaaccgattccggattcctcggctccaacaacaagtggctttggcatggggataggaatctcaattgggattcttctcctcatcacaaccatcacactcacctcctacttctgcacaagatcacaagtgccaactcctccaaggagaagaacaacaagtaattccaacccacaattccttgagccacaccacacaatagttgatgttggcctagatgaagccacaatcatgaactaccccaagatgctctactctgaagccaaactaaggaaatttgattccacttcaacaagctgctccatatgtcttggagattacaaaggttctgattttctaagggtgttgcctgattgtgaccatgtcttccaccttaagtgcattgacccttggttgaggctgcatccaacatgtcctctctgcagaacatctccaattccaacacctctgtcaactcctctggctgaagtggtccctttagcaaccaggcgagattaattcatagtttgaaatgttcgttttaggtctagcatctcttgatggaggcaatcctgttcgagcctgatataatcaccatgggatagtttgaaatgtttttgcgttgtagtattagtacactaagtttgaggtttatcaaaatttcataaagtactctattgattgattctatattgtaaattcttctcttgtatcntttttaaaaanaacaaaaaaaatgttccacccccnacccccc

SEQ ID NO: 29543 - DNA, 2128 bp, Glycine max
  Clone ID: TF_GmC1470_1
aatctgtaaaccctgatttttcttctttgtagaaattcggaatttttatgtgacaaagacgttatgattatctagtttttttctttttctttttttccccctgtacaacgatatctggctattttgtcaccttcacctattcttgtttgtttgattctctctgcttaacgtaactttatcatttttctttagagattttgctgcatttgacagttgtttctttcaattccgtccaacatttgggcttcgtcgtttacttgaggccgtgtcatcgaaaacgcgttttgtatgttatgaaacgacgcaatagcctttttggttcacgaataccacatgtaaaatattgattatttttatccctaagtgtgcccctaagtgtgctgtacgaggattgtcatgtgtaagctcgaaacccggattcttcgtctctggcccaacgagtaatacggaggagacgccgccctttttctccctccgcgcgcttcagccaaattgcatgtcgcgccacaacgatatgataccccgtcctcaccattttctcttttgaccggtcactttctcttcggttcccgtcttctttagatggcaagtgggtttgggggatcaacggggaggtcacccccaagcccttcctacttcaacaacaataataacagcgatgctgccaattttgaatgcaacatttgctttgaattagcgcaagacccgataattactttgtgttgtcatcttgccgcctggcattggctagaggggggccttcactatagctcagggcaagtcacacatacacgatatgataccccgtcctccctctcttcacttttgactattgacttcctcaaccgatccactcttctctctatctgcagatggcaagtgggtttggggaatcaacagggagatcacccccaagcccttcctacttcaacaacaataataacaatgatgctgccaattttgaatgcaacatttgctttgaattagcgcaagacccgataattactttgtgtggtcatcttttctgctggccctgtctttacaaatggcttcactttcactcacaatcacgagaatgcccggtgtgcaaggccctcgtggaggaggagaagctggttcccttgtatgggagaggaaagtcgtcgactgatccaagatcaaaatctattccgggcgataacatcccgcatcgtccggctggtcagaggcctgaaactgctcctccacctgaaacaaatcattttcatcaacatgggtttggatttatgggtggcttggggggatttgcgccaccgccgatggcaacaacaagatttgggaattttgcattgtccgcagcttttggtggttttataccatccttattcaactttcagttgcatgggtttcatgatgctgccatgtatgggggaggggctggttttcctcatggatttgccaatacatttcatggtgtccatgcccatggattccctctgcgcacccatcaagggcaacaagattattatttgaagaagcttcttctatttgttgttttgtgtgttgttcttgcttttatatggcaataggttggatacaatctctagcagtatctgacttctgctctgataggtcttctgatgtgctctttgttttgtaactaaggagtaaggatgttgttcatatgataatactgtcttattaatcttgtagttcttttctttgtgatagctttgtggttcccatggtatccatgtgcaaaagatataaagcatgaaagcaatgcacccattgttaggaataaggatctgggtaccggtccgtagatattaatttcttagttattatactgagtttgaaactacaagatagctgaaatagtgaagttatgcccttggtttccttttgtgttctcatatttgcaattacatgttggcatgctattgctaatgttatatctaatattattttggtgcctcaaaaaaaaaaaaaaaaaaaaaaaaaaaaaaaaaaaaaaaaagaaaaaaaaaaaaaaaaaaaaaaaaaaaaaaaaaaaaaaaaaaaaaaaaaaaggggggggccgcccaaaaggaaccaagctaacgaacgcgggcaggcaacgaaaaagctctgcaaaggggggcccaaa

SEQ ID NO: 29544 - DNA, 632 bp, Glycine max
  Clone ID: TF_GmC1470_3
atttttatccctaagtgtgcccctaagtgtgctgtacgaggattgtcatgtgtaagcctgttatatatgttatgaatcactcattaatttgtataggcatttgatggtttgggttttgtagatggcaagtgggtttggggaatcaacagggagatcacccccaagcccttcctacttcaacaacaataataacaatgatgctgccaattttgaatgcaacatttgctttgaattagcgcaagacccgataattactttgtgtggtcatcttttctgctggccctgtctttacaaatggcttcactttcactcacaatcacgagaatgcccggtgtgcaaggccctcgtggaggaggagaagctggttcccttgtatgggagaggaaagtcgtcgactgatccaagatcaaaatctattccgggcgataacatcccgcatcgtccggctggtcagaggcctgaaactgctcctccacctgaaacaaatcattttcatcaacatgggtttggatttatgggtggcttggggggatttgcgccaccgccgatggcaacaacaagatttgggaattttgcattgtccgcagcttttggtggttttataccatccttattcaactttacagttgcat

SEQ ID NO: 29545 - DNA, 539 bp, Glycine max
  Clone ID: TF_jC-gmXLIB3563P066aa12a1
cgaaaagtaagaggaagaagcttcgtcctttctatctccgcaggctgcagacaaaccaaattttgagtcacacatacatgatacccattcctcaccattgacttcctcaaccgatccatttttcttagtttttcgctttcctcagatggcaagtgggtttggggaatcaacagggaggtcacccccaagcccttcctacttcaacaataataataacagcgatgctgccaattttgaatgcaacatttgctttgaattagcgcaagacccgataattactttgtgtggtcatcttttctgctggccttgtctttacaaatggcttcactttcactcacaatcacgagaatgcccggtgtgcaaggctctcgtggaggaggagaaattggttcccttgtatgggagaggaaagtcgtccactgatccgagatcaaaatctattccgggcgttaacatcccacatcgtccggctgggcagaggcctgaaactgctcctccacctgaaacaaatcattttcatcaacatgggtttggattta

SEQ ID NO: 29546 - DNA, 709 bp, Glycine max
  Clone ID: TF_GmC1231_1
tgcacgcgccgtaagctcggaattcggctcgagctccacctgctcagaaggaggccattgaagcgctgcctaccgtcataatcaatgagaattcgcagtgttctgtgtgtctggatgattttgaagttggttctgaagccaaagagatgccttgtaaacataggtttcatagtgggtgtatccttccctggctggagcttcatagttcttgtccagtttgcaggcttcagttgccattggatgagtctaagcaagactctgatctgtcaagggatagcagaagccaaagggaggatgaaagtattgaacatgacaatgatgaagaaagagatggcgaagggagaaatgcaagtgggggtagaagattctcatttccatggcctttcaatggattattttcttcatcaaactcttcatcctcttaaagttccaatgccaacggaaatgataatcaatcagatgaaaactgagtatttttgcatatctgttgtgctattcatgtgctgccttgcttatgtacagttttcgaccaatgaaagaatccaatgttgatagaacaatttgtgatttttcttgtggctttgtttttgctaaattttgtgcttctagaattcagttgctatttttcttcaacttttacccttaacttggcatttgtataattctcgtggtggttttatttccccatcttatcctgtactactttggt

SEQ ID NO: 29547 - DNA, 658 bp, Glycine max
  Clone ID: TF_GmC187_2
caactttcatgcgcatagagccagacaagagcctggtgtgtgtgtttgcctgtatttattggacttcaagctgcaattctcctacttcagcactatcttgggtcacgttggttcattcctcgtcagattctccccgagaaatacagctattataggaggtttgatcaggatacacgacatgctactgactgtgttatttgcatgacagccattgatctgtcccagcgatctaatgattgcatggtgacaccttgtgatcatttcttccactctggctgtttgcaaagatggatggatataaagatggagtgcccaacttgccggcgcccactaccccctgcctaaagggctttcttcactgtttatgtcaataggattaactgaccctgctcagcttcatagttttagtatatgcttaaatgaccaagttttacattgtttttgcttttaatttcgagagaagtgaaatcacacgggctttggtggtcaaccttttcttctcatgaggactgaatgtttcttcttctcatagaaattttgtaatttgattttgccaccttataccatatgctgagggtatatttttgtacacaagttggaagggccatcaacattaaattgtacttttttctcaatacaaaatttatttttattcttc

SEQ ID NO: 29548 - DNA, 2109 bp, Glycine max
  Clone ID: TF_GmC999_4
ccggtgccggaacttcccgggtccgcacccacgccggcctttttcacctatagcgcggggaataacataaatggctcgaagattcctccacccacctaccaccgaagaacggatattacagagggaagagagagagatgttttgcttcctctaatctggcgaatcattcgttctagcaaattttgccgaaaactccaaaaccccccctttagaaaactcgattaacaacaatctcaatcttctacagcttatcctctctctctctcttcttcgcttcccccaacagcaatttcattcaaaactctctctcagatgatgaaaaaatactaaaaaaaaaaaaactacacttcacccaccaaaccaaagcaaaagggaaagaggacgatcgggaaagagagtgtctttaatttcacagtttcatagcaattatcgccgaaaaatgcaaaatttccactcatatctctttgtttatgacatctaaaacatctatctactctctacccactttctcagttccaggtcagcaagagaaacagtacttatccatattacagggttatgtgaactgaagagggagggtactggtttgcggaggcagtgacacttctgcaagcctagaatcctctctcctagttttttgtgaaaacagatagtgtgatgcttttggaggatccttttctcaaagcttgcatgtaacactatctacattttggtgatcagttgaagtgtggaaaaaatcttaagctaaaggcaatttgggaagctggaacaatgggttctgtttgttgttgtttgagttttgatgattttgaagattatgtaaatccaaatagtcctgtatataggaactgcgtgtgtctcagttgcttgatacagaaccttttgagtgtgtattcttcaatattccgtagaggggatgctcattcaattccttcgtctattcaaggggcagcatctataacttcagcagcatcactcgataattcactatctgacatgtaccgctctcctccaaggccattaccatatgatgcagaacccagatattttcgctcacaacgtgatggactagtttcaaggcgtgagaagggttcaagtcattcaaatgaggaaacagaacctctaagaagtgatgcagatgtggatccagaatctttaaattcaggagacaaatggaatgaaagtgcctgtgaagctggatcaaaggaataccattctaagtcctcactaagacttcaatcaacaaaatattcaactggagttggccttgtctatgcatcatcagaggaggaggatgtctgtccaacttgtcttgaagaatacactaaagagaatccaaagataatgacaaaatgctctcatcattttcaccttggttgcatttatgagtggatggagagaagtgacaactgtcctgtttgtggaaaggtgatggtattcgatgaaacgactttcacttgattacaaggtttgtgttgtggatgaagtcagcaactgaggcatggaagaatataagtatatagacattgtgaatactacatattaagtgtttgtcatgtatagtaagaatgaaaagtttccttaaccattgttgtgagttcattctaatcccgcttgtttttgtgttttaaaatttccacatgtccaaaactgtgaagaaagaaagaatatgcaattttagatggaaactttgtgatggcttcaacatctttccccttaattaatttgtgattaagagaatcagagtttgcttatccatataacagatcatttgaacagaagagggagggtactggtttgcggagtcaattggacttctgcgagcttagaatcctctctcctttatttattaatgaaatcatagtcattagtcttggctagtgctgttggggactctttttcacaaagcgtgcatgtaacagcatccatgttttggtgatctttgagttgagaagagagaaaaatttaagttgaaaaagtgagggatattgaagctaaaacaatgggtgcagtttgttgctgtttcaatgttgatgattttgaagattatatgaatccaaatagttctgtatataggaactgtatgtgtctcagttgcttcgtacagaa

SEQ ID NO: 29549 - DNA, 711 bp, Glycine max
  unsure (1)..(711): unsure at all n locations
  Clone ID: TF_GmC1738_4
aatgaggaaacacctggtgagggagggggaggatcaatgattcctatggagaccagcaatggttactcggtgaatgaacgaacactttcacctgaggatgcagaatgctgtatatgcatctcatcctatgaggatggagctgaacttcacgttatcccttgtaaccatcatttccactatacgtgcatagtgaaatggttaaagatgaatgcaacttgtcctctttgcaagtacaatattctcaagggaaatgaacaggtgtgacaaaatactaaaggcgatcaaagatatataatatcaagctgagcttaattatataacagctcagggttttcaactgctaatgtgtatatgtagataatatcaagacatgaaaaaatagaacctctcccaatttgctcggtttagctgtcattgctttgttgcttaatgcttcagtagagaaaaaggtagaggtaagaaggaaaggtgcgtataaagatctttttaaataagttaacgatttcatttgacccttatttgtcctttatttttatttttttttagagaaatttgtcctttattagtcatttcaaaattttcctatttcgtgtatcaaatttgttcatatgggagaaaacaatggaaagtgtggcactttaactttcccctaaaaaccccccccnnnnnnnnagggcggccgccgactttagtctcgtcgtcccgggaatt

SEQ ID NO: 29550 - DNA, 1069 bp, Glycine max
  Clone ID: TF_GmC249_1
cacaaatggagaattccccatctcatccttcttctcttcaatgtcctccttcaaccctttctcccctccaccacccaccccttacctcaccaacctcggcttcggctactccatcgccatcgccctcggcgtcctcttcctcctctccaccctcatcctctcctcctacctctgctgccgcaccctccgccaccgcaacaacaaccgccacaccccccgtaacaacacctccgatggcatcgtcctcccgcgcgtgatcttcgtcgccgaggacgacgacgatgacgccacccgccagaacgacgccgtcaccggcctcgaccaggccgtaataaactcctaccccaagtttccttacgttaaggaaggtgattacgacagcacctgctcgatctgtctgtgcgagtacaaggattcggagatgctgaggatgatgccagagtgtcgacactactttcacttgtgttgtctcgacccgtggctcaagcttaacgggtcatgccccgtttgccggaactctcccatgccaacgccgctgtcgacgccgctgcaggaggtcgtgccgctctcacagtacgccgatgccagggcgaggaggtgaattcgaattttcttctccggtgtggctcgggttgctgggttcagtgggaaaagcataaaggacaaaacttagatcagttatttacatgtttttgcatgctgttattatcccatcaaaattggagttttacctttaatagttactggttagttttactcagattatccaagtaaaacttcagtttttgacgagagaacagcggtaaaaacacttgaataattgtatttaagttctttgtaagtgtaaatcttctcccgtgatggttgatgatggggagtttctgttttttgattatgtggttgtatggtgtcagcaagcgtgttgctggttactgaattattattggtaatgcactgaaagtctgaaactatgcagaatgtcacttttaggggaaattgtccgcgacttcgttttgttagtaccatgatttgacattggatataatggatggtaggactattatttatt

SEQ ID NO: 29551 - DNA, 905 bp, Glycine max
  Clone ID: TF_jC-gmfl02220056h06_FLI
gccaccaccaccccttacctcaccaacctcggcttcggctactccatcgccatcgccctcggcgttctcttcctcctctccaccctcatcctctcctcctacctttgctgccgcaccctccgccgccgcaacaacaacaacaaccgccgccacacccccgatggcgtcgtgctcccgcgcgtgatcttcgtacccgaggacgaggatgacgacgacgacgacacccgccagaacgacgtcgccaccggcctcgaccaggccgtcataaactcctaccccaagtttccattcgttaaggaaggtaattacgacagcacatgctcgatctgtttgtgcgagtacaaggattcggagatgctgaggatgatgccagagtgtcgacactactttcatctctgttgtctcgacccatggctcaagcttaacgggtcctgccccgtttgccggaactcccccatgccgacgccgctgtccacgccgctgcaggaggtcgtgccgctctcgcagtacgccgatgccagggcgaggaggtgaatttgaatttgaattttcttctccggtgtagtttgagttcagtggggaagtaaaaggagaagcatttaaatgtttttagttgtttttcttatcaaaattcgagttttatctcgaccatcataataaaaagtagttcatgtttagatgttggtgtagattgtcgaggtaagactacaattttgattagagaatagtactaaaaacatttaagaaaaaaattgtatctaaattttctgcaaaatgtaaatcttccctgtagacgggagatggtgattctttttttttttttttttaattctgaggaagaaaaatgaggtggtggtggtggtgggagcatgtgtaggattacaaggcaatttcaggagggtttg

SEQ ID NO: 29552 - DNA, 1252 bp, Glycine max
  unsure (1)..(1252): unsure at all n locations
  Clone ID: TF_GmC150616_1
gcaaagcaaaagatgttgttgaatactctgttactattatgggtcaaggccaagttagaccagtccattctggaggttctccaaccagactagtcctctccaacttggtttctttttatacaaccttcccactctcattcttcaatcaatccaacccaaaagaccctttctttcaatattcatagcatcatcatgggtgactcttccgcggctaatgaccatttgggtgaatccccggccgttgagttaaccggaaagataatgattgtggttattattatcatgttcttcgttattgtaattgctctctgccttcatctcttcgccagaaacttctggtggcgcagccctgctccccaatctcgcagccaccgccgccgccgctttgttttctcgtccggtccagacggtggaagcggactggatcccgcggtgctgagctccctaccggtgttggtattcgaaggccatgcccaagagtttaaggatggtttggaatgtgcggtttgcctctccgaggttgtcgaaggagaaaaggccaggcttttgcctaaatgcaatcatgggtttcacgttgcttgtattgacatgtggttccaatcccattctacttgccctctttgcaggaaccctgttgcatcctcagaagaatcttcagaatctcccacttttcccacaaacgtcttggtttgggggaatcaagctcaaataagttctactggtggtggtggtgcttctttggaggaaggttcatcctcatcctcttccgcttctacttgtgatgatcatggaatgttggtgattgatataccaagtgagatgacttcaacctctctgtcgcctgaagatgacgtcaaatcgcctatgacgggaagactcaggtcattgaagaggcttttgagcagggacaaaaggtttaatccttccagtcctacttcttctccagatgtacaacaaccaggatcagggagctgagttaggaattatttcccaatcatattcattattttttctttttttcttttctttcatgtgcacatattgcgcattcaggtgactgaagattgtatctaatgtttgcaagtacaccatgagggtgtttaatttttctgttcttcagaggtcagagctcctccagctctcatagatgtgctattattgtctttccnatacttgtgcatataatgccttagcagattcattgtctctcattgtctttgttgtatacagtataggtttctttcangnnacg

SEQ ID NO: 29553 - DNA, 1127 bp, Glycine max
  Clone ID: TF_GmC35324_1
aaccatgtgaacaccttgcctatatataatccccttagacaaccaaccacaagaggctctaataactcattattcattaacacacacctcaaactaaaaaaaaaaatgtattctgttgcttccacttcccttacttcaccactcctccacgaccttgagaacttccattactcaagaaggttactccttcactccccataccttaaccaatcagccaaacccccaagaagcagccacgattcttcaacagaaacataccttggagatggcaatttcgatgcaaatgttgtcatggtactctcagtcctactctgtgctctcatatgctcactggggctaaactccatcataaggtgtgcactaaggtgttcaaattttgttgtgagtgactcagtggcaaccaataacaataacaacaaccctccagcagcaagagttgccaacacaggagtgaagaagaaagcactcaagactttcaccacagtgagttactcagctgagctaaacttgccaagtttggactcagagtgtgtgatatgcttgtcagagttcacaagtggtgaaaaggtgcgcattttgccaaagtgcaaccacgggttccatattcgctgcattgacaaatggctaagttcacactcttcatgccccaaatgcagacagtgcctaattgagacttgccagaagattgttgggtgcagtactcaacaagctagctcatcgcaacaacatgtgttggcagtgccagaaaccattgtgaccataatagccccacttgagccagaaggtttggtgcgtaactatagggaacttagctaaattatctagtacttattaattagagcttatcgattaataatgacataatggttgaagtggatgaatggaatggaatggaccctagtcagccatacttggttaagactagtcagccacccaccactcaatcaatcatagttaatgtagtggttaatgatgatgaatgtatatagcatggagtctcttttcttgtgttgtttcaattttaccttccccacttaaatgtacaaaactagttcaaattgtaattacattctttccaataatagtaatctgaagtgggtaccttaacagggtacttagtagcctac

SEQ ID NO: 29554 - DNA, 3035 bp, Glycine max
  Clone ID: TF_GmC23999_3
gttttaggtggggatggagaaaagagcaagacgcaagcatagttgccaatagaacccgaggtcaagcatttcaagtcctggtagcttcaggaaaggaaggttcaaaagatgatgtggtcatggttgatcctgtggaagccaagagattggctgccaaacaaatggaaaaaattaaagcaaaagagaaactcaaggtgaaagcagtcttatgtttgaatttgaatcacatatttggggttattgtcttttattatagaagtatacaagaagtttgaaagtcattgtccttccccgaatccctgtaattgtcagtcaggacagaagcaaactacggatacagaggcagcgacggtcaaggtccagaatccagaaccgaatgaataacccactgcccacagattatagaattttggacttgcacgccgtcgtctcccaccactcaatcaccatgccttctccttctgcagatcaatcacaatcccaaccaaaacctaaccccaacctcctttccctcttcctcaagcccatcatcatgctccttctcacctccctcttcttcctcttcctcggcttcgccgccttcctcctcctcaacctcttcctcctcggtggcgccttccaccgccttcgcttccgcccctccgttacctccgcccccgcctcctccatcggcctcccccctcgtgatatcaacaacctcccccgctttcttgtcgccaatggatccgcgacccgacccgactccaattgcgtcgtctgcctggacgcattccataacgcccaatggtgccgaaagcttgctgcgtgcgggcacgtgtttcaccgcaggtgcgtcgacacgtggctccttaaggtcgccgcatgccccacgtgccgcacacccgtgggattcaatgccggtgctacggtacatgacccgcctcagcggtctgaccatttgcatacctgcggaactgactccaatgctctcaccacccttttatagcttgtaagttttcgtttttaagcctttcccaaaccatgtaaggatatcaagtaattgtttttttaatctatgtatatgaattgtagcaatagttttttctcccatttcgacgactattgggaagaaatgaaccaacttaattcacgaatgttttggtaagtttttacttttaagaagaggagaatgctggacccccttcaggaaaggaaacccgggtccgtggttgggtcctgtcgggcctcctgcttttaggatcggccctgatcgggtcaaagttggaacccttattgggcggtcaggattcgttcccggttaaggataaagcgggtttaatagtttcttccggattgttagtgctgtggagttacgttgttatccctgtcttttccggggcctgtagaaaaccccccccaattagggacccccccccagatgattatgcccccccccaccaacaactttttgtaatataaaataatgtaattcaccctcatgatcccctttttccaactttagtttttgtatttccagttttcccccacctccccccaagaaagataccaaaaaaaattaaatgtcttttccgggaattttccctaaaaaaagtttcgcacttcgcaaccaggggaaaaagaggtgtagcaagtacgggagggcaatgcaatggccaccattctgaccgccaagcaacgctcagtttgtttcctttcatcagcttgccaaccgctacttcctctcccacttctcccaaaggtggtgatggagaaaagagcaagacgcatgcatagttgccaatagaaccctagccgtcgaagcattttcaaacctcctgcttcgctttcacggaaaggataaggatcacaatgatcgatgtggtctttggcgtgatacctgtaggaggcccaagatattgactgccaaacaaaatggaaaaaatgaaagcaaaagccaaactcaagagaagacgccaaattgaggcaattaacggagcatgggcaatgattggtctcacggctggccgtagttattgaaggccaaactgggaaaagtattctgactcagctgcaagactacttgggtacaattcttagtttctttgtgcggtagacttcttccacgagttccatggatacatattaaggactccaggttctttctcacattctttgtactttatatttgttaaaagtatccctgcgagatttttcttcacatacctagccatacaattttcacttctcaactttcgtcgttgctcggttaagctacatatggatcataaatttttgagctgcaagccagtttatgaagtttggtttttttgtttgtctatgtagatgaaattcggaccgatatcgggctaccgagagaacgcatgattcaaggggcgtgtgttagtcgcggtttagggctaaatcggttctgataattcctactggatcgttcgtgctgaggtgttaagttatgaaaaaaaaataactctgtcactaaaggaaaaatgatcagagtggagttatccattcagaccttgtctttattactgatgagaaacctcatagtctcttaaaaagggatggcaatgatcttgttgtcacccagaagatatcgcttgtagaatccttgacaggttacacagtgcaactgacaacccttgatgggcggaatcttacattccccattaactccactattagtccaacatatgaagaagttgtcaaaggagagggtatgcccattccaaaagaaccttccaagaaaggaaacttaagaatcaagttcaatatcaagtttccctccaggcttacatccgaacagaaaagtggcatcaagcgattattgacatctccttaagcaacagcagtagctcttcctaccatttagctaacattgtaagatgtcagttattttatgcttggtttatttgttttcaaatggaaattgctgccgctgtgaactggatttcagttagaacagtttattagaggatgatatttgttaattgtttcatgtcttaagtatttggtagtgaaaaaaaaaaaaaaaaaccaag

SEQ ID NO: 29555 - DNA, 483 bp, Glycine max
  Clone ID: TF_LIB3242-353-Q1-J1-B10
ctcccatctgtctctgatgcggtggggagtggggacagggagggtttgccatttataaggcatacaacccttccttttctactagcctgtgtgctgacccgtccttttcttctccatgcattaccacaacgttgtagatatggaagacatgacataaagtcatatgagttcagctgcggcctatgttgaaggggggaatcaagaatcctgtgatgacgcttgcagcatatgcctcgaggagtttgatgcaagtgatcctctctcggtgactacctgcgagcatgagtttcatctgcagtgcattctccaatggtgtcagagaagctcctacagtcctatgtgctggcatcctattagcttgaaggaccctactaagtaggaagttgatgagggagtccagcagagaagaagcttgacggctaccccatcaagaaatgctgctgttcttcatcaccctgcctttggagatattgagatgcagca

SEQ ID NO: 29556 - DNA, 1655 bp, Glycine max
  Clone ID: TF_700842658_FLI
gagcgctgctacaagagagagagagagagagagagagagagagagagagaagcatcgacaccaaaatcgcgaatctcgttcattgttgtgcttccgtttcgcgttggtgatcctcctctcgctgctctctccaccaccacacagagtgactcactcaccaaatagcaatggctgctcagaagcgttccttccctgatgctcctaacgataacaaccgccacgccaaacatcaccacgaagaagcaaaaactgaagaagaagaagaagaagaagaagaagaagcacaacaacaacaacagcatgatgaagaagaagaagaagaggataataattacaaatcagacgattctcctcccgaagacaaatccgaatatgtgtttgtagaacttctggaaatacgcaaagaagtccaatgtccaatttgcctaggtattattaagaaaacacgtactgttatggaatgcttgcaccgggtttgcagggaatgcattgacaagtcgatgcgactagggaacaatgaatgccctgcttgtcgaacacactgtgccagtcgtcgttctttgagagatgatccaaactacgatgccttaattgcagctttatatcctaatattgagaagtatgaacaagaggagcttgaatttcgtgaagaggacaagaaccgcaataagcaggcttcaattgcaaaagttgttcaacgacaatctgaagcactggttaagagacgtagagatacaccaggttcatttgtgacaagatcacagcgcaatcaacgaaatgttctctctaggagacaaaaccaagggatggataatcaaggatctgaagataatgaggaggaaaatgacaataatgaaaaggactcatcttccacagatgagcgatgtacagaactcaggcagagaaggcgaaagaggcggaccagaggtcgtccttctcagccctcatcatcgacggcaagtcctgatggtggatgcatagaaagtgacatggacataagaatttcttctagactggtgtcaaaacctcaaaaactaacttggggaaggggtggttttaggagtcacacacggcatggcagtggcaatggtagcaatagcaaaagttcccgcagtagtcgcttggctaagttagttgattatctccatagcttgaatgaaaacactgatgagttagatgtccatctcattcttttgtctttagacaaacaaattacaccaagcttgcagcagccacacctttgctgtcggccaacattgtctgtgaagcatctttgtgaatatgttgctcatcagacacctttgctgcttgaagaagttgagatattggcagttaaaggatgctgcagtacagtttgtgacaagtcatttgatgagacttcatcctctgatgagctaactacgctggttatagatcctagcaaagatgaactggaaactctgcaagggcatgaatctctggcagggattaaatctaaatgcatatctaaaagggagcatttgattctggcatacaggaggaaggaatgaacattatagacagttttgagatttatgaatgccagggcttattctgtacgtacataggaaaattttcgactacaaaactatatatagttaaataataatatgaacctcccgaaagattatatagac

SEQ ID NO: 29557 - DNA, 943 bp, Glycine max
  unsure (1)..(943): unsure at all n locations
  Clone ID: TF_GmC127138_1
ctctctctcccttcacaaatggctaacaatcccttttctcattctcttcttattcttctttttttcttttattcttcactctcatgtcatcttcttccattccctcctcccctgatcacttcccccacctcggcctcggctactccatcgccatagccctagccttcctcttcctcctctccaccctcctcctctcctcctacctctgctgccgccacaaccgccgtcgcctccgccacaccaccgccgccgccacctccgacgggggcatcgtcctgccacgtgtcatcttcgtggcggaggacgaggacgaggatggcagcgtggcggtggggttcgaccagagcgtgataaactcgtatccgaggttccagtacgacagggacaacgcacggaacaataatattattaacaccacgtgctcgatatgtttgtgcgagtacaaggattcggagatgctgaggatgatgccggagtgtcgccattacttccacctatgttgtctcgattcgtggctgaagctcaatggctcttgccccgtttgcagaaactcgccgcttccgacgccgctttctacgccgctgcaggaggtggtgccgctctctcagtatgctgctgataggagaagaaataggtgaatctttttttacaaaaaaaataactttttgggttaattggtgatgtgggttttgctttttttgttgttggggtatttaaagtttttaactttcttagttttagaggttgggtaggtgtagggggagggggggaaaatagagggtttttatctttttcttttttgtttcgatttagctttgatcatgtgagggaaatgggaaaaaattattagagctagttggttgattatgtaattcttccatagggctattttgtttcgttttcccccctcttttaaatagattaattcaagtnntgnngtaga

SEQ ID NO: 29558 - DNA, 1974 bp, Glycine max
  Clone ID: TF_GmC1149_1
agatttcatgcccccaagtccaagtccaagtcccattctcttctctctctctctgagcaatgcctgtcacaaacacaacaacaccaactgtggcagaacacatcaaatggagaagacccagaaaccaattcaaccaccatcagcaccccatttcagaaaccgatccaaaccctcaaatcccttccattatccaatccactaggtgcaagtctaccatttcctccttgctcctctccactttctccaacaacacctcctccaacaatgacactcccaccaccttcaatgccactgcccatagcaagaaaaaaagcaacttttctgcatcaaccttcagagggttggggtgcaccgccggagcgtcgcagcaggtgtcggtgccggcggtgattcgctcctccgccgtccaatccaagtcccattgtcttcactctctctctgtctatttcctgccacaaccatacctgccacaaacacaacagcacccaccgtatcaggacacctcaaaattggaaagcaaagaaaacaagtaaaaagaagcacaagagaagcagcagcagcagcaagcacaaaactttccatcccctaggtgcggttctaccaattccagcgtgcgtgtattttcaagctgtttcgtccgtccctctcaacagtttctcctgcaccacccttcaataccgctgctgattgcaggaagaaaacaagcattttgtctcttctgcaagagggaaaattgatgtggataagatcactcacagggagcgatcatcgtatgtgggaaggcgcactgaaaccttcacttttctggacagtactgatcctgacattttcacaccacgctctgcctctgactcttatggaactgcaacatactatcgtcatgttagagatccttcctctgatggttttgctgagataatgatgcttcaagggagtctactaatgggtggacaactaaattcacatgatcatttcaaagactggagacttgatgttgataacatgtcctatgagcaattgctagagcttggtgagagaattggtcatgtgaacactgggcttaaggaagatgagatgggacggaacataaggaagactaggcttcaattttgggatgatacatcaaagcaccaagtagataaagagtgcagcatttgtcaggaggagtatgaagcaggaaatgagttggggaggctaaattgtgaacacatctatcactttcagtgtataaaacaatgggctgcacaaaaaaatttctgcccagtatgtaagcaacaagttgcggctcgacactgagtgacacaaccctactactgtttagcttccattctcatccataaatttgtgtatagttttccatatccaatacaagcaagaattttcattctctgctgtcaatcatcatttcatgtttcaaaattcctgcatcctctgcgagaagtcggcaattatatgttattgagtaaaggttttttattcgggctgagacctttgcatattatacgcaagatttgtcttgcctaagagcagttattttttattttcttttgggtttttaatgaagttgtgtctgtgacatagtagggtgttcttatttggaatgcttgtcctcaactatacccattttggatcctatggtgataagtttttgttggctgttgctacttgcttgtcaattatcatttcatctttcaaaattcctgcatcctctgcgaggaatcggcaattatatgttatcgagtaaaggtttatattcgggctgagacctttgcatattatacgcaagagttgccttgcttaagagcagttattattatttttttgttttgggtttttaatgaagttgtgtctgtgacgaagtagggtgttcttatttggaatgcttgtcctcaactatgcctatccattttgaatcctatggtgatagtttttgttggctgttgcaatatctatattatgtaacttgtttatggg

SEQ ID NO: 29559 - DNA, 947 bp, Glycine max
  Clone ID: TF_GmC1428_1
atttgcacctgtactaaatataaggcagtggaagaaggtttaattactgtgaatgttagggaagaagtactgaaggtgtggtgatgggtgttccacaacctccacctccctctcaacatctctatccacaagaaattcagcttaaaatttccgtgaatgttagagaagaagtactgaaggtgtggtgatgggtgttccacaacctccacctccctctcaacatctctatccacaagaaattcagcttaaactttaccaagccttcatattctcaattcccatactcttttccatcattttggttcttttgttttacttgttctacctcaaaaggagggcttcttctctctcatcaccacctctccacatacttcccagtactactaattcacaaactacatatccttatccttcacaaccttgccgtttagatctgacagtgcaatttctggacaaacttccaagaattttgtttcatgaggatttaagaacaggagattcagtatgttgtgtttgcctaggagaatttgagctgaaggaagagttgctacagattccttattgcaagcatgtgtttcatataagctgcataagtaactggctgcaatcaaactccacgtgtccactttgtagatgctccatcattccctctaccaagttccttaatcccgcgccacctattatatcagacccaacacggcaaggtggagtttcaggctcttcatcacacatcttgtcattgcctcatcaacaagaagaagttggtgcttccacaaatactaccatttttcaagggaatgatgtataatgtattaaataataaatagacaataataccttttgaattgtagggggaggaggcattcaactggtcctcatgagtctagagttctgtatattcaaaaccaatattaatgtatgaaataaaatgtggcctttctttatct

SEQ ID NO: 29560 - DNA, 2529 bp, Glycine max
  Clone ID: TF_GmC552_4
tctcgggtgcgagaagacgacggaagggggaaggtcaatttcgaagcctctcgaatccaaactcaacagaacattcatttccctataaattcgacgtcgtttcgttccgctctcactccaagaaaacgttttgcagaagattccaatcggagctcagaaaaaaaagaaacctaatcgccgatcgcgtcgaaagttcgttgttgttctgtgaaattgccttttttttttccgttctgtgataattctgtgaataataacaataattgtgtgtgtttcctcttttaggtaacgtagctgaggttccttttttttttataatttttttgccgtttgaagataggcgtttcggttactgctgcgttttgtggtttctggagttttaattctgtgcaatctgttaattctacatgtttgattgtgttatttttgggtgcgagatttgattgtttcctatgacttctgtgatctggagttgaaatgttggctaacgagtttagaagccggtgcttttgtggtaatttactgctcgattctgtcaagtacccccagtgctaccttgtagtaatatgtggaattcttgtaaacacattagttgcgctgtgtttatctcttggagtagtgctgattggagctgcatttctcgataactgtgtcgctgatttcacctcatctccggcagtataaaggaaagcaacgatgcgttggtgtttacctggcttgatagggtgactaaatatgcctttagaagttttaggattatttctaatgtgttcctacatgcagattggatcgcccaccactctctccagctccaaagtcaccggactactgcctgcttctaaatagcttataatcttatctgaagatagagatatcatcatgggagaggtggcagtaatgcattctgagcctctgcagtttgattgcaatgacatgaagcatatcactgagaaagatgtatataatctattgtcaaacgaagagcacatacttggagaagaatcaagtcaatcatcaaatgacaaaaagatcaatgatttgagagagagaggatacatgaaatgtcaacattaccgaagaagatgccgtattagggccccctgttgtgatgagatttttgattgccgccattgtcacaatgaggcaaaaaataatatcaacattgaccagaagcatagacacgatattccccgccatcaagttaaacaggtgatatgttctctttgtgagacagaacaagaggttcagcaaaattgtattaactgtggcgtttgtatgggcaagtacttctgtgggacgtgtaagctctttgatgatgatgtatctaagcagcagtatcattgcagtggctgtggaatttgcagaactggaggatgtgaaaatttcttccactgccacaaggggggctggtgctactcaactcagctgaaaaacagccacccttgcgtggaaggagcaatgcatcatgattgccctgtttgttttgagtatttgtttgaatcaagaaacgatgtcactgttatgccatgtggacatacgatccataagagctgcctgaatgaaatgagagaacatttccagtatgcatgccctctctgctcaaagtcagtctgtgacatgtcaaaggtttgggagaaatttgaccttgagattgctgctacacgaatgcctgagcaatatcaaaataaaatggtttggatcctgtgcaatgactgtggtaaaacttctcacgttcagttccattttgtggctcaaaagtgtccgaactgcaaatcctacaacacacgacaaacatgaggcggagcaggtggccacgattattcattggcttcatcaaaagccttcactcgagagctctcttgatgttgtcgtgacttgtgaaggcagtgaaaatagatgtgcatccattgggtacgtggatgtgcacgtgtgggaatttggagtgcatgatgagccacattcagagggataaaataatggttcttatgttgatttggagtggggtggtttaatttgttggggctcccctagtagttggaatagtccagagtgttagagttcttgtattatatttgttttagccctatcgataagtattctagttaaattactctttaagtgaaattcattcttccaattatttttatttttctatacaactaatccagattatcacttatgacaataataatgtaactacattttcatcgtccggtagtggcaatccaagtgcatcctttattgaggaaaatgcatgtgggaattgtcattcaattgcaggcaggccgaaccccatccaaaagaaaaacggtttatcccgttgatgtggtgtcgagggtagtgtagagtcagcaattgtcgtgttggttattttgtgttgggaaaacccttttagtgttccagtgttcactcctgtaatgtttgtttgggattaatgccaactttcaaattagctgttactttatatatttgtagaatcgtaaccctgttttaaaagttgtgttaagaagtaaccttcatctcgtatgg

SEQ ID NO: 29561 - DNA, 2088 bp, Glycine max
  Clone ID: TF_GmC481_1
aaacccctcttccggtccggattcccggtcgacccacgcgtccgcgccgctttgctgggccctcgatctgctcgtcttctcagaccgccaagcacccagttcgatgggggtcactctgccagcttcaaaaccatcacaacaagaagcaatttcatccccctatacgagctaggtgagttctcagttcaacacatcgtgtgaaaaaaaaaaaaaagaaaataagaagcctattttcgtaatttgtatgtgataaagtgcccatcttgatgtatgtacttcttcacttctttgaatgagtccctagtttgagatttatctaaaacattttgaagtgattaaggtgccaacagatgtgactattattgtgttgggtgaaggaagcatggtatcaaaaacattttgaagtgattgtgatccctagatttgactatgattgtgttgggtgaaggaacatggcctcatggttgtgtggttttctttgtgatccatgagatgaaatgagatgagaagtcagaaaacatgtatcctaggttgttgttttgtgaccaaacccattttaagatggcttcttcttcttcttcttcttcttcttcttcttcgcatcaaatccagcaaactgagggttacttgagctaaggaatcatcattgccttcttctctaccaccaccaccaccatctggcactagaattagtcctgctgttctattcatcatagtggttcttgctgtcttgtttttcatctctggcctcctccacctgcttgttagatttctcataaagcacccttcttctgcatctgctcaatccaacaacagacaccaagaactttccacatctgatgctcttcaaaggcagcttcagcagctcttccacctccatgactctggcttggatcaggctttcattgatgctcttcctgttttccagtacaaggagattgtggggttgaaggagccttttgactgtgctgtttgcttgtgtgagttttctgaaaaggataagctcaggttgttgcctatgtgcagccatgcctttcacataagttgtatagacacatggcttttgtcaaactccacatgccctctttgtagaggaacacttctcactcaagggttttccgttgagaatcctatatttgacttcgatgatcttatggaggatgagatgtgtccttggaatggggagaatggattcaatacccggcagaaaacagttgtggttgaagaaagtgtggagaaagagaaaggtgttttccctgtgaggcttgggaaattcaagaagctaagtagtgtggaggggggtggggagagtgaagtgggagagacaagtagcagtaatttggatgcaagaaggtgttactcaatggggtcttaccaatatgtggttggaaattcagacctaagggtggctttgaaccatgatgaaattggtaaaggtcaagtcacaaggctcaacaaaggaatggaacttgatgatgggaaggtttcagtggaggagggggatgtggaaggaaagaagattagtagtgtcagtaaaggtgacagcttttctgtgtccaaaatctggttgtggccaaagaaggggaaattgcctacttctttggatggtcaaattggcatgccaatgccttcttttctaaacacagattttccaaggatgagggatacagaaggggcatgaaaggtatccatccacatgttttttaatttttttttttacttcttatttcacttgaattcgtttcaatccattgattaaaactggcttcccctccttacttgtcttacaattccaaaaaaaattggtgtgctaattttgacattgtgatgactgattgtgccacatactattgatgtattatgattgtactttatgaagatataagaaacactgcatctgtttttcttttatcaaaaaaaaaaaaaaaaaaaaaaaaaaaaaaaaaaaaaaaaaaaaaaaaaaaaaaaaaaaaaaaaaaaaaaaaagggcgggccgctcgcgatctaaaaccggaccgcgtggggtcgaccccgggaaattccgggaccgggtcacctgcaggcggtaccagcttttccctataggga

SEQ ID NO: 29562 - DNA, 1067 bp, Glycine max
  Clone ID: TF_GmC23999_4
acggctgcgagagactacagaagggggaaacaaacatggaaaggatatagattatagaatacagaggcaccgacgtagcgacggtcaaggtccacaatccacaatccgcaaccgaataacccactacccacagatttctctctctctctctctgttggattggatcctaatatctgtgttccactttcagaggttgctccttcattcacgcccttgctctcttcaaatctattttcttcctctgctctatctatctcttgttatttttccctctcacgccaatcaccatgccttctccttcagatcaccaccgcccccaaccaaaacctaatcccaacctcctttctctgttcctcaaaccaatcatcatgctccttctcacctccctcttcttcctcttcctcggcttcgctgccttcctcctcctcaacctcttcctcctcggcggcgccttccaccgccttcgcttccgcccctccgttaccaccgcacccacctcctccaacggcctcccccctcgcgaaatcaacaagctcccccgctttcgtgtcgccaatggatccgagacccgacccgactccaattgcgtcgtctgcctggacgcattccataacgcccaatggtgccgaaagcttgctgcttgcggccacgtgtttcaccgcacgtgtgtcgacacgtggctcctcaaggtcgccgcatgccccacgtgccgtacacccgtgcgatttaatgccggaactacggttcatgacccgcctcagcgttttgaccaatttcatacctgcggaactgactgcactgctctcaccacccttttatagcttgtaagttttagttttaagccttttttaaaccatgtaagcttttttttaatctatgtatatgaattgtagcaatactttttttttcacaaatgttttggtattttttttacttctaagaataggagaatgccttaaaatctaactctgttttttctgatcaccctcaccttcgtgccacttgcctgtggttgtttaattgcccagtgtttttgttttcaggaaagttcaccgttgttattgata

SEQ ID NO: 29563 - DNA, 1942 bp, Glycine max
  Clone ID: TF_GmC24755_1
gcacgggccacgccgttcacgtgcttagagttccctctgccgagatcgtatactggaatcactcagcagaaactcctacatggatgggccaacccttcgcttctcttcttcgcaactaggttctgaacccactcgccgaatcggcttctttcaatctcaacacgtaacaacatggccaccacaaggtcatcgtccgaggacatcgtcgattccacgccgcttctcgccaattccgccggctcctccgacgacctcacctccggccgtcgattcgcgcggcgtcagcggctccggcaggcggctcagttcctcaggcaagcgagcgggcgccggatgatgcgcgaaccgtcgatgctggtccgggaggccgcggcggagcaactggaggagcggcagagcgattgggcgtactcgaagccggtggtggttcttgacatcgtgtggaacttggcgttcgtggttgtggcggggaccgtgctggttttgagcgcgagcgaggcgcctggcatgcctctgaggttgtggattgtagggtacgctatgcaatgcgtccttcacatggttttcgtttgcgtcgaatataggaggcggaggaggcagcaacccgctgccgcctcgtcagtgcaagacagggttgggagcagcagtgggaatttgagtgtgtcttcaagagagggttctgcttctgcctctgcctctgcgcagaatgtgttgttgggccaactcgatgacgagagtactagtgttgcaaagcatttggaatcagccaatacaatgttttcatttgtttggtggattattggattctactgggtatcagctgggggtcaagcattagcccaagactctcctcagctttactggctatgtataatcttcctgggttttgatgttttctttgtcgttttctgtgttgcactggcatgtatcattggaattgctgtttgctgttgccttccctgtatcattgcacttctttatgcagttacagaccaggaaggggcatcaaaggaagacattgagcagttgtcaaaatttaaattccgaagaattgaaagcaatgagaaacttaccggtactatacaaggacctgttggaggaataatgaccgaatgccaggctgattcacctattgaacatgctcttgctgaggaggatgcggaatgttgcatctgcctttcttcttatgatgatggggttgagctaagagaacttccttgcggtcaccattttcactgtgtctgtgtggataaatggctgtatattaatgctacatgccccctctgcaagtataacatcttaaaaagtagcaacctcagtcaagaggaagtgtagaagatcgatgtcaggaaagtttttggcgcccatgttgaggaatctgcacactttcgattcacagccatgttaatatactttgatacaggcctatacagttgctcctgctgccgtttgctgttatcatgtaatgatagcttttttgattgtttgtagttattgtggcttcttactggttgtgtatatcagtgttgttcagtgcataccggctataattatctcaagaggcaatttggttgtattttttttttgggttttattgtcgtcatcattgttgttgtatatggacccataatgtcttgcttaagccactgtggaatggtttatcatgtctcggtatatgttaccaaaatatttagcccaactgcctccatgcgtttcacttggcaacttacttataccccctattgtgtttatttgagtgtaaacagaaagaaaatgaaattgagagataggagtttcctaagtgagactgcattagttatttggttctgtttttttatttattattctgatctataaaaaaaatcgagataggatgtaaatatcaaatttttactatttctgctataaatacagaaagaactcaaaggagttactctttttc

SEQ ID NO: 29564 - DNA, 1259 bp, Glycine max
  Clone ID: TF_GmC56808_1
tactcatagttttgtaggcactagagtcttaaattttccagatgagggagatgagtttgacagtgacactgacatagatccaatgcatgctggtctcagccaatggatttctactgatgaagacaatgaagaggaggaagaggaagaagaagaagaggaggaggaggaggatagggaatgggaattagctgatgtttatgaagctgaagccacatcccaccttcaaatttttttcacctctagtccaagtgagagcagggatcacattaattctactgaatctgggggaatgtttagccagataatccgggagacctggcatgcttttgaggatgttgatttacctcatggagcaaactttggggattatcttgatgctagacgttttgaagatctgcttgagcatctggctgagaatgacagctcaagacgaggagcgcctcctgctgctgtgtctttcgtgaataatctgccacgtgtagtcattggcaaggaacatgagaaccacggcgaactagtttgtgccatttgcaaggatgtcttggcaccccgcactgaagtaaatcaacttccatgctctcacctttatcacatcaattgcattttgccatggttgagtgcccgaaattcatgtcctctttgtcggtacgaacttccaactgatgataaggactatgaagagggaaagcagaacattgatagtagaaatgtgatccatgagaggcaacgaatagatgtaacagatgatagttattctgatgtttctgatggagatgaggtgaatggtagtggtcaaggtggaatacggcaaagacttctgagctcaggttccactgtggattcttctgcaacaagaagtggtagaggaagatggttttttcttgctgcagctccaattgttagtctagtgggcattgttcttgtcttgtggttgggtaacaactctcagaatgaaggaagtagacatctgggcagtcactacttatccgggcaaaaccaacacgctgttcatgcttattcctctccaaaccagagggagggtagaagcagagggtggtggtgcccattttaagtgcttcttgatttgtttatcaatatgcctcatgatggccacttgggatgaaatttttaactgactcatggcgtgccttttgtccttagctctctaattcaagaagacatgtacagattttagtttgtaatatggtatctgcttttgtttcttgtttcatttctttcctagtttgtgcttcaaggac

SEQ ID NO: 29565 - DNA, 1001 bp, Glycine max
  Clone ID: TF_GmC37201_1
tctctcttcactctccacaatcccacacccaagcccctctctccgaagttgggaacatgagttggcggtcggtgaggggaagccgtaagaggaagatggatttcgaactggacctcaaccgtgatccgccgctggttcgagaagaggaggaggaggaggaggagggggggccctcaaggcatcagcagcaccaccaccaccaacaagaacctcaaactcccattgtcgatgtcgacgccattgacgacgatgttgttgaaagctcgcctaggtctttcgctcaggctaagagcaatgctgatgagaggaggagagttcgcaggaggacgactattgttgatttggactcagaagatgggaccggaggagttcctcaaaaccaaacaatcatcaatggcgatctttatgtaaatttggccaacaacagcagttctgcgagtgaaaatgctaagaagacacctgaacctcccaaggagcctgaagctcctaaggagccgttttttaattgcccaatatgtatgtcccctttggttgaagaaatgtcaacaaggtgtggtcatattttttgcaagaattgcatcagggctgctatatctgcacaggctaaatgccctacctgtagaaaaaaggttacaaagaactcactaataagggtgtttcttcctgcaactagttaaaggatctctatccaatcattaattgaggagaatcaggatttaggaatgtgagaagaagcttcattgtactctgcagaatgctgagtggctctgttgttgcttacatgtttgttgtagcggatgcttatttattttcaaggagctgtttctcctcattaatttgtcatgtaatacatagggatgctctgttttttatttaaattgttcataaacctcagttttttttactttttatatttattggtcaaagaataatcttataaacaatttatgaatgtgtagtttttttttttttttgtcataaaaaaaaaaaaaaatatccat

SEQ ID NO: 29566 - DNA, 1933 bp, Glycine max
  Clone ID: TF_GmC1077_1
ggccagcccccctaagctcggatactgcctcggctcctggtatccgttcgcggcgtgcagtggggttgtctgtttcctgtatgcgggaccgagagggccaggaaggtggcgtattttcgctgaggtctgctcgtcggcttcctcagttcctgaggctgcggggtctgggccaagccagcttggaaactatacggaatctgatgttgatactcgtcatctttatccggatgtccattccgttgcgagttggagaggtcatgaaaggttgatctttgaccctgcaattaatagttcaatttttctagtcagagatcgcaacgtggcacttatagtagctagcgcgatctaaaagcgatgttcagagttgtgctcatcaagagatggctactgctgaagctgagatagcagacatgcgacagaaattagaagattctaaaaggcaaatgtgtgatctgtctgatgtcttgaaatctaagaataaacaaaatgagaactacatgtctgaaatagagagtattggacaggcatatgacgacatgcaaactcaaaatcaacatctgttgcagcagattactgaaagagatgattacaatattaagcttgttttggagggtgtacgggcgagacagaagcaggactcattgctcatggagaagcgggtcattgaacatgagattcagcaagcaaacatatcattgaatgtatatgatgtgaaagctacaagaattgaagaccagttgaagttttgtttggatcagcttcaaaaacttgcagaggataagcttcaaagttctgtcactttggaaaatacacaaagaaggctgtccaatgttagaagacaatctcagcaggttacggatatggtggtggaaatgcaatctaaaattggcagtaatcgagtgacgcgcatggagttacaagtagaacttgagaaagaaaggtttgccaagaaaagagtggaagagaatctggaggttgctaggagaaagtttacatgccttaaagaacagaatgagggctttttagtaactgaaaagcttcaacaggaacttgaagagtacagggaaattatcaagtgcagtatctgccaagacagggcaaaagaggtggtaattacaaaatgctaccacttgttctgctactcatgtatccagaaagttgctgggagtaggcatcgcaagtgtccacaatgtggtacaagctttggggctaacgatgttaagtctgtttatttgtaactagaaacttggttctctcccggatgtcgagaagaggctggtgttcttttgaaaaagatctggtgtatggatacctacataggaggttcaattgtatgcttagtgccaactgtcgagataaggaacattggcagcgatcaatgagttgcttgtctacatttggaccaaaaatgattattttttgctgatttatcataatgcatcttccaatgcgatttggagaggggtcatgaaggttggtctttgaccctgcaattaataattcaaattcgaaagcctgaattggccatcatggcaaattttcttggaagttgactccaaaggtggcaaccacgatgcctcacatctgtatttctgtttctcctgctgaaatgacacaagtacaaattttggtttcaggggatttgtatatatgctagagtttataaggggtcgttcaattttgtttataacagcctgtaatttgtgtaatcgtagatgatatgactagatatcattgtaattgatgttgtgaaaagttaagaaagctcaagtttatcatttttttctattttcaatgttgcctgaaaaaaaaaaaaaaaaaaaaaaaaaaaaaaaaaaaaaaaaaaaaaaaaaaaaaaaaaaaaaaaaaaaaaaaaaaaaaaaaaaaaaaaaaaaaaaaggggggggccttttaaaagaacccaattttactc

SEQ ID NO: 29567 - DNA, 694 bp, Glycine max
  Clone ID: TF_GmC99_1
tcgagcttattaagggttcaatagatatgcttccctaccagtaaaaatcagatgactctcaaaggcttggtatcacttgtcatcaatttaattggcctagctgagggaacaaggaacaatgatgccccccctttaccttgttacatgctatctagccatatacaaaataacaagcaacaatcatctgaatcagcatcagcatccaattttaatgaggatagttggtgttgtgtgtgcttgtcaaggttaaaggccaaagatgaaatccgtgtccttccttgctcgcacaaattccataagatttgtgtaaataaatggcttaagggtcgccacaagacgtgtccactttgccgtttctcaatgggagccgaggagaagtctcatcgtgccgaaatgttcactgaagagatgttaatatggttttcttctttccatgtagctggtatgtaatgatctaagtttcaccagtgaatctatttgtagttttctacaagcagagccttgctttgctttcaagttttgtttaaggcttgtgaatctgatttcgtgcaagctgaaacaaattgttatggcttatcatgcctgctatatatgaatgaaaatgtcgatgttcataaggggaaatctagatttacattccacctttcttttaccttaatggaggatcgattctcttcaatatactatgtcttat

SEQ ID NO: 29568 - DNA, 1339 bp, Glycine max
  Clone ID: TF_GmC127181_1
cagccatattattatgtgctttttgcatcttcctttccaatctccaaagcacaagagggagcaaacaggtcaactgcaacaccttgcgttgcggcaatatagatattcagttccctttcggtttgagaggatccaaccaagatcgtggctgcaggtattacccagttcaaagcttccaactttcgtgcctccacggaggaacacaaaccattctcaccctcccaggcttcggtaacttaaccgtcaaaagcatcgattacgaatcccaaagcatccgagtcaacgacccagatgggtgtctcccgaaacggttcttacaaaagtggagcctttcggtttcggattcaccttttgttttaaaccccatgatttatggaacaattccctttaacctcactttcctgcgatgcccctccaacgtgacggactcgtctcaataccccttggtgccaatttcgtgcctgagcaacaacagcaactactcggtcatagcttcgtggtcgcaacctattatgtcgtcaccctcgttgtctcaacagtgccaggtcatgtctcgggctcttgcccggctccccctgttggacatgcccatgtggcccttctggcccgatctcaacactgatcttgatttggtttggaccgaacccgattgtaggaactgtgcactcagtggccaagtttgtgggttctccaaggagaaaactaaaacccctcaagttcggtgtttcgctagggactccaccaaaggtctttcaagaagtgccaaatatgggttagcaataggagtgggaatacctggactcttgtgtctaatcgggatttcttgctgtatctgcggcaagctaacaaatcgtcgacgtagcgcggatcttccggtgacaatttccctagaacccgtccctttcgtaatgggactggacggtgccacaattgacaagtatcccaaaactcttattggggagagtgggcgcttactgaagcccaatgacaacacctgcgcaatttgcctctctgaatatcaacccaaagagaccttgaggagcattcccgaatgtaaccattattttcacgcagattgcatagatgagtggctcagattgaatgccacgtgtcccttgtgcaggaattcgcctgaggcatcttccactgcttcttttttttccttgtctcccacttcttcatcgtcctctcggtctccacagtaaataccctttttatatatatatacttgatgtagttgtagatcgagagtgctggtggtttctgtgttacacttacactgttataacctctcttcttttttctctccaaagattaataataaggatcatcttatttc

SEQ ID NO: 29569 - DNA, 1072 bp, Glycine max
  Clone ID: TF_GmC4200_1
cgacgggctcggaattcggctcgagcactgcaacaataacaatcaaagaaaagaaaccttctcagacacacaacaaaaataacatggaaatggaatcgaaagactatgccttcagcggcaagataatgctaatcgccattgtggttctcttcatcgttatcatcataatgctttgcctccacgtctacgtccggcggcgcctcgtaaacgctcgccgccggccacagctccgccgcagtaaccgcccgcagttcgtgttctacatggaccccgccgcccgcattgccctcaccaggcgggggcttcacccctccgtgatctccacgctcccgatgttcaccttctccgccacaaacaacccaacggaatgcgcggtttgtttatcagagttcgagaacggggaaacgggtcgggtattgcccaaatgcaatcacagtttccatactgagtgcatcgacatgtggtttcagtctcatgccacgtgtccgctttgcagggaacccgtagaggctatacccgagcgagaaacccgatccgaggtggctgttattgtgtgcgacaccgaaccggttcgggaagaggtgaaccggtctggaccggtgggtgcttcttcttctgctgctgctacttcgttgcatattgagaacttggggtgcgaggatgggtgtgaatcggagtcatcgtttcgttcgccggtgagtcgtatattgtcgttcaagaggattctgagtagagagaagaaaggaagcgttgtaggagtgtgcagctccatgaccgagttagacgtagaacaacgtggagagtgtgactcggtgagttgatggcagcgacaacgtgaaatcgaaattggaatgagtctgagattgaggaggaatttacgctgcggcagagtttgcagaggtgacatgacacacaacactgtcgagtgtcgacgtaatatctgatatgtaccataccttgtacagtcaaaagagaatgacaggttaaaagattcttttattttatttaattttaaagtttgtgtttttgccattttctttaaatttaatagaagaaaatgaatttttgtttt

SEQ ID NO: 29570 - DNA, 4664 bp, Glycine max
  unsure (1)..(4664): unsure at all n locations
  Clone ID: TF_GmC25542_1
aattctgccatcaataatgatgaaagttttccgaganagttggcatcctgcacaggagctttgcagacgtcagttagtcaacacatggcaaaggaagaggagcagtattcctgtgaatatgatggccgaatttctaccatggctttcaacatctatatcacctgatgaatctcaggatatgcaaaattgcttaatcaagatagtgccacaggaaaaactccttcagaaggtcgttttctcctggatggaaggaagaagaagaaagaaataacaaaaaagaaagttaaaacgcgcatggcgtcgccgttggacggaggaggagtggcggtgctcccgaattccgtcaacaaggttgactcctcctcggctctcaatggcggcttgaagtgctccaaaccggagtcgccaattttgattttcttgttctttcacaaagcgattcggaatgagcttgacgcgctgcaccgattggccgtcccattcgccaccggcaaccgctccgacattaagccgctctacggccgctacaatttcctcagctccatgtacaggcaccactgcaatgtttaaacttacgggatttttccagctcatgttagccgtcagtagaaggttgcaaagacataatcagacgtgaagagtatgcgctgcctgaatatacagccaatagggcccctatgcataacaccttcatgtaatgttgtatcaatggcaaagaagtattactacatctcaaaattttttgagagggaaatgaatgtatatgtgtggcatttatgcaagttattctgtattgggcacaatcttaagattgctttttctcaatgcgtgcagtgcatttgttgcctggggattaaatcatcatctcatatgtgcccggagaatgaattataagtgaatgagcaatataagcgaaatggcatgcttagttcagcttgttgtgtcatgaatttacctttagagatctagttatgtcaatgtaagttatagcccaacgggtagagaagcaacataggaaataatgtgaacgcagtgcctaactatacagccatttgggtctgtatgcatgtcaccttcatgtaatgggcttaaattggcaaagtattattgcaacatttgcaaattttttgatgatgaaagggatgtttatcattgcccattttgcaatatatgccgtgttggacaagggcttgggattgattatattcattgtatgaaaatgcaattgttgcctggggataaaatcagcatctcataagtgcctgtagaaaggtttagaactgaactgctcaatttgctgcgacgaaatttacacatcaagtgcaacagtgagagctttaccttgtgggcattacatgcattcatcttgctttcaggcatacacttgtagccactacacatgtccaatctgcagcaaatcactgggagatatggcggtgtactttagtatgcttgatgctttattggctgctgaggagcttcctgaagagtacagggagctatatcaggatatagatcatataatggaaaccatacagaggcatttccataatgaagaagttcaggttcttccacttgcaagaaagcactttagctttagaaggcaatgtgaacttttgtatcaaagcttatgcatgatgcctctgaaattgattgagcgtgtcctgccatggttggtaggatctttaactgaagatcaagctaagacgttacagggaaacatgcagttggtagctccagaaacagatccagctcctttcaaactcttctgtgaagggttttgcaaggctcgtaataaaggtctgtgtgtatcttcaagtgcattagattgctgtcctgttcaaagactttctgctattgaagaaaattttgttgggccatcctgtgcttttgcttttgctcatctaatacacattgctcgtgattagctaattaaggtgggaacaatagatcagtcaagcgcaacatatcggagttgcacaaaaatgaagatctacctgaaacttcagaggctgaagatattcagaaacaatgttgtagtgcacggtcttgttgtgtgccaggtttaggagtaagtagtaacaatttagggctgagttctctttctacagccaagtccttacggtccttgtctttctgctcttctgccccatctcttaattccagtcttttcatatgggaaacagagagcagctcatgcaatgttggatctacacaaagaccaattgataccatatttaaattccataaagctatacgcaaagacttggagtatctagatgttgaatctggaaagctgagtgatggtgatgagacaattcttcggcaatttaatggaagatttcgtcttttgtggggtttgtatagagctcatagtaatgctgaagatgatatagtatttccagctttagaatccaaagaggcacttcataatgtgagtcattcgtacatgctggaccataagcaggaagaacaattgtttgaagatatttcctgtgttctttcagagttttctgtccttcatgaagccttgcagatgacgcatatgtccgacaatttaagtgaaagtaattttggaacctctgatgccaatactagtgatgttatcaaaaaatataatgaacttgctactaagcttcaggggatgtgcaaatctataagagtgaccctggatcagcatctttttagagaagaatgcgaactgtggccattgtttggcagacatttcactgtggaagaacaagacaagatagtgggtcggataattggaacaacaggtgctgaagttctccaatcaatgttaccatgggtaacgtctgcacttactcaggatgaacagaacaaaatgatggatatatggaagcaggcaactaagaacactatgttcaacgaatggcttagtgaatgctggaaagagagtcgagtgtctacagcacagacagaaacgtcagctcgcagcacttctcggagaggtgctgaatatcaagaaagcttggaccacaatgatcagatgttcaagccaggttggaaagacatatttcggatgaatcagaatgaacttgagtcagagatccgcaaggtatatcgagactcaactcttgatccaaggagaaaagcatatcttgtgcagaatctactgacaagtcgatggatagctgcccagcagaaatcacctaaagctttatctgaaggatcatctaacagtgtagaaatagaaggactctcaccatcatttcaggacccagaggaacatgtatttgggtgtgagcactataagagaaattgcaagcttcgggctgcatgttgtggcaagttatttacttgcagattttgtcatgacaatgtcagtgatcactctatggatagaaaagcaacatcagaaatgatgtgtatgcgctgcctgaatatacagccaatagggcccctatgcataacaccttcatgtaatgggttttcaatggcaaagtactattgcaatatatgcaaattttttgatgatgaaaggaatgtatatcattgcccattttgcaatttatgccgtgttggacaagggcttgggattgattattttcattgcatgaagtgcaattgttgcctggggattaaatcatcatctcataagtgcctggagaaaggtttagaaatgaactgcccaatttgttgtgatgacctgttcacttcaagtgccacagtcagagctctaccttgtggccactatatgcattctgcttgcttccaggcatacacgtgtagtcactacacatgtccaatctgcagcaagtcattgggagatatggcggtttactttggtatgcttgatgccctattggctgctgaggaacttcctgaagagtacaaggaccggtgtcaggacatactctgccatgactgtgatcggaagggcacttcacgcttccactggttgtaccacaaatgtggattttgtggctcttacaatacccgggttatcaaatgtgagacgtcaaattccagctgctcttagtgtgcttcttttgtcgggaggtagacagagttggtaaatacttgtatagcaaattaagaatgcaaattttgccttgactaggaaggaacccccttatcgtttcgtcttatacttgaacagatgctccaaatcagtctaatagcaattatattaatgcaacgtatattgttgcagctccaatgcgagtcacttccaaggtctcatgagtttacttggcttctcgtatgccggagatagaagcaccaaatcaagtccatagttgtcatgtataggtaaagctttcttccaaacttgtttttgtagtggatactttacctcttcctcttttctgcttctagttttagttgaaagttcatttaagtgcgcactagcgttgctttacacagcaatcgttgggtaaagggagactatttgaactatgccagcttttgttagattctttttctttttctttttatgatgtgacgatatatactaaatgattctatggggcttacttaataaacaatagcatatcattttgatcattctcaagttcaatgtagttctaggtcattaacccatcaggttgagaaagtaaactgtgcttgtgaatccacaacaacgggaaaaaggaaacattctgaatctatgatagatggttctgataccacttgaacac

SEQ ID NO: 29571 - DNA, 1808 bp, Glycine max
  Clone ID: TF_GmC5791_1
cccacgcgtccgagtgaatgccccatctgcttagaagagttctatgtagggaatgaggtccgtggcctgccctgtgctcacaattttcatgttgaatgcattgatgagtggcttaggctcaatgtgaaatgtctttggtccctttgctcagcattcccaaaccttgatcttagtgcactgtccagtttccgttctgagcctgaacaattttctgccattgttgtgacaacagccagatatgtgagaggccaaccatctagtctaagttaccggctaagattgcagggtcttctgtgtccagtccgtgctgaaattgcaggaccagttggtgacatagataatgcgttgaaaaatgctcagaatggcgttgtatcaattgtgactcaaaatgcatcatcatctggagaccaagcctcttctgtcgaatgcatgcctgttactgtctgtcattcctctgcacaaagttaggctacattgtttctgaagtcctattatatttctaacccattcttgagaaggtgaagaatgcatatccatatctggcccttgtaaaaacgatgttttgatccacataaagaattgggtcagttccttgtcggggcagcttggagttgtaggacttggaaaatcaaagtataatttttggcttaactaacatagattagagctgcaaatgtgtagttgtctttacgtttaataataacttgtaaagagagtttgaaattccaattatatattgaattctgcttttgccttttaccttcctactcggggataaaatattttcatacttttttggaattggggtgagtagggttatacacacagcaagtgcttgtaggtattttgtaaaagtcagataaatcgatttgtgattgaatgagtaaataagataattttctccagcccagagagaagcagttgaagctttaattcaggaactcccatcgttcaggttaactgctgttcctactaattgcagtgaatgcctcatctgcttagaagaattccatgtaggaaatcaggtccgtggcctgccctgtgctcacaattttcatgttgaatgcattgatgagtggcttcggcttaatgtgaattgtcctcggtgccgttgctcagtatttcctaatcttgatctcagtgctctgtccaatatccgttctgagtctgaacagtcttctgccactgctgtgacaagcagagatatgacaggacaaacttctagtcagagttaccttctgagattacaggggcctctccacccagtttgtgttgactttgcagggccagctggtgagacagacaatgctttggaaaatgctgaaaatggtgttgtacctgttgtgactcaaaatatgtcaactagagatcaggccacttctggtgaacacatgcctgttggtctttcctcttcccaaaattagattgcttctcaactctgttatattcctaacccattcgtgagaagttgcaggttacatatcagtatccagccattgcctgaagctttatatatgatgtactttctaacatgaaaatttctggactgattcataaagaaatggatcagcttcctttttttctgagggatcttgtagaaataaagacttgaagggtgaaaatataccttttttttacttcgctaagaatattatattgaatattttttcctacccttgtttttacctggggtaagaattcctttagtttttcataaaatgaatgacacaacgtcattcgacattaaaaaccaaagtttcagtatatccaaataaaaatacacatttgtttttctctttcgttaaaaa

SEQ ID NO: 29572 - DNA, 858 bp, Glycine max
  Clone ID: TF_GmC9444_1
tgtggttttagtagtatttatcaggcaagtgggggttggtttgtgtttttttgttatatttgtatgttgttctgtgctgggtccttaatttgtggctgagaattaattattattattatcaattatgggtctctcaaatttcccaagtgcatctgaaggggtgctacctgtgcttgtgataaacacggttctctcagtggcagtgttgaagaacatgtttagatccatgctccaagtagtacttggtggcagtgctgctgctaatggttcaaacattgaacatgatgaaagttcatcatcatcatgggaaaggagggtgtcaataactcagtacaagtcattgtgccacagccacgacataggaggaacaagtatggctatggtggagtgctgcgtttgtttgtgtcgttttgaagccaatcaagaggtcagtgagttgccttgcaagcattacttccacagaggttgcttggacaaatggtttgataacaaacacaccacttgtcccttgtgccgttccatcgactagacagacatatacatacaaaggttgattaattaccgttagagatatagctagctagttaattagttgttgctatatactgttaactggttatagcgttccatatcctagacacatttccaaaggttaattagtttcaaatttacaattagagctagccagctagctatagttgtagttgttgctatatattgttaacttgttatagtgaaaagaatcaatgcctcttttcatttctttacttttagatttgtacacctccttcaacccaactcagtttctctatgttttagcttttatatatggaacataatgagagatgacattgcatt

SEQ ID NO: 29573 - DNA, 2331 bp, Glycine max
  Clone ID: TF_GmC96_3
accccaattccgaagcaaaaactaccttcacatccacaaaccacacctccgccataaataaaagtaacctccctcatggaagagctctcagcggggcctctcgtccccgccgtcgtcaaacctgaaccgtccaaaggcgcctccgccgctgcctccggcggcacgttcccggcctccacgtcggagccggacaaggacttcctctgtccgatttgcatgcagatcatcaaggacccgttcctcaccgcgtgcggccacagcttctgctacatgtgcatcatcacgcacctccgcaacaagagcgattgcccttgctgcggcgactacctcaccaacaccaacctcttccctaacttgttgctcgacaagcttattgttatacggtttctgtaccacatttgtagctactgaagaagacttctgcgcgtcaaatatcaaaaaccgcttcacctgtcgaacattttcggcaggtattgcaaaagggttctgatgtgtcaattaaggagctagacacccttttgtcacttcttgccgagaagaaaagaaaaatggaacaagaagaagctgagagaaatatgcaaatattgttagacttcttgcattgcttacgcaagcaaaaagttgatgagttgaaggaggtacaaactgatctccactttataaaagaggacataaatgctgtggagaaacatagaatggaattgtatcgtgcacgggacaggtactctgtaaaattgcagatgcttgacggttctgggggaagaaaatcatggcattcatcaatggacaagaacagcagtggcctcggctgcgagaagacgacagaagggggagggttgtcatcagggagccatactaagaaaaatgatggaaagtctcatattagctctcatgggcatggaattcagagaaggaatgtcatcactggatccgattcacaatatataaatcaatcgggtcttgctctagttagaaagaagagggtgcatacacagttcaatgatctacaagaatgttacctacaaaagcgacggcatgcagctgataggtcccatagccaacaagaaagagatataagtctcataagtcgagaaggttatactgctggtcttgaagattttcaatcagacataatttctttcacatgcaacagccgattgagagatattgtcggaacttagacatggggatatatttcatttagcaaaaataatttcaagcatagtgtacttccgcgatgatgatttgtttgcttctgcttgagtttcgcggcgaatcaaagttgttcattattctgcttttatgattgaacctagagaggctcattattctgatttggagaagtctacacattcaaaacgtagttgcttttgtaggaataaatttggaaagaatcaaatagcttgtaattgttatgatcgatttgtatctgattaggatgtaatcattcagaaaagtttaatagattataaagagcattaaaagggtgtatggattttagtcagttcatgaacggatccctctatgcttgtaactggtcgtattgacagtaacgtcaaaatatgtttcactaatcaggaagctagtgttctaaatatagacatgaaagcaaacatatgttgtgtcaaatataatcctggatctggcaattatattgcagttgggtcagcagaccatcatatccattattatgatttgagaaatattagccgtccagtccatgttttcagtgggcacaggaaggctgtttcatacgtgaaatttctgtctaatgatgaacttgcttctgcatcaacagatagtacactgcgattatgggatgtgaaggaaaacttaccagttcgtactttcaaaggccatgcaaatgagaaaaactttgttggtcttacagtaagcagtgaatatattgcgtgtggcagtgaaacaaatgaagtctttgtttaccacaaggaaatctcgagacctttgacttcgcacagatttgggtcccctgatatggatgacgctgaagatgaggctggatcatatttcatcagcgctgtttgctggaagagtgatcgccccactattctaacagcaaatagtcaaggcaccatcaaagtgctggtgcttgcagcttgaacacgagaaaaaaaatgaaatagaatgtggaattggtattatcttttcccatatgctatgattgattgtatcatttattaaattgtacatagtattcgagtgtatatggcaggcgttagggatcttaatgaaatattagtcgagtgcttaaacctttatcaataaaccaattaagggactcaacttcaatttttgtcaattgaggacctc

SEQ ID NO: 29574 - DNA, 556 bp, Glycine max
  unsure (1)..(556): unsure at all n locations
  Clone ID: TF_15200544
gacacttccaatttcaaaagaaaaccaaggttgggaccagtgagtgaaaattaggtcagaaccagattatggaaattgtgatttccttgatcatactctttgtggggatagcaattttggtggtcatccatgtctgcgtcgtggggagggccttcagagggaacaacaacgaagaagaagaagaaggtactcatcgcagcatcaatgccatgaagagaatgtttggcggcgacagcgttggtgacctgaaaaaccttccttgctttccttatgaagagccaaaagagagtactaanagggtgttgtggcctagtggattgtgctgtttgcttggagaatttcaaggttggtgatgtgtgcagattattgcccaattgcagccacagcttccatgtgcagtgtatagactcatggatactgcagacacccgtttgtcccatttgtagaacatgggttcattcaccagttgtgagggaacaaagtgttgtttctgaaagtttagaaattgtaacggaatagaacacatacatgtgtatgattagttgaatttcagcac

SEQ ID NO: 29575 - DNA, 1022 bp, Glycine max
  Clone ID: TF_GmC7141_1
ttttacggctgcgagaagacaacagaagggggttaagaacagaacgaagccacgcatgataataacaatacccttcttcgtttcttccctctccactcggcactcacaattctcaacccaaccaccccctattaaccctcaccgcaatctctgattcgatcttcttcaatttcggggtttcccatataccacaaggcataggcctgtgtgaatttgcgatatgctgggtaattgtcgccaagacccaatctcttgggtactcctttaccaacccccaccgccgcattaattgtttttctattggaatcggacaaaggttccactgcgactgaaactttcaaaggccaaaaaatgctcgattcggtccttctggcgcttttcttgccgtgccttggcatgagcggggtttttatcgtctacatgtgccttctttggtacgccaccacccggcaccaccagcaaccccccatcgacgggcaaccggtgaagcccgtcgctgataagggtctatccgctttggagttggagaagcttccaaaaatcaccggcaaagaactcgtcttgggcaccgaatgcgccgtctgcctcgacgagatcgagagcgagcaaccggctagagtggtccccggttgcaaccatggatttcatgtccaatgcgctgacacctggctctctaagcaccctatttgccccgtttgtaggaccaagctggacccgcaaatcttcacttcccaaagcccctgctgaacaatgaagcattcattattcaaggaatgaataagggaagccaaattttcaattagtaatttcataattatctttattgttttctttgtcagttctttatagtttcttgaacttccgttactaattattattattattattatgtgtcgtgtagtggttcagtggttgtggtgtgttatggcctggatgaatttagcagtagtacccgaaaattcagaagccatgtttaatttatgtgtttattgtttaaattttaaaataagggggttggaggg

SEQ ID NO: 29576 - DNA, 1233 bp, Glycine max
  Clone ID: TF_GmC23646_1
cacagatctccccccgattgaaaagaaaagaacttcgatcatatattcctcaggtcactcctacctatgactatatatgacatataatggaccatgcatctctgaggaaagaattgagctgggaatcaagcagcaaaaacggtccccaattcggatatattaacaaccaccaccctccaaaacaaaatttcaccctttcgttttccttatcccatacccctcaaaagaaaaagctggcgattctccaattctcctcttgtttcgtgtcctttactactccgaatcctcacaacactctctgtagtacacactactaacccaaaagtcactcacctctagaaaacctcaaatctcaaaacccatcaagattttagcacaaagactcaaacttttcacaaaattaaagagacccagttgatttttttctctttagactgaagtattttgaagcatcgaacatgctacaacggcggcttctggagacggagctgagcatgccaccgtcgtacggcggcagcggcggaaacaacacgcgcgacacgttcatcagcgacgcgaacttcgacacaaacatggtgatcattctggcggcgctgctgtgcgctttgatatgcgcgctgggcctgaactccatcgcgcggtgcgcgctgaggtgcgggcggcgcttcggcgacgagacggcggagcaggcggctgcaaggctggcggggaccgggctgaagcgccgcgagctcagccgcatcccggtggcggtgtacggcgccgccggaggcgaaaacactattccggcgacggagtgccccatatgcctcggcgagttcgagaaaggggacaaggttcgaatgttgcctaaatgcaaccacggtttccacgtgaggtgcattgacacgtggctcttgtcgcattcctcgtgccccaattgccgccactcgctcctagagaaaacctccgccgcgccggaaagtgggtcggggcggcggagcgaggtggttgttgtggtggagcaggcgagttgaatggcattaacagtgaaaggtggaaagaaggacaagttttggtgaatggaggttgagaaatttaatgttagtagttagagtagttattagttggttattaataaattccaagtgaccatccataattccatatacacgtttattttttaaaattaaaatatatgtttgtgtttgttacagtttgtatataagttggatattggatattatgatgctt

SEQ ID NO: 29577 - DNA, 1445 bp, Glycine max
  Clone ID: TF_GmC502_1
cttaaattagttttttttgattactgtacgctaggtactctgtccctttaatctctctctctctctcatgtttcattctttctcttctcttgtcgagttctcattgccctcttctgttcaataataataacttaataaaagaaaaaaacagtaattgaaaattgaatcgggaagaatcatcatcatcgtcgtcacgcttcccaatcaaacccaccacccatctgaatcaatccagggatccccttcttctgggtgggatagcttgattctgatgcaaggacaaaggaggactattggatcatttccagcaattgtaagtatgatgcaagggcccagttctagtggcactgatatgagtcatcagtcttccttgaatcatgtgcaaaatgcagtagatttccggttgtcagattacaggggatcttctggtgagactgcatgtttacgtggcactggtcataatgttcagagcttcaatggctggagtactggtgaatctagttctagactgaatctgatcaaccaagtcaatgatgaaggtctaaaatcagaacatgggctgtcttcttcgtataatgctgctactgaggatggtctcaggtctgaggaaagacaattcgaaccaaataatgtaatttttcctgttagttcaaatactaatctacatggcaatcaatctagagtccacccttcctttttgcaagcttacagttctactcgtattgaaatgcatgacaggcacagagaaatgcgccttgatgtcgacaacatgtcttatgaggagttgttggcattggaggagcgtataggagacgtgagcactggattgagtgaggacatcattattaagttgatgaaacaacgaatttacgtgtctgtcatgacagactcttctattgatttggaaccttgctgtatctgtcaggatgaatttgctgatggagagaatgttggatcactggattgtgggcatgagttccatagtggctgcatcaagcagtggctaatgcagaagaacctctgccctatttgcaaaacaaccgccttagctacttgatagggagaacctctatcctcttaagctggttctacctatagcttcttttattttttaaactttatgaacttctttgaactggacctctcatttgtcatgattggggacgataacatgtcccctaaaaagaagtaaacaaaaaacattggtgggtgaactataactattgtagagtttcatttatacagttgtaatggatgattacatgtggtttagataagctataagcacttggatattattaaatttcattataaatctaaggttggtggctgatgagacttgagaggattatatagattgcatgaggaatgctgctggattgtgggaagggcaaaacttgtatgccaacattactagtggaatagatagagaaaaaaaagggggg

SEQ ID NO: 29578 - DNA, 1629 bp, Glycine max
  Clone ID: TF_GmC1189_1
gcacgtctaggcgccaagacccgctcgcgtcaagacccagaacttgttattgccaattctttgtttgttgataactccaaatctccttctgacaaccatatgggtcttgcgcctactccgtgccgtttgcgttcttcttcgttcgtgagactcgttgagcggattatccagcttggtaccctcgccctttctgcggtcatcgcgaacagcttctccgcgatcttgaccttctgcttcgctctagttggcactgtgttggcggctttgactgcagcttcgataggacaacaattcgggtcgaggcgagagagagagagaaagggtcgctttaaggcacagaagctttaaatgcgagttggttgattgtagcttcctttcaatcttctcctaatgcttatggactaagcatttgcccaagagcgcgttttttattctcaatatccttcttcttgttattattattattgttattgttctttgttgttaacatatattaataactctttcttaaacccaaatcttgtgacatcacaaaccgtaccctttttgtttatttcctttgtgggttttcaattcgtgcaaatttctgcgacacccagatggattttgcgctgaatccgtgtcctttgcgatcttctacgttcgtgaatttcgtcgagagggttaaacagcttggtaccctcgccgtttctgcagtcattgggaacatcttctccgcgatcttgaccttctgcttcgcattagttggcactttgttgggggctttgactggagctttgataggacaagaaactgagagtggcttcattcgaggggctgctgttggtgccatatcaggagctgttttctccattgaagtgtttgaatcctctcttgttctctggcaatctgatgaatctgggattggctgtgtcttatacttgattgatgttattgccagcttactgagtgggagacttgtgcgtgagaggattggtccggccatgtttagtgctgttcaaagtcagatgggtgctgttgaaaccagctttgatgaggttcaaaacatctttgacaccggtggttccaaaggtttgtctggagatttggttgacaaaatccccaaaatcaaaattacaactgataacaatgttgatgcatctggtgatagagtttcttgttcagtttgcctgcaggactttatgcttggagagacagtaagaagcttgcctcattgccatcacatgtttcacctaccttgcatagataagtggctcttcagacatggttcttgcccattatgcagaagggatctgtaattttgtatatgctagtacagaccgctaaaaatgtcccttttttttttgtttttgtttataagcttatttaattctaggacttacatctagtgggagccattgcagtttgagtggtaatcattgtactaaattagtgtaaagaaaattttgggataaaccagtttccacttgttgtatatggatgagagtgattgacccattttctagcccgtctccactctttttctgctctttttttttttttttttgaataaagaacaagagacggtgatataactagtgttttgattcttgccaaaaaaagggcggccaaaagaatagtaagctcgtc

SEQ ID NO: 29579 - DNA, 840 bp, Glycine max
  Clone ID: TF_GmC723_3
accacgcgtccgcttttctttattttattctcttctgttctccgctacctatggcgaatttcacctcttcctcctcctcctcttgttctcccttacctctatctctaactatgtcacacatttcacctccgtcatcttctgcggctttcgacgacagttccgaggacgcctgcagcatatgtctagagccattcagcacccatgaccctgccaccattaccagttgcaaacatgaatatcatctgcactgtattcttgaatggttgcagagaagcaaagaatgcccaatatgttggcagttacttatcttgaaagaccctgccagccaagagcttctaaatgcagtggaagctgaaaaacgcttaagttcaagaactgtatattcacatgcattcactgattctcgtagtccccttcatcggcttaacaatgaccaagatgattctgattttgatgaacaacttacgcagcacctagtttctgctgcaagtagagctcgttatatctgcagaggggaaaggcagagatcccctggagcaggtccttcagaggttcttgtttttaactcttctatgcatgcgtcagggatgcaatcaacacttacaacttcaccatcttctggtgtgccttcaacatctgctttttcctctgttggcatggttacaacaaatacttcttctgagagtgacatgccttgcaaacccagagttatttatagccagccatcaccggagaaatgcaggagactaaacacttctgagatattctccttccctgagtccttcaaatccaaactttctgctgcttcagccagatgtaaggaatcaatttcaaaaatac

SEQ ID NO: 29580 - DNA, 1576 bp, Glycine max
  Clone ID: TF_GmC147_1
tacgccgcgacgtcacgacgggtgggctggggggggtagtacgtccgggactgtagaggaaatgaagcatgcggtgccagctaagctgtatgtcggttcctcgtcaataatcgtctttccctgcctcatgccatcatccagtggttagggttggagaacttgccctcacttttttcttccttcttcactcttagtctcactcactcaccattcaccattgtcctttgcatcgctctaagcaacacgtccttttcttcacatattccagtgtgctgttctgagattcggagagatgggtttggaagaagcttccagaaactgtatataagtcatcatgctgttgtgacagttaaaggtagtgtggtgtggggaaggagcctagtgattagttgtttgagaccactaaggaagtgaacaagaggatgtcaaacagtaggaacactcattggtgttatagttgcaggaggccagtttggctgggacggcgagatgcggtttgtcctagctgtaacgagggatttgttcatgaacttaatgatatggtgcatgttaatccttttgacttatttgaaatggacaacaatgaagaacgagatcaaaggcttggactcatggaaacattctctgcctttatgaggcatcaaatggcagatagggggcgaagccatgacatcagggcgcgaacagattcaaatcctgaacacagtgcaagttttgctcctctgttgatctttggtggccacataccttttagattgtccagacatggtggctttgaagctctatttaatggggctccaggaatcggtctgacacagggtaacacaggcgattattttatcggtcctggactagaagaactgtttgaacagctttcagctaacaacaggcaaggtcccctgccggcatcaaggtcctcgatcgatgcaatgcctaccatcaagatcgtgcagaggcatcttcgatcagattcgcattgtccggtgtgcaaagataaatttgaactgggatccaaagcaagacaaatgccatgcaaccatttatatcactcagattgtattgttccatggttggtgcagcataactcctgccccgtttgccgccaagaactgccgccacaaggattgagtagtagtaacggtggcgccaatggtagaagtagaagtgcaagggtaagtagtagtggtagggagagccatggaaggagaaatccattttcctttttgtggccttttcgttcttctcattctagcagtaatgatgaagcaacaggaagcagcacaccaacaccaactatccctgagaatagccatcatcatcatgctgggtattctgggtggccatttgaatgacttggtgtgagtataacattttcttttgtttattaatatgctcatgttgatttaaaaatcttatgtactgatgctgcttgcttggggtgaaaacggtttgagatctgagcctaccagtctggatttgctttctaaagttgtgaactattttgtataaatggttatttatgcataattgtttgaatctaatattcaatataacaagttttctttgtttaatagat

SEQ ID NO: 29581 - DNA, 1381 bp, Glycine max
  Clone ID: TF_GmC761_1
tacggagaagacgacagaaggcgctcttcaattgattcgatgctctaatctatctcttattcttcttctttaaaatttcatcttcaattcaattctctctctgtcaccgttcctcattcgcatggagaacgacaccgccgccgccgttaacaataacaccaccgccaccgccaccgctaaagcaggttctggaggagtgaaatcgaacaaccataacctagaagaggagcattccaatttgaatggcgaggagcagatggcagaacaagtggaggcagaagaagaggaagatcgagaagccgatgatggtgaaggagaagaaactggatctcgtcaaccttccagaacccctttcactaatctcagccaggtcgatgctgacctcgctctcgctcgaacccttcaggaacaggaaagggcatatatgatgctgagaatgaataatgatggaagtgattatggaagttgggaaggcggaagctatttgcatgatgaaggagatgattttgatgatctacatgatggcactgatgtggatgaggatgaagatgatgatgatgatgaagatgatgatgatgaggaggatgaggatgaagatgcatttgatgtccatgctcatgctagtgctggagaacatgataatcccactattgaatttgacccagatgtattttcaagtgatgaagcatatgcaagagcattacaagaagctgaagagagggaaatggcagctagactattggcttttgctgggataaatgatcgggaagaagaggacatagaggagcatggtgctaattctcaggatgcttgggaggatgttgatccagatgaactttcatacgaggaattactggcattgagtgaagtagttggaactgagagcagaggtctttcaactgatactattgcctgtttaccttcagtcaactacaagactgggagtgatcaacatggaagccatgattcgtgtgtcatttgccgggtggactatgaggatggtgagtccttgacagttctttcctgcaaacatctgtaccatcctgagtgcattaacaattggttgaaaataaacaaggtttgcccagtttgtagtactgaggtatctgcttctgggagcaacttgtaggaggatttaatagatgttcttcacttcaaattgaagaaaatttgtgccaagttgggggctaatatcccttgttttaatagcatttccatattagggagatagtctgtgctattgtttccagctccttcattttaaatgtaacatgtaacttttggaacctgctctctagattgtctttattttaatggaaaatgaatggcatttaagtggccagttcttttaacagggtccgaggggataactgttgtgatg

SEQ ID NO: 29582 - DNA, 1205 bp, Glycine max
  unsure (1)..(1205): unsure at all n locations
  Clone ID: TF_GmC133_2
cgacgatgggtcgggtacagcggctccggtggcttccctttaaagacggcttcatgagtgaagcataacccacgcgtccgtacggctgcgagaagacgacagaaggggaatgcaaacaaccaaacacaaaccattccccacactctcccctcttctttttcattgtcattcttcaccattattctgcaatatgttgctactcatcactcactctcatcaccaacattttttaacagtcatttggaattatatcaccttacctctgatgttttaaaaatcttcatcatttgctccctctccacccttaaactggacatgctcgattctgtgcttctggcgcttttcttgccgtgcctcggcatgagcgccgttttcatcgtctacatgtgccttctctggtacgccaccaaccaccactccgaccccgcgctaccggccaagcctgtctccgacaccggaatctccccttcccagctcgacaagctccccagaatcaccggaaaggaccttctcatgggaaacgaatgcgccgtctgcctggacgagatcggaacagagcaaccggttcgggtggttcccggttgcaaccacgccttccatttggaatgcgccgacacctggctctccaagcaccctctctgccctctctgcagagccaaactcgacccttcgcttttctcttcttcccaaaatccatgctgaccaacaagctctagcgcaaagttggtagatgcatgacccagtttcttaaatatttcttgactgtatatatgaaaaaaaaaaaaaaaactttgttggatgagacaaaattttcttcgatgatttcaactcgtcaaggttagtctcatgtctttaaaaaaaaatccatccggaaggtgaaggtgtgtttttgtttcttaacgtactctctttggcactgtacagtttcttttatatctcctgtgccgccgcacaatatatattctcacattgtttttttcaaaaaaaaaaatgcaactaagaaatatttgaagagtggccatcgacgctatgtttttttttgcttttcccgagtttactagttaattagtggtcatggttgattgggaaatgagtgaccaacgtgtgtttgttctcttctcttctcggaagtgttctagaatttttattttctgaaaaaaaatgattttttttttttttaaannnnannannnnnnnnnnaaaaa

SEQ ID NO: 29583 - DNA, 442 bp, Glycine max
  Clone ID: TF_6227772
ttttttttttttatccatacatatataattctttatattaatatttaagatgatattctacatataaagtttgcatcgtaatgttagagaatacaagacattattgcgtgccgcggtgccgggtttgagacaagacagccaccatttcctaacaacatcagaatcaaatacttcacatagccatatatatagaattctagttgttttctaaactgaatcttttgatggaacaagaatctaatagcagaatttcagctctaaataactttccagattccctttttcccgatgaatctctgcaaagagggcaagtagtggcattgttgaaaccaacccaagtattcaagcaatctctgtggaagacatgtccacaccgcagcgttatgatcctttcttctgtttctcccattatgcagagacacacggcgcaatcttcatcttc

SEQ ID NO: 29584 - DNA, 1768 bp, Glycine max
  Clone ID: TF_GmC725_1
gcggaattccttgtaattcggctccagcctgactctcctctgtggcaccaccgctctctctgcgttgttggagaacaatcagaggaaaaagattggagggtgaaccgaaaaaaacaattcagaaaatggagaacaacgcattcagagatcaaatcatggaggacaatgaacatgaagaaatgcctgattcctttgtttgctgcgtttgtctggatctattatacaagcccattgtgctatcttgtggtcacatgtgctgtttctggtgtgtctataattcaatgagttgtctgcgggagtctcaatgtccagtatgtaggaatcaatactatcacttcccaacagtttgccaattgcttcactttttgcttctcaagatctataccgctgcttacaagagaagggaaagccaaactcttgaggaagaaaagaaatcaggattctactcccctcaatttgatcctgatacatgtgaatcacaagctaagtttggtcattctggtatccctagttcatcctctattttgaatttgacgtccaactcatgcaatgtgggaacttctgaatgtctggagcaatcagggtcaactgccaatgaaggagatgaaggcaccatcttttcgaaccgagagcctgatattattggaactcctgctaaaggaaaaaaattgcctcaggaagagctttctctacaacagaaattatcagttgcagatgtgacatgtacaatgtgcaagcaactgctctttcatcctgtagttcttaattgtggtcatgtgtactgtcaaatttgtgtcatcaacatagatgacgagatgctcagatgtaaagtttgtcaaagtccacatcctagaggattaccaaaagtgtgtttggagttggatcactttttggaggaacaatttcctgaagaatatggacagcggagagatgccattgaactacagcaaatcaaagtcaaacctgacaccccttcttcttgttcattggatggtggtaagaaaccagaaaatacagattggtggtctgatcctgactcaaaagttcacattggagttggttgcgatttttgcgggatgtttccaataattggagatagatatagatgcattgactgtaaggagaagatgggctttgatctttgtggtgattgctacgcaagccgctccaagcttcctggtcgatttaatcaacaacacacctcagagcacaagttcaagcttgtacaacccaacattattcataacataatgttgaggctggccacagcacagttaggggaaggttcgattgacctggagtctataggaaacatagaagttacttcagacggcgctgcattgtttggtgatggagaagataaccacaatgattctgaagccgccaattgaaaaattgagctcaacaaaagtccattgtctaaaaattggtgttttggtggggggtttaagtggataactcctaatagtaagaggagcaaataatgcaatgcttcaaggaagtttgctagtcaattggttgaggaattctcaattctacatggtctctgtgattttctaatgcatgccaacttgatagtgtttttatgtctcaactgaatttgtctccagcttgtggctattttatgttattgcattcgggaatgtatatattctaggagtttgtctgagatctatgatgatgtgtttgttacaataatattaataataattggtacatcattgtgaataatataaaaaaaaaaaaaaaactcgagactagttctctc

SEQ ID NO: 29585 - DNA, 2584 bp, Glycine max
  Clone ID: TF_GmC502_2
ccacgcgtccgaaccaccacccatttgaataatccaggatccccttctggtctcatatctttaatctgttttgggggtggaggatcgcgtcaatccattaggtgggatagcttgattctgatgcaaggacaaaggaggactgttgggtcgttcccagcaattgttagtatgatgcaagggcccagttctagtggcactgatatgaaccaccagtcttccttgaatcatgtgcaaaatgcagtagatttctgtttgtcagattataggggatcttctggtgagactgcatgtttacgtggtactggtcataatgttcagagcttcagtggctggaatactggtgaatctagttcaagactcaatctgatcaaccaagtcaatgatgaaggtctaaaatcagaacatgggctgtcttcttcgtataatgctgctaccgagaatgatccgctcaggtctgaggaaagacaattcgaaccaaataatgtaatttttcctgttagttcaaatactaatctacatggcaatcaatctagagtccacccttcctttttgcaagcttccagttctactcgtattagccagaatattagtctagatatggggcatgttactaatgctgctgatcgtgggaagggcaaagaagctggtagtagtgttaatgccaacaatactagtggaatagatagagaaaagacattgtttggcagtgcttcttgtaatcacacaggagcttcatctgaaagctctggatacatggcttggggtgatagtgctaattcaagttcttctttagttaattggggtccttcctgcaagagaaaggctcttgaaggtagttctaggcaactgtgttctggaggaagctcaagcactcttgtacaatccggaaatggttgctggcctactgatcctgttgatcttaatgcttccagcgacttaactgattctacacctatagaagatattcctgttactagtcctccattatttcagaatgcaacaaatgaagagcgacaagaagctcccaatggatttcctttgataagtattgcagaaaatgtggaaaggcctctaagaaacttcgatagaagaatgagccatctacagcatcaggaatctgtacctctcaatttaccatcaacagggagtgctaggcatcataatcattcttctctgcatcaagcacctggctctcactcaatcaatgattcgttggagttgaggttaacagctggagggacatcttctgctaattctggcgcttctctgaaccagtcacctgccttgcgcatccattcttttccttggaacagaactgccaatcctagaggggccagatcttcaacttcttataactctggagaaagagccgtgcgcgaagattttaatttgagaatgtttccaagagatagtacggaacaccccatgaatgtgcctgcatcttcaggacacgaacctattggttggcatacaccatctggtaatgtgaacaattctggaggtgcacctcctccatcctggattggatctagttcaaatgttcactctcccgctaaccgtagctggatttttaatcatgaagtcccagcagaaaatatgcagagtgtgtcagagttcagtccttggtccctttttccatcaattagctctgcatctggtgttcataatgcccattctgccccatcttcttctggtcctccttcatttacccagggttctagcagcaaccaatcatacgcaagaacagcattggtgatggaaagaaggggtggtgatgttctctctggtggtccccattcactgcgagcattaacctttgacaatgaggggagacgtcgactaatatctgagattcgccaagtcttgatggcaatgcggaggggtgagaacttacgagctgaggattatatggtctttgaccaccctttcttatatcatggcatggctgaaatgcacgacaggcacagagaaatgcgccttgatgtcgacaacatgtcttatgaggaattgttggcattggaggagcatataggagacgtgagcactggattgaatgaggatgtcatcattaagttgatgaaacagagaatttacgtgcgtgccattatcatgacagactcttatacagatctggaaccttgttgtatctgtcaggaggaattttctgatggggagaatgttggatcactggattgtgggcatgagtttcacagtggttgcattaagcagtggctaatgcagaagaacctgtgtcccatttgcaaaacaacagccttagctacatgatagggagaacctctatcttcttaagctggctctatctaaagctttttttactttataaacttttttcttaagaacaggacctctcatttgttgtgattggggacgacaatatgctccctaaaaagaagtaaacaaaaaacattggtgggtgatctatgaactattgtagagttttatttatacttttgtaatggattattacatgtggtttagataagctataagcactttgatattattaaatttcattataaaaaaaaaaaaaaaaaaaaaaaaaaaaaaaaaaaaaaaaaaagag

SEQ ID NO: 29586 - DNA, 1395 bp, Glycine max
  Clone ID: TF_GmC119902_1
gggcctgctgcgctgtgaggttattgacgtgggagatgggaacctcctctccgttaatgactcctttctcatgctcatggggcagcctgccccactgttcaccagatatccgctgaccagcagcgtgaggggtcactcctccgttggagttctcatagctcatcccggacctctcccttggagcatgaagcggctgatttgcagtccaccccaaggtttccacaaagctcttctggagagtgagctgtggatcacgatacttcctcggaagctctggcacggcaagtggaagcagttgagagattggcacgtgaactccaagaacaactgtatcacgatgatccttttgaaggcagagggattgatgaagatttagcatgggacctgcagcgtgcagaggctcttatgcgtgcaactattgatagccacagcataagtcaaccgagacatcttccaagggcaatcagacagcctcgtacacggtttccagaaaatccttctagaaggagagctatggctcaagcttctttctctgctaaaatttcacaaagattgtatcgatccttggctccagaggaaaacatcatgcccggtgtgcaagtcatctatcacctaattcattttggaattttagtggttaatggtgctgtagtttgttatctcagccacctcattttgtctttcaaagtaaaaagcaaaaaagttgaaattgtaataggcatgctactctgttctgttcaatcctttgatacattagatatttgaaagtgaatataaaggtatagaaaaatctgcaacttgttaactttcaatgtgctgatatgctgttactgttgtcttttgaattatgattagttctgcgacatgaatgatgcacgttgagaaaactgctctgaatcacggtgtcgtaattgaacttctactgttggtgctaatgaagagtctgcaaagcagagacaactctgaaggccgtattatttcttaagatagagatatgaccatttaggaatcctaatgttgaaatgtaaccaataacattgtaattttattttaattgttatttattttaaaactaccaatttttggaggagtcgtgctacaagtcggactcgagcacctagcacatcatctagaggaagaggcccccggtttcctctggatatggacttagatatgagacttgatatattggaagctttagaggattcagtaggggatttcagtgatatgggaattactgatggcatctttaatgcacgtcgtgatttcactgacgctgattatgaaatgctattggcccttgatgagggaaatcaccaacatactggtgcatcttccaatctgatcaatagcttgccgagtccaccatccagactgacaacttcacagatgcat

SEQ ID NO: 29587 - DNA, 765 bp, Glycine max
  Clone ID: TF_LIB4203-002-R1-K1-G10
ctggccatcaccgcccccgccctgccgtgggcagtggcccgagggcgggctgcgagccgcgcaatgtcgcagactgcggctccgggggtgggggcttcacggtgctgcacgagcctcactcgggcctagtcccatgaggcctgcgcaccccggcactgaaaccacgagacggcgcaggaccaccgctcttccggcccgtgacggagaccgagcgtgaggcgcgccggggctcagggcatctgagggccctctccgggcgtcgggctcagggccgccaccaccaccactactaccaccaccacctcggctcctgccggcgccgtcgcctctcccgcccacccctcgccatgtccgaggaactttcggcggccacgtcctacacggaagatgatttctactgccctgtctgtcaggaggtgctcaagacgccggtgcggaccgcggcctgtcagcacgttttctgtagaaaatgtttcctgactgcaatgagagaaagtggaatacattgtcccctatgtcgtggaagtgtgactagaagagaaagagcatgtccggaacgggccttagatcttgaaaatatcatgaggaggttttctggtagctgcagatgctgttcaaaaaagattaaattctatcgcatgagacatcattacaaatcttgtaagaagtatcaggatgaatatgggtgttttcttctgtcattccaaactttaagatttctcaagattcagtaaggagcagtaataggagtgaaacatctgcatc

SEQ ID NO: 29588 - DNA, 993 bp, Glycine max
  Clone ID: TF_GmC1667_1
cccacgcgtccgcccacgcgtccgtacggctgcgagaagacgacagaagggggcgtagaagagagtgaaagtaaaaggaaagctaaaaagagcagagtagcctccactgcaccaccatcatattttggctttataaaaaagccatagaactcattagaacttccccctttcccctttcttcttcttcttcttctctctaatttcatttccttgattatagctttcaattaatgggcttctacgctgaagatcctctctcaggcttgacaataggccaggccatatatgaggtagctctcatgattgcagttctgagatgggtcttgtgcttgatcttcagagtgatcaacgacagaagaacaacacaatccgacgagaccccaacaccagaaccatgttctcagatgacaagggacaacgacagcattcttttgctgacgactttcggagagattaaggagaggcttccagagacagaggagacgtgtgcggtgtgcctgagccagctgagcgtggaggacgaggttagggagctcatgaactgctaccacgtgttccacagagagtgcatagacagatggttggaacacgaacacgagaatcacagcgccacgtgtcctatctgcagggctcctttgctcagttcttcttgccaccacagctctgccacgtgtctgcctcctcctcagcctagttgggctgtggagagactcctctatctctttggagatgatctgcttccttgttagttacttgttttctttgtagattgtgcagaaaaaaaatagtttaggggattcattatttgttatgtttatcatctgagccttgtaattgttgcttgctgccacaaaataactaaactaagacacaaactagcttcctgtttgtgtgtgtgtatatacatatatttttcacatttgactaatattaatgttgcctcccaaaaggaacaagggcctttttttcaatcaatgtatggttggatgaatt

SEQ ID NO: 29589 - DNA, 1927 bp, Glycine max
  Clone ID: TF_GmC251_1
ggctcgagcaaaaaaagattatgaaattttctctccaatgaaagtcacgatcctctcgtccatattcattctctatctctctcttcacctcctgtgtttttttctctctccttccttctcccttttttcaatctttcaatcaccaattctaatcactcgtagatcctctctgtttctcattctggattaatttgcattggcaaatctctacattatggatgaaatggtggattcagaaatggatcaacagatagaagattatcaacattctgaacccgatatcctttcgagaggaaccactagcatctcgcagcctaataataaccatgcaatggtgggagaatctgagaacacaactaatgctgattctcactttctgccagatgcttatgacaatgctagggtgtatggggttccacaatataatggtattcagcctccacataatcttgatacgggtgtaccagttgcaactaacttatattattctagcattaatcctccttccagtactggtgtttttcatccgccttaaagtcatagagccattgaacaattgccgggttcaaacacatttgaagttgctggaggttcttcaaataattttggaagaagttctagtttcatgaatgatgctagaggtccacacaaaaggaaaattcctaaaggaataagaggaaattcacaagattttaatgcttcgtcgtctagctcttcaactgctccccctaatgcaagacatgccaatgatgttgctataatggataatacacaatttcatatccgttcacttgtggaggtaggaccacacggtagtgaatggagccggccaaatgagtctattatggtgcatgatcataatcatttgatccatggaaattatttagggcaacactttccgccaatagctcctccatggttgttccaacagttgaatagtaacaataatgatggccatgctacaccctggaatcaatctcttccaatgccttgtgtgcaagcacccgctataaacggaagttcattagagagtgtaagtatgggattgcagagatatcatgatccagttggaaatcgaaatggccttaggtttccttatcatgttcctgtcaaccaacaacaccatagttatcatcactcaacactgcccatgcaaggagtaagagatcatagtctcaacttcttccctacagtaactacaaattcatttagggttccaacaaatcctttgcgtaatgttgcaatcccaacacaagctagttttgagatgggtcctagacatgttggccctgcaccatcatctagcctccgaatttaccgacctcatagaggggttgtgcctgagacaactctcagacatcgaagtcttcctcccatgggcttccttcgagttaatgatgttgctttaattgatgaagtgggaaatttggttgacaatcacagagatatgcgcttggacatagaggatatgtcttatgaggatctcattgctttgggtgagagaattggcaatgtaaacactggtttatcggaggaaacaattacaactcaattgaagacaaaaacttatttaacgggtgctactagtattaatatggaggaggaagtttgtgatgatcagggaacattttcttgtataatatgtcaggatgaattcaagaaccaagagaagattggagttcttcaatgtgagcatgaatatcatgcagattgcttaagaacatggttggtggtaaaaaatgtttgccccatatgcaaatctgaagctttgaaatcaacttctgtgtctcctcctacctaatttatttatgaacaaaattcttatgaattttgtacatgtacttgcacatatatagacgtcatactacccaactcatttgttgttagcaccataacttgtatctataaacctgcattatgtttggtg

SEQ ID NO: 29590 - DNA, 792 bp, Glycine max
  Clone ID: TF_GM651B23rgnG1.C1.o42.ma
atggccttatccgttatttgttcttcaaaaggcaatgtgttgagtgagtccaatatcttagttgtctcttgtgttgtgttgaatggccttgcctcgttcgttatagtggagggcttgcatgacggttctaaagcgagagatgtgaacttaggagggtggctggttatcgaaggttggatgatcaagccttcactctttggtggcactgccaatggagacatgcttgttcaatttaagtcagggacgttgcagaagtatgtgtctgctgagaatgggggagaaatgaataacttgacaatttgtgtgtttataattgtcatagctagcacagcttgtgtaattatgtttctcatcacgttgtccaaaatcctaagttactattatgcaaggagatataacgttagtagaagtaacccaccaatattatttgacattcgtggagattttcccttttctgatgatgaggaacaagaacaagccattaggcatcccatatggttcatccccacagagggtctccaacaatcaatcatagactccatcacagtctgcaaatacagaaaagatgaagggttagctaaagaaactttaactgagtgtcttgtttgccttggtgagtttcaacaagaagagagtctcagagtgttgccaaagtgtaaccacgcttttcacatctcttgcattgatacttggttaagatcacataaaagttgtcccttgtgccgtgcccctattgttcttgatgctgctagtctgtgtgatatcaaccaagacatagaagaaagtatttga

SEQ ID NO: 29591 - DNA, 2488 bp, Glycine max
  unsure (1)..(2488): unsure at all n locations
  Clone ID: TF_GmC1719_1
atttctaaaatcgaatcttaaatgcttggatatccaaatttgctcccgcacaacaccctttcggctcttaacttctcggttcggccttggattcattctcttccctctctctcaaaaaacactgaaacccataatcgttaaaattagggcttcggctcgaggctgggtggagctttacgcaatcccattacactctctttctctccatttccttctattctctattattatatccttttctatttttatttttctcattgcattctctaatctttaatctctattctctacccattcatattcatccccgtttttctctgtcactgtcgcataacactctttgaaccaccgcaactaaagtaacaaccccatgtcctgaacctcacttttcttctcgccaaagcttccaattttcgatttttctcttgttttcggaaaaagatcaacaccccagataaaaatagaagaaagccttttctgggttaatttggtaatttggtttttttcatgggtaacataggaagcagcggctccaacagccgctggagacacggcggaggcggtggcagcgggaggcggattcacccgccgcctccgccggtgatgtcgccgccggaggtaacggcgaaccgattcgtgtaccctccggccgccacgccgtatcacaactaccccgggtactacccgccgccgaccaccatgccggcgccgttgccggcgccatacgaccaccaccaccgtccggcggtggacccgatgtgggtgaggtatccgccggcggcaccgccggcaccggcgccgtacgtggagcaccagaaggcggttacgattaagaacgatgtcaacatcaagaaggagacgcttaggattgagcctgatgacgagaatcctggctgttttctcgtgtcgtttacgtttgatgccaccgtttcgggaagcatcaccatacttttctttgcaaaagaaggggaaggttgcaccctaaccccaatgaaggaaaatgttcttccacctgtgactgtaaatttccagcaaggtcttggccagaagtttaatgggaagcctgggtgaaaagcaaagtcaattgctgctaaagattgcttataaacatttctttcttccacgtttgatatgttctggattttgatctgatctcacactagacacatcaccatacttttctttgcaaaagaaggggaaggttgcacactaactccaatgaaagaaaatgttcttccacccgtgactgtaaatttccagcaaggacttggccagaagtttaaacagccagctggaactggtattgatttttcaacatttgaggagtctgagttattgaaagtaggggacatggatgtctatcctgttgcaattaaagcagatgcatcctccagcgaccatgatgaatcaaaatcaaatgaaactccatcatccggtagctcaaactctcagataactcaagcagtgtttgagaaggagaaaggagaattccaggtgaaggttgtgaagcagatcttatgggtaaatggaatgaggtatgaactgcaggagatatatggtattggaaattcagtggagagtgatgtggatgggaatgacccaggaaaagagtgtgttatatgcttgtcagagcctcgggacacaactgtccttccatgccgccacatgtgtatgtgtagcggatgtgcgaaggttttgaggttccagacaaatagatgtccaatctgcagacaaccagttgagaggctattggagatcaaagtcgggcctgagcctgaggaatgaagattcaatgttagtgacacaacaagcttcctgtacagtccaactgttatagctaatacttttctcttactttatcaggtttttccaataatcccacaaaatagaaattggaatttatgtatgacattatgtttgacatgtacagcaggctggcattgcacctgacttgtattattgtataagccaatgcctccgccatgcttgtttggttttacttctaatttttatgtggctttcccttctgaatcatatttagatgtgtttctcaccttcgcttcagatcccaactgtttttcttcaacatttctccgtgtcttcttttcatggtgtcaccttacttttttgtattttccaataatcagaaaaacaaaagaaaatgtaatttatattaggacttgcgtttcaacatgaacgacaggctggcattgcacataatttgtacaagacaatgcctccaattagcttgtttgtctgtgcttataaatggcttccattctatatgattaaggatatatttctcttggagatgantggcattntttttactngtgatagaagggttggtatgtannataatggtaactaatattccttgccatgctgtaaantatgtaaaagttctcgactctcgaatccatatatagtacgcgataaagtgggntatgttaggnaatccacggaaaagggaanctaaaaanaaaaa

SEQ ID NO: 29592 - DNA, 1999 bp, Glycine max
  Clone ID: TF_GmC7728_1
cgtggggcccccggaccgcatccctgtcgcaagtgtagccggtagcgctgctggtttccgctgtcatgtgcgtccgccgcctagcttgatcaagtctagtggaccgttaaatgagcatgttgcaccaacagttggttctggtccttttctgcttccttctggaactgctaatggctttttaggtgaggaaactgatggtaggccaggttgttctctagacacccgccgtgtatcttgtaaaagaaaggctgttgaacgaaatgttggacaatcttcagatggtggaagttctagctatagtcagcatacagatggtagtacttggaacactcttcctactcaggcttatggggggatcagttttaacagatctgccccaacggatcaggtaaatgcgagacttggcctgagtacaggggatggatcctctgaaagcattcctgtgtcaaatgtagcaagaagctcaggaagtttccacagaaattttcgtccgaggacaagtccttcaagtcaacaaatttctgttccttccactgcaatctcaagtgggaatgttattaggagttctggtgtttcatcaccctctcctatattgcaacgatttcatcctgttgatattcctttgacttgagggcagtgccacctgttgatactatggttcctcaaagtcagccccttgttattcatgttcctgctttaccaaggaatgcacagtcattcaggtggagtggtggttccagttcaacaaacaaccattcctcaaactcagttatgtgtgcagatagaaataatctaccaaatgaggaagcaagctcaagaagtatgcctagaaacattatagaatacccaatgtttgtgcctgcaaccaacttaagaaacgttgttcggaatccagctagaacttcaaataatgcaaatttaagtattccaggaaatgttggttcttcatcgcggacaggctcaaatccagctgtcaatccaccacctgcctcggcgtgggtttctcgccctaatcctcagcagtatccgcgcagattatctgaatatgttcgtcggtccttgttttctcctggtttggaagctgctggaagttcaagcaatagttatactcccttccgtggtcctcctacttcatctgaatcaaggggactgtcatctggggtaaacccgttcgagaggcaaggtgatagtgaatttggaattccatattcgttacaatctttggttgttgctggtgaaggaagtagtagacttgtatctgagctgcgcaatgtgttgggcctcatgcgtaggggtgggaacctgcgatttgaggatgttatgatccttgacccttcagtgttctctggaattgctgatattcatgatcgacacagggatatgcgacttgatgtggataacatgtcctatgaggagctattggctctggaagaacgcattggaaatgtgagcactggattaagtgaggagattgtatcgaaacttttgaaaaagaagaagtattcagctgaaccagattctcagcatgaggcagaaccatgctgtgtttgtcaggaggagtataaagatggggatgatttaggatcactggattgtgggcatgattaccatagagattgtattaaacagtggctaatgcataagaatttgtgtcccatttgtaagacaacgggcttggcaacctgagacttgtatcaaaaatattttcatattttctcttagaagatgaacattgaggtaaaggaaagtggcacaatttaatcagaaaattctgctgaattgtagctgaagtctctggtgctttgctgcttactaaatggcccatcttcttaagccttagccaaatttcttattatcaaattttttgtttacttgtagaagccaatgatctccggttaaagtgacacatgagatgattggtgtggtggataaaggaacatttcttaactgtagttgacaaggcttgttttacatttatgaaattttttatacattgctc

SEQ ID NO: 29593 - DNA, 1162 bp, Glycine max
  Clone ID: TF_GmC1025_1
caattattcccccattctttcccaccttgctcccaattattccacaaaatttccctcaattatttctcaccatcatcaccccctttccttctctcaagaaaaaaaaaagttaatttcttgaacccaatggcttcagagacagaggtgccggatattatttcctctgttttcgaaaggtttcaacaaaacagagacatgtctctgtttctgcccttcctcttcggcttctctgacgccaccccaggacgaaatagcgacgacccagatcacgaaactgctcccacagaagccccacaacgtcaaagaataatcttggtgaaccccttgactcagggcatggtggtgatcgacggtggttcgagcctcgaggctctgtttcgcgaattcaccaacggaaaaggtggtcgaccaccggcttctaaggagtccattgaggccttgccgagtgtggaaattggagaaggtaacgaagattcggagtgtgtggtttgtttggaggagtttggggttggtggggtggcaaaggagatgccatgtaagcataggtttcatggtaattgtattgagaagtggttggggatgcatgggtcttgccctgtgtgtaggtatgagatgcctgtggaggagattgattgggggaagaagagggaggaggaaggtggtgagaggagaaggagtgatggtggtgaagtttgggttagtttttctttcaataggagtagtagaagaaaccaagatcatgatcaagctgattctggtgattcaaatgatgatgatggttcttcatcaagtcatggagatggtgctgctgaagagagttagagaaggttttttttcttttttgtgtttttctggtagatcaaggttttaaattgcggtcacagttatggttttgttgcggtcggtctttgatgttgcaggaaactacagacaaatgcagtcgatgttgttggaattgaggtcgtggtggtgactccaaaaacattgattttgtggccaaaattgtgatcgttttttaaaatcttggggtagagtgttgtcggttttcaagttggggaggactggaaaatatgtacaggcaaaaatgcacaaaattgttattatatcttgtggtgataaataaaaatgatgattttttgctcttataaaaaaaaaaaggata

SEQ ID NO: 29594 - DNA, 393 bp, Glycine max
  unsure (1)..(393): unsure at all n locations
  Clone ID: TF_LIB3029-001-Q1-B1-A5
agcgcattggaaatgtgagtactggattgagtgaggaaaccctatcgaaactcttgaaacagagaaagcactcggttgaaaaagggtctgagactgatgcagaatcctgttgtgtttgtcaggacgattatggtgatgggactgatattggaacgcttgattgtggccatgatttccatagcagctgtatcaaacagtggctaatgcaaaagaatctgtgtcccatttgtaagacaacgggcttggcaacatgatgtatgtgactctctgtcctcaggcaaataccatgaccatgaaggaaaaaaaaaattggcacaatttacccaggaaattctggtgcttggtgccttgtcntctgtttccagcctagtaaattggcgtacctgactgaca

SEQ ID NO: 29595 - DNA, 1617 bp, Glycine max
  Clone ID: TF_GmC92_1
gttggaatttgggttcgggtcctaattggttttaatggtcttgaatctgcttttaattctctcctaacccttaatggatccaaaactaggttttttttctctcaattggataataccacccatttacttgttaaataaacttggtcacacccctttttaattggaataacaccccatagcctaacctcaagtagattttcccaaaaaggggctattggttttctctctaatcccttacattggtgagttcttctattcatgtattgggttcatattcaagatctgagggaaccaatttgccagcatttttatctttaacatctggtatggatcttgtaagcagaagatacttgatttatgtgtcacaacatgggtcacaaccacaagcactttcaccaatcacaagtccagggagttcaatctttcatccacatcaacatgcttcgagcaccagttttcccatcattgcaattgccataataggaataatggccacagcattcttgcttgtgagctactacatctttgtgatcaagtgctgcctcaattggcatcgaattgatgttctgagacgtttctctccatctagaaggcgtgaagatccaccaccaacatactcaccagccacagatactcgtggactagatgaggcactgatccggttaatcccagtgactcaatacaaagcacaacaaggggatgatagagactttggagagagaagattctgcgaatgcgctgtttgcttgaatgagtttcaagaagatgagaagctgagggttataccaaattgcagccatgtgtttcacattgattgcatagatgtttggcttcagagcaatgccaattgccctctttgtagaacaagcatttccttgacaagcagattccacattgatcagcttctcaccctaaggccttcttcttcttcttaccctcatgatcaaaccccacctagggaaaacctcattggtggtgatgaagattttgttgtgattgaattgggtagtgatcatgatagaagccagaatttgcaagaaagaggcaatgctttggagttaccaacatgtcctattagtccttcttcaccaaggaagctattggaacatagaaatgtgcagaagaagaaagcaatgaaactgcagaaagtgacaagcatgggggatgagtgtattgatattagagccaaagatgaccagtttttctcagtgcaaccaatcagaaggtctttctccatggactcatcaggggatagacggttctatttagcagttcaagaagctctgaggaatcagaactggcaagtcaatgaggtcaactccattgaaggttgcagtggaattggtagtagagctaagaggtcattcttttcctttggacatggaagtagatccaggagttctgtgcaacctgtttctttggacccctgaaatttctcttttgtccctcgtcccccctttccattatgtttgcaacttgcaaggttcttaggtctttaccttttttctttttattcttttggtgaggatgagatagagatgttactatgttagatgtatgaacaggtcataggattgtataacacacaaatattcaaatggatttaattcttaactt

SEQ ID NO: 29596 - DNA, 641 bp, Glycine max
  Clone ID: TF_uC-gmroLIB3258040h12a1
gacaagaaccaaatgtgcaaatctcttgttaataagaagtgattaattcgatctgtacagggatatacaaaagagctaactagatagatacaatttaccatctcaacttcaccaccaacccacaattaacacagggctggatacttctggcagcaaaagtgggaagcaagtactgcgactctatgtataattcgaactcaattagcctctgattgggtttgggcttgggcttttatgtgactaacttggaagtggagaggaatatagctctatccatccaagacaacagcatacattaaaatctgttctgttgcaatcacttaccttatgtgagagtcgtatgtgtcaaaaagggagtctggaacaatcagaggcaacttatctatgtacatgaaaagccttctgagattctccctagtcactgttgccatgtctaccacatcccttctatcagtgaatacccagagatcgcctgagtttactctcttgagactgtcacggcaaaatgggcatgattgtgatatcgttcgccattctctgtaacatttcaagcacatggcatgattgcagttgggaagcacaatcttactattcatgtccatgcatattccacattcatcttctctttcaatgtctatgtc

SEQ ID NO: 29597 - DNA, 974 bp, Glycine max
  unsure (1)..(974): unsure at all n locations
  Clone ID: TF_GmC127065_1
ctgggctcaacgattatccaaacacagcttaactcgtcttctttctttcgctagctcgctcaagttctctctcgctgaaaaataacaaagttgcaaattgctctctctctgtttccagtgaaagaaaaggatgtcaagtggagcaacatactggtgttacacatgcaggcagccaatctgccttgcaaggagggatcacatttgcccctactgtgacgaaggcttcttgcaagaacttgatgaattgcaaggaggtatggaacaaagaggttctgaaccaagaatgggtggaagatacataaactttggtgttaggaggcctggttctacccctcttcctgaatcatggactcgaggtgtgttcatatttcccaatcaagaggtggccgcagatcgggaaggattctttgaacaacacattacaaatgacccgcttggtgcatcacaatcttcaattgatgcaatgccaactattaagatcacacatgaacacctctactcaaatccaaagtgttcagtttgtatagaaagatttgaagtgggttctgaggccaggaagatgccatgtgaccacatttaccactcagactgcatcgttccatggttagttcatcataactcatgtcctgtttgccgtggtaagctgccacccgaaggacatgttagttctcgtggtagtcaaatttggagaggaaggaatgtcaatggtaatagtgaaaatgatatctataggggtagggagaatagacagttcaacgatggatggagaaatctactatcatttttgaatttttgcggccaatcctttcttctaattcaaatacttaatcgnnngagctgagactggggatactactctcctacaactctttgaccagaacaatggcagaagttaactgagtttcatttcttctccagctgtcaaataannnnnntttaaatgacatgaataaagcttctgaatgctttgaact

SEQ ID NO: 29598 - DNA, 1075 bp, Glycine max
  Clone ID: TF_GmC1797_1
aataaaaagatttaaaattaattgcagtaaggtcttaaagagggaagtgttggtggttgataatacacaaacaccagtactagtatgttttatatgaccatatcaggttaaaaaagaaagaagatgctaagatattgtgcttctcaggtaagaaacctagtcgtagcgaatccattgagcagtgaagacgtgcagtaatcgatgacgtgtcgtcaaaagaaagtgataggatagcatgggaaaacaacccactggcctcaacttcaccaacgacgccgacgtggagcagagcagccaccacaatactcgtaagtgagtgcgcgtaaaaggagaaaataaaaaacacagaagcacacaaccacagtcaacctttgtatctttctttgcattacccaattgcacagtcttctctctctctctctgctctgtttttgtttgtagaactactctaaaactaaaaccctattcctctgtttttgttattcccacgatgatgcctccttctcagccacctcattgggccccatctcccacaccaatcctcagcaagtctttcctacccccgacgtcaaactcgccggcggttgacttcactccgcccttaatagcaatggtcgtcgtcgtcgccgccgcgtttcttgtcgtcacctactcccgcctcatcgcgcgccacctcagaccacccgtccaccgcctcctccgccgcttccgacgccgccgcttcctcccctcctccgtcggcgacctcgagtccctcccctacgattctcccttcgacggaccgcacgtgttctccccctacggtttggacgaaacggttattaaaacaatcccgttctcgctttatacagcgaaatacgacgcgcgttttgatgagtctcgctacgactgcgccgtttgcttgctcgaattcgaagacgaggattacgtaagaacgcttcccgtttgttcacacacgttccacgtggactgcatcgacgcgtggcttcgctcgcacgctaactgtcctctctgccgcgctggagttctctgcaccgattcacctttcactccgatgatggccgctctcgagccg

SEQ ID NO: 29599 - DNA, 485 bp, Glycine max
  Clone ID: TF_GmC520291_1
ctagaagccaagccatgacctctgtgtgtgagttcttgtatcagctttatgccaaaacaatagttctattaacctacatgctcatagaacttatcctcatcattcagtaccttaagtcagatacacgtccaatttcaaccgcccaatacctcaatttcattgaagagaagaaccccacaattcagttcactagaagattgaaggcagagaacatagattgcagggtgtgcttatctgaattccaagaaggggagaaagtgaggaatctcaattgcagacacacatttcacaaggattgtttggaccagtggttgcagcaatactgtgctacttgtccactttgcaggaacaaggtgctcccagatgatgttgtggccaaccacaacttgcttcaaaatcaggcagaatatgatgggaatgatgaccaacttatctttttgttatctgcattaaggggtggtagcactttgcacagatatctctga

SEQ ID NO: 29600 - DNA, 2066 bp, Glycine max
  Clone ID: TF_GmC7706_1
ggctcgagcttcccagctgtactttgcttcttctttctttatccgttccttcttcatcatcatcgtcgtcattctttaatcctggcaaaaaaaaattacgctactttcgttgcgatcgtttccaatttcatgcgctttcttgtgtggggtggattggtggtgggttggttgattttaggtttgggaaaaaacgcgtgactttggtgattacgaggattaaattgcatcaacaagtctctatgatatggatcaaatgagtcagcaaaggcatggctattttcattccgaaagtatccatttcagaggcagcaacatctctccgcctaatgtatgcacactcgtgacagcctcagggcacggaactaatctagattcccattatttactagatgcttatgacaatggtatgatgtatggaatgacacaatacaatggagttcaacatcaacataatcttgatatgggtgttccagctgctgccaacatatattattctagcatgaatccttcatctggtacagctgcatctctaaatgctgaagttaggagaggaaattatcaatatttcaatgcctcggctagttctacagttgctccccctaacgcaagacacactgaaaatggcatcccctcactaccacattgtacttcgtggagcagatcaggcgagtctatgatggtgcgtgaccctaaccgtataactcaaggaaattatttaagtcaacactttcaaccagcagctcctcctccctggctggaccagcagttgaatagcaataataatgatggtcatgctttgccttggcatcagtctcttccaatgccatatgtacaagctcccagtgctaatggaagttcattagagaaatgcaagaatgggtcctcagagatatcatgatacagctggcagcagaagtggccacagatttcctcatcctcctcttgtcaacccacactatcatagctttcatcatcaaacacagcctgtgcaagaaatgagaggtcactccatcaactttcacccccctcctccagtaactgcaccttcatatagagttccaacaaatgcatcacgaagttcttcgatcttcatacaagatgctattgagatgggtgctaggcatgttggtgctgcaccattggcaggttcacatatataccgaccccatagaggcagcacacatgagactactcttagacatcgaaatcttcctcccgtgacttttctccaagttgatcaggtttcattggaaaggtgatcgtggtgacgttgtgttgtggaggctgcaagaaatgccattgcggccaccttgcttgtcgtgcatcttgcgtcacagattgggtatggcagagcagtgaggtttcaaccatcattttttctccaagttgatgatgttactttactggttgaccatcataatgatatgcgcttggacattgaggatatgtcttatgaggagcttcttgcattaggggagcggattggcaaagtaaacacaggtttgtcagaggaaatgattacaagtcaaatgaagacaaaatcttatttattactagctactaatgctattaacttggaggaggcagcttccgaggaacaggaaactgattcttgcataatatgccaggatgaatataaaaaccaagaaaaaattggtattcttcaatgcgggcacgaatatcacgcagactgtttaaagaaatggttacttgtgaaaaatgtgtgccccgtatgcaaatcagaagcattgactcctggagagaagtgtgtataaaatctgagatttacatgtctctgttcctacatgcacacttcttagctactacatttttctaacgatttcatgttttgttgtgtatatgaacccgtacatatagacagtcgcattgtccaactcatttatttgttggcatcaaaacattgtatgtatcaagttgtacagacttctgttgatatattaactttaggcaattacattgttgctattttttattttcattttttatatggatggttgaatgtgccatgtccaagtatagaatgaaactttatgttttattcatgt

SEQ ID NO: 29601 - DNA, 638 bp, Glycine max
  unsure (1)..(638): unsure at all n locations
  Clone ID: TF_LIB4391-049-R1-K1-C7
cggacgcgtgggcggacgcgtgggcggacgcgtgggcaccgctttctttctctctcgccctctctctgcgttgttggagaacattcagaaaaaaaaaggagagtgagccgaaaaaaacaattcagaaaatggagaacaacgcattcagagatcgaatcttggaggacaatgaacacgaagaaatccctgattcctttgtttgctgcgtttgtctggatctattatacaagcccattgtgctatcttgtggtcacatatgctgtttctggtgtgtctataattcaatgaattgtctgcgggagtctcaatgtccagtatgtaggaatcaatattatcacttcccaacagtctgccaattgcttcactttttacttctcaagatctataccgctgcttacaagagaagggaaaaccaaactcttgaggaagaaaagcaatcaggattctactcccctcaatttgatcctgatacatgtgaatcacaagctaaatttggtcattctggtatccctagttcctcctctatttgaatntaacgtccaactcatggcatgtgggaacttctgaatgtctggnagcatcagggtcagctgccaatgaaggagatgatggcaccatctattatgatggagagtctg

SEQ ID NO: 29602 - DNA, 1324 bp, Glycine max
  Clone ID: TF_GmC243_1
cgaggcgtccaggcgtttggttgaatggaagcgcgtgggcgggtggttcgtgtttccgtttcgcacagtgtcaatgtcctcctcccttcttttcccttttaagtcatagctttccccttcccttcaaattctcctcaaaccctacctccctttccccccccctcttcgcgtcttttcgcaaccgactgcatcttggatactggaatagtgtgccaatatgagctctcgggcaggcaagggacctgccgtcagaagttatcggaggagaaagacagcgttggaccttgaccttaaccgtgtaccagctggtgagaatcgtgagcaggagggaccttcgactcagtcggtgcctcgagaagttcaagttgaacagcagcagcaggctactcaacctccgatgattgacgtggaagccattgatgatgatgttgttgaatgtaccccaagggcttttgctgaggctaaaaacaattcaagaagagttcgtaggaggactatagttgatgttgatctagaagatcagactaggcgcaacaaacgccgaagagaattgccaaatctgattattaattgtgataagtatataaatttggaaggcggtagcagttccatggagcaaagttttaaaaagccacctgaacctccaaaggagcttgtcttcaactgtccaatatgtatgggccctatggtacatgaaatgtcgacaagatgtggtcatattttttgcaaggattgcatcaaagctgctataagtgctcagggtaaatgccctacctgtagaaaaaaggttgttgcgaaagatcttataagggtgtatctcccatcgactagttagaggctttccgtggaagctgtaaagaggagaacagggattggaagaaacgtcattgtactttggacaatactgaatggctgtgttgtttctaatatgttccctcatagctgatgcttagtctgttgttgggtagctgtttctcttaatttatcatattaatacatgatgacatttggtatatagatataattccttgatcaggttttttttagctttcatgttgtgaaaacttggtcttttctttttggtgataatatagggcagagaggccagtcatgacccattcttgagtggggattttttttatgtaatccttcacaagttccctgataggatttcttttgcttcgttattagtggcttagggcagcaggttgccagtatgaatagctatctgatttggcaaactgttttgcagtactagtccagcgtgtttagttttggtttacatgatatattcatttgctggttaaatactgtttttttttcc

SEQ ID NO: 29603 - DNA, 1680 bp, Glycine max
  Clone ID: TF_GmC285_1
gcacgcgttgcggcgggcgcctcgtcacggtggggagcccgtaatccagaggcgacaaggaacggacattgaattgcgacaggggcatttccgtcattccacagagcaacccgttatagccccaaaccccacactttccatcataccacactttctaaccaaccaaccatcaatggcagatgtaaccacctacctccgccaccaccgcgaccccgaccccgaccccgacgacgacgaccaaaccctaattccattcccttattgggatttggactttgatttcgaccccgaattccccacaaacactttctccttcaccgaccgcgaaaaccagatcaatttcgtcatggatctcttccaccagcgcgtggagcagtctcaactcaccgatcccctctccaacgacgccgttttcggcgtcatcgacggaatcgacttaggtttccccgccgccgacgacttcttcatcggacggagattctccgtcggatccgacgaatccgacggaggacactctcactcgcacgcggggattgacgacggtgtcctggggttctgcgcgcattccgacgaagactacaacgaaaacgacgacgttgcgagcatccctctctgctgggacgcgcttcaattggaagacaacaacaacaactacgatgacttcgagtgggaggaagtgatagacgagagagacgttctcagcatgctcgacgacaccgtttccgttaacctcggaatcgaagaggaaacagcagcagcagcagcagaagaagaagaagcagaatcagaagtcagcattttggagtggcaagttttattgaactccaacaatttggaaggaccaaattcggagccttatttcggagataacgaggatttcgtttacaccgcggactacgagatgatgctcgggcaattcaacgacgatgcgtttaatgggaagcctccggcctccgcctccgtcgtgaggaatcttccgtcggtggttgtgaccgaagctgacgtcgtttgcgcggtttgtaaagacgagtttggcgttggggaaggggtgaaggtgttgccgtgttcgcatcgttaccatgaggactgcattgtgccgtggttggggataagaaacacgtgtcccgtttgtcgctatgagttccccactgatgatgctgattatgagcggaggaaggcgcagagatctgttgttatgtgataatcatgatcatggtgttattattagggtcagtttttttttcttactttcagtgatagggtataaaaagtatagatttttttttttgctgctgaagaaaattgtgcttgttgattttccgaaatttgagttttgggatgatgcttctcttcgaattgtacttttgggatacatcacagaaacgattcatttttccatcatggaatctgtttatgttgtgatttcttcatgttcttgttcttgtggattgctctgctgctatcttgtatcgttctgggttacggccagattggaattctgtgaaagtcttagctggttcctttgacggattttatatcctctcatgttttgaatgtgtgtttgcattcacattcgatgatctataatgatgtagaaataccatttaagttcgttttaggtaaatgttcgtaacttcgtgtgtttggttctggattttgaatctgaaattgatttttgag

SEQ ID NO: 29604 - DNA, 1460 bp, Glycine max
  Clone ID: TF_GmC6834_1
ctttaaaattgtttacacatttggtgctatagttttttattgtttttcggatctcagttcgttgtatttgagttcgttggcttgattccttagagccaatgcggttctcttttttcatctgggtctaaagaaccactggtgaccaaaattgtgaaaaggggttccttgattttcaccaattcatggcatttcagcactacatttcccgggatttgaaaaccatcccaaatgctgtgactgaggcagaaaaccccaatggttgttttgattgtaacatctgcttagactttgcacatgagccagtggtgacactttgtggtcacctctactgctggccatgcatctacaagtggctccatgtccaaagtgattctcttccacctgatgagcatccacaatgccccgttctcgttgaaacttctcacagagccaaagctgttctctttttttcatctgggtctaaagaaccactggtgaccaaaattgtgaaaaggggttccttgattttcatcaattcatggcatttcagcactacatttcccgggatttgaaaaccatcccaaatgctgcgactgagacagaaaactccaatggttgttttgattgcaacatctgcctagactttgcacatgagccggtggtgaccctatgtggccacctctactgctggccatgcatctacaagtggctccatgtccaaagtgattctcttgcacctgatgagcatccacaatgccccgtttgcaaggcagatatatccaatagcacaatggtcccactctatggccgtggccatgccgccacagctgaaggcaaaacatcttcttgtgatgtttttataccaccaagaccatctgcttcatgtgttcaagcccttttggcaacatcatctcaaaggggtcagcaccttccatatcgtaatccttatcagggtcactacttcagctctcatccataccaagaagaggatgatgccacttcacaaatgctcaatcttggatcccaccaccaccctgtgactgggatgtttggggagatggtttatgccagagtgtttggcaacccagaaaatttgtatgcataccccaattcttatcagctgatgggaagtgccacccctagattgagaaggcaagagatgcaggcacacaaatctttgaacagaatttctatttttctcttttgctgcttccttctttgtcttgttgtcttctaagtgagcacttgagattattttctctcattctctgttgtatactttgtaaagaagcatggatgcaacctttaaaaacttgatagatcattgagtaaaattatcacaggctaaagagcttgtgagtctatacacctgcatctacacttctattcgttttattacaccttttttttggtgtgtgtgtatatataagaataagacactaataagatttaaactttgaatctataaactaaaaagaaaa

SEQ ID NO: 29605 - DNA, 816 bp, Glycine max
  Clone ID: TF_GmC12407_1
atccctcggtgctaattagtgtgtattatttttgtacctatgtgtcgtcctctccatgttccccactttctttattatgaaccgaatttcctcatcactagtacttctccatcaccatggctgaaactccatcaccctctgagtctcccacagcctcctttggccccatcataagtaatggccaagttggtggcttcgattggattgtccttgtggcagcaattttatgtgcctttgtgtgtgctcttggcctcaacacaatgttacaatgtgtgtttcaatgtgcttgtcgtgtcctcacagagcctcgccaatggattgcttcacgaaggctcaactctggcctcaagaaaaaggaaatggtggctttgccaacctcaacttacactactacacactctgctgctgcctcttcttcttcttcacctaattctagtagttgtgtcatttgcttggctgagttctctgatggggaccctataaggttccttccaaagtgcaaccactatttccatgtggtttgcattgacaagtggctactctctcactcttcttgccctacttgcaggcacctcctcaagtcaaatgattctcttcactccttacatattgtcatagcttaggtatcctctactcatgagtagcatcattatggctataaaacttttacttttgatatttaatgtaactgtatattcaagattcaaaaattaagatcttcaattaagttagaataattgtatatcaagttaatctagctacttagtgtttcatagcttaattatttaaatagttatcagttgtttagcatttcta

SEQ ID NO: 29606 - DNA, 527 bp, Glycine max
  Clone ID: TF_LIB4198-005-Q1-N1-F12
atactaccgggtaaatcacattcgaagttataattccatagcttggacactcgtctaagcacgctagaattcacatgaagatacacagcatctcatcacatgaacacgtgaggggagcatgtgacacaaccttaggggcgagagaaattgtgcaaataaaatcatccataatataccccttacatgtgactccaaccaatcatcatgacacattcatgtgtcactaattcctttttgttaattacaaatcataatcatgtgtgactaattccttttacttccccaaaccaaaagaaaaataaaatcaaatagagattaaaaagggtaaattgaaggattgatgaaaattattaccggggtcagaaaatatcaagaatttccaaaattaaattggtgcagagagggcagttccctctgctcacccaaatctccctcgaacacattctgcaaaacgtgtgcccgcacgggataaacgccgcgcctttatgccgcaccatgcacacgcagcagttatactccaccacacc

SEQ ID NO: 29607 - DNA, 1934 bp, Glycine max
  unsure (1)..(1934): unsure at all n locations
  Clone ID: TF_GmC37342_1
cgcganggangttggaaagtgtcccacacggcggattttttttttgcttcagtggcgcancacccaggcgctgggaccncgacgtctggggggcggggtgaccaaagtcttcgtcgggcctccgctccggccgctatttactactgggggatttaagaaggaattttaggtagctgaaaaaaaatagaatttcaaattccatctatctcaagacagggaatttggaaaattctcactctcgacggaggcggatcttcgtgctctcgacgcggagcctcgctcactcactctcgaatgcgaagccggccgtcactgttaaagtgaaaatcacgacactcaagtggaagagggaggtcggcgacggctgctacttcaatcggcgccgctaccgaggtctccgtcgcggcggaaaggggcatctccgctccactacggcggctattgactactatggttaattgcattaattgtacataaatagacctctaaatcaaagttatggaagattctgatcaacctgccaaatctgctgaaaaccagcaaactgaacaagtgtgtagttttttcagaaagccggttaataaaaagaatttaaggaagcgaactattgaaattgaagataatgaggaggactcaaacaatgaaacttctctgttgcatattcagaagaaaaccttaaaggctgacaataagttgtacttttccaccggctcttcaaaaagctctgcatctgctgaaccaagtgaagaatctggaaaaacagtctttcaatttgagtcttcaaaagagattcaagttcaacatgatagcaaagcaacagcaattctagagaccgagactgagttttcaaaagatgctcgtgccatccgcgaaagagctcttaagcaagcagaggagagtctgaaagggaaaagtgcaagctctgaggataaaaaattatataagggaatgaacagttacaaagactacaaggctggctttcgtagggagcaaacaattgctagtgaaaaagctggagggtcacatggtcctcttagggcttcagctcatattagagtttcagcaaggtttgattatcagcctgacatatgtaaggattataaggaaactggttactgtggatatggtgattcatgtaagtttatgcatgatcgaggggattacaagtctgggtggcagatggagaaggaatgggaagaagctgagaaagcaaggaaaatgagattggctgcaggagaggatgcagatgaggaggagggtgctaatttgactgatgaagatgatgaggattcgctaccatttgcctgtttcatttgtagaaactcttttgtggatcctgtagtaaccaagtgcaagcactacttctgcgagcattgtgcattgaagcatcattcaaagaataagaagtgttttgtctgcaaccagccaacacttggcatttttaatgttgctcatgagatacgcaggaagatggccgaggataaatcataaaaatgtctctgtaggatacatggatctctttacttcaaggaagttatcttttctccctcattttagtttcatgtttaagtttgatgctatgtaatgagttgaaaacataccataggtctgcacagtggaattaggtctcattcgttttgttgtatttctttgacatatagatcccagaatatctaatggtgagagacatttatggatttacccatttgtatatagcatgtcagttggccatactatggttctttttgcagtagtttgttaccaaattaattttgaatacagcgacctttacttcctccagaatatctaatggtgagagacatttatgatatacccgtttgtatatagggtcatactgtggttctttttacagtagtttgttaccaaataaattttgaatagagcgacctttacttaaaaaaaaaaanannnaa

SEQ ID NO: 29608 - DNA, 723 bp, Glycine max
  Clone ID: TF_GmC1096_1
tttcgggaaccctatataccatttcatactttccgacacctaaaacttgagcatgctgagtaagtacctagctccaatttatactcatctcaaatgggtattagattttgttctctactaccctttttacatgctttatgattctcatccacccataaatcttggaactgaattgagtacatttcattatgaattttcctctggctcagaggaacatgtggattgtgctgtgtgtctaagcaaatttggagaaggagatgaggtgattagagttatgagatgtgagcatgtcttccacaaaggttgtttggatagatgggttggtttcgagaatgccacgtgtcctctttgcagaggatcactgactccaaaaaggcctatcactaactctggagctgaggttgtgctatttcagttttgttctgtccaaaagtgtaatgatgagacatggtggctacgctgagtacattaatgggggcttcaaggcttttgcatcctacaccagcacagtgtgtagattgttagtttttttttttttttaagatatggtttagaaattcgagttctagtcatgtgtataaaaaaaatattttgttgagataaaattcaatacaataactctacgtctgaaatcaaattagtctcagactatcgttagaaggatagtgggaaaaaacttttggatccaatgaaataaaccaatcgcagagtttagtttatcta

SEQ ID NO: 29609 - DNA, 652 bp, Glycine max
  Clone ID: TF_GmC257111_1
ccacgcgtccgcccttttctccttcaatggaaggtgaggaggggaaacagtcttcccaaaaaaacccttacgttgaactagaagaagttgactttgattttattctagcaatgagcatgcaagaacaagagagagagttcacaatgctttcaactattgaaagtgaaagtgatgaatatctaagtgactcctctatagataatgatgatgatggtgatcctgactttatagcgagtcaagagtttgaaaccgaccttcggtttcttgaaggtgaaggaagcgacgatgatgatgaagacatggaaatggaagaagatgagattgatccagacgaattatcttatgaagaattgatggagttggaagagtttataggagaagaaacaagagggttatcagcaaatgaaatctctttgtgcttgtacccttatacctgccaatgtgctgaaagcaaaagtggcattgatcgttgtgtgatttgtcaggttgaatatgaagaaggtgaagcactagtggcacttcaatgtgagcacccttatcattcagattgcataagaaagtggcttcaaattaagaaggtttgtccaatttgtggaaatgaagtttcaactcccaacttggcttcgaacccttagttatttagtttggattg

SEQ ID NO: 29610 - DNA, 570 bp, Glycine max
  unsure (1)..(570): unsure at all n locations
  Clone ID: TF_GmC266_2
gccggtgtcaagttagagcttggcaatggctctgaaagncagtaaaaaaattgatcattaaagacccagaatgctgtatctgcttagccaagtacaaagacaaagaggaagttagacaattgccctgttcccatatgttccacctaaaatgtgtggatcaatggctaaaaattacatcatgttgccctctttgcaaacaaggattagagaggtagaaatagcagaaacaacagtcaaaaggattaatcttatttggtcacatgtactcttgatattaccctcagttttttcttcttctttttccttaaattttggtttaatatactttacacgtgtcacttgagtgagtttgtatatgtacagaatagctcaccagtgaccaaaactataatgtgtggttgtaaggaatggatcccataaccattcaaattagtgatttttcttgtattgtcatctaaatactgcgagataagcatctgcatctctgtagggaaaaaattaaggcaagtaatatattcgttccttaattcttaaaaaataaaatgtccataatttagggctttttcccct

SEQ ID NO: 29611 - DNA, 770 bp, Glycine max
  unsure (1)..(770): unsure at all n locations
  Clone ID: TF_LIB4167-008-Q1-K1-E9
cccggctcgacccagcgtccgattttttttctcgagacaaaaaaaaagtgtggctacaaaacaacactctcatagagagagaacggttcatcgttcagttcaattcaactacccgccggcgccgctagcgatggtggactccggcagtgacttcgccggcatcatttgttcgatctgctacgaacccctcaaccccattaacgaggatcttcaatcggtctccatctgtggccacgtttttcacgagctttgtctacagcagtggttcgagtactcttcgaaagggaagaagcacacttgccccatttgcaaacagggttgcagggccagtgacgcgtgcaggctctattttcagtcagtgggagatgcgaacaatagtgtgaagccttcgaagtgctttgaacttgaggaagatgctggggttctgcgtagggaagtgaagagattggaggtgaaagtttcggggcttaattctcaggttgaagggcaaacaaaggaattagaaggactcaatgaggagctttgtacttgcaaggagcaggcaaagatagagacagctntaaagaatgaggctttaaatcaaaaagcatctatacaattccagcttcaaatgaaatcagaggagcttgagaagtcaactntggagtgttttagattaaaagaaaggaatatggctttggctaaagaacttgcagcattaaaatagtatctgatctggacattgatgaaagaagagttntgaagcttgccactttgggtaatggggccac

SEQ ID NO: 29612 - DNA, 589 bp, Glycine max
  Clone ID: TF_uC-gmflLIB3275009b02a1
agggaccaaatttttacctggccttaattttttccttacaaaaatgcaaatgcttatctcgcagtatttagatgacaatacaagaaaaatcactaatttgaatggttatgggatccattccttacaaccacacattatagttttggtcactggtgagctattctgtacatatacaaactcactcaagtgacacgtgtaaagtatattaaaccaaaatttaaggaaaaagaagaagaaaaaactgagggtaatatcaagagtacatgtgaccaaataagattaatccttttgactgttgtttctgctatttctacctctctaatccttgtttgcaaagagggcaacatgatgtaatttttagccattgatccacacattttaggtggaacatatgggaacagggcaattgtctaacttcctctttgtctttgtacttggctaagcagatacagcattcctgtaagcagatcagaacataacaaatctatcaattcaatagaaattgaaatatgtcaaatcttaaaatgaatggaacttaaaagcatacatccaaattgagggtaaaaaatgcccaactacattactagct

SEQ ID NO: 29613 - DNA, 955 bp, Glycine max
  Clone ID: TF_GmC80819_1
aaaaagggtaaattaatcagttaatttcatatggaaagaatcacattttccatttacggtggatatcactagatctccataaattgataacccatttgaatctcaaactcaaacttaaaactcttctctatctatataacgcaccttcttcttgttcacttctctctctctctctctctctcactttttctcttgacacggaaagaaacaacatctgaattctgatgggtttcccagtggggtactcggagctcctcttcccgaagcttctccttcacatcctctccctcctgggcctcctcaggaagctgatttgcagcctcctccgcttcatgggcctccacgacttcctcgagcccgacattgcctgggccgaaacccagacccgagtgcccgaagagttcgaatccgtgtcggccacgctcatccgggaaatcctgccggtggtgaagttccgggagctggtggatcccccggagacgtgcgcggtgtgtctgagcgagttcgaggaaaacgatgagatcagacggctggcgaattgtcgtcacatattccaccgaggatgtttggaccgttggatggggtacgatcagagaacctgccctctttgcagaacggcctttataccggacgaaatgcaaggtgcttttattgagagactctgggctgcctctggtatcgctgaatatccgcatgttgcccctttctagtatcattcatatttccttattttacttttttggggaagggatatcaaaagccataaccagaagaggttcttttgatttcgtggtttttttttgtgtatgtgtatatatacagagacctctatcaattgtatatcgatttctcttagatgatggatttttttagaattgggagatctggttcatctcatattttgacctgtataacataattggaaattaattatgttttgattcatcttagttgc

SEQ ID NO: 29614 - DNA, 708 bp, Glycine max
  Clone ID: TF_LIB5118-038-A1-PF1-E2
tctctctctctctctctctcactttttctcttgaacggaaagaaacaacatctgaattctgatgggtttcccagtggggtactcggagctcctcttcccgaagcttctccttcacatcctctccctcctgggcctcctcaggaagctgatttgcagcctcctccgcttcatgggcctccacgacttcctcgagcccgacattgcctgggccgaaacccagacccgagtgcccgaagagttcgaatccgtgtcggccacgctcatccgggaaatcctgccggtggtgaagttccgggagctggtggatcccccggagacgtgcgcggtgtgtctgagcgagttcgaggaaaacgatgagatcagacggctggcgaattgtcgtcacatattccaccgaggatgtttggaccgttggatggggtacgatcagagaacctgccctctttgcagaacggcctttataccggacgaaatgcaaggtgcttttattcagagactctgggctgcctctgggatcgctgatcctttgtagtatgctactatatatattctaaatatttcctttttttggggaaatcaaaagcctgaaccagaagaggttttttttctttttttgtttatgtgtagtgtatatatacagaggtcatggaaatactcagacttctatcaattgtatatcgatttcttttagatgatggatttttgtgg

SEQ ID NO: 29615 - DNA, 1127 bp, Glycine max
  Clone ID: TF_GmC1513_1
tgaaactagaaggaaaaagtaggtggagaaggataaggtgacgaagcaatttcccatcacctactcttgctttgcttctcaagtacgccccattgtttactttattctcaatttcccatctcgtgattctgattccctccttttctatactaagctcggaaatcggcgcacggaaaacatgagatcattcatagatagaagagtaaaatttcactcacataataataatggggtctatgggtaactcaaatccaaatctaaatccaaatccaaatccaaatccatggactccaaaggattgttctgaaggaatttgcagcatctattgtcctcagtggtgttacaaagtgtactctcctccccctccaattctactaggtgatggcgatgatgacccttcaggctttgaattctctcctctcatagttgctgtgattggaatcttggctagcactttcatcttggtcacttactataccattatctcaaggttctgcaggcgcagaaacaacaccaatgattcaacagaagacgatggaaacagcgaattggctcgagtttcttcttctgccaattctggcttagatgaggctctcatcaaatccatcacggtttgcaagtacaacaaacgtggtggtttggtggaaggtcacgattgttcggtttgtttgatcgagttccaagagaatgaaaacttgagattgttgccaaaatgcaaccatgcttttcatctcccttgcattgatacttggctcaagtctcatgctacttgccctttgtgtcgttcttctgtcaccgcttgtccaaatccgaatccaaattcttccatggaacccccaccaagagtcattgttaatgccttgggacaccaacttaggagtaaccatgttgttgttgttgagagttctgaggaacaacagaaagatggttagttttgatgctcatactttgaatgacagtgaagggtatcatacataggggaagctaatatttggggaacagatctgcttcaacaagtacacagagatccatgttcacaaggcatatactatacatatatagtaagtgaatgaattctgttcttccaattatttatttgcatctaatcaaaataatttgtctttttt

SEQ ID NO: 29616 - DNA, 837 bp, Glycine max
  unsure (1)..(837): unsure at all n locations
  Clone ID: TF_GmC154097_1
cccggngtcgacccacgcgtcgagcactcttatcctctcaatttgaaatgcctattaccaacaacacttctcacactatgaccaacaacaggttttccggaatgatagaaacagtagcaatgtgtaagcaactttgttttggcggttctgcacttggactattcacgaaaattatcaagaaagttctatttgctctatttacttgcattctggcactaggagggtcaatagtaggaacaattgcaggaggcatcaaagggcagaccacagaagctggttttcttgatggtgctggaaaaggagcaattacaggagccattgcagcattggaattgatcaattttgatgcttttgatgagccaatttccaaggttgccctgttgagcagtttattaaatgggaaaatctttatggaatggatatgtccggctgttgcaagactctatcagttgcatgtaactgttaacacactggaaacaatttaccaagaagtatcggacatttatgatatcaggggagtcagagggataccacataatgtaattctgaagcttccttttcagccattcaactccagaaaaatgttgaaatcatacaacatgtcttgctgctcaatttgcttccaggattttgaggatggagaattggtcaggatacttccaaaatgtgaccacctttttcatctacaatgcatagacaagtggctagtccaacaaggatcatgcccaatgtgtagaacttatgttcctgaatcctgaccacattagtaattttgttgtaaagtaggttgagcatgttaataacaaaagaaaaagtaagttgttgagcttctgtcgc

SEQ ID NO: 29617 - DNA, 1139 bp, Glycine max
  Clone ID: TF_GmC2571_2
tcccgggtcgacccacgcgtccgatcccacgcgtccggttggttttggttttggagttgggtttagaatcttcaatcttgtttgggagagagatgtacatagcttccatgggaaggtctttcaaggactccttgaaactgcttgaagctgatattcaccatgccaataccctggcgtcagattttccaagggaatatgatggtgcgtgccttcagatgagaatgtcatatagtccagcagcacacctgtttctctttttggtgcaatggacagactgcaatcttgccggagcccttggactgttaagaatcctaatatacaaggtgtatgcggatgggacaactaccatgtctacccatgaaagaaaagcaagtattagggaattctatgcaatcatatatccctctttagtgcaactgcaaaaaagtgtggcagatacagaggataaaaaacagaaggctgtatgcatggagaggtatcgcaaaagagatgatgaggagcacagacagccttcagacatagacattgaaagagaagaagaatgtggaatatgcatggagatgaatagtaagattgtgttgcctgactgcaaccatgtcatgtgcctgacatgttaccatgaatggaggacaagatcacagtcatgcccattttgccgtaacagtcttaagagagtaaactcaggtgatctctgggtgttcactgataatagggatgtagtagacatggcaacagcgacaagggagaatcttagaaggcttttcatgtacatagataagttgcctttggtcattccagactttctctttgacacatatgactctcacctaagatgagtgtttgcaacagccagattttactgtctctggtgtgtggtcttggagggttagttcctttcaatttagcaatgtaaactcaaaaatgtaatttgataaatttagtttatataaagttgtattgttgcttcccacgtcttccagaagtatccagccctgtgtttactgtgggttggtggtgaagttgagatggtaaattgtatgtaggtcatttgtatatcctgtacagattgaattacttattaagaagagttttgcttattctgtgcctctaattattgttaaaaatgtgaatctcttgag

SEQ ID NO: 29618 - DNA, 1358 bp, Glycine max
  unsure (1)..(1358): unsure at all n locations
  Clone ID: TF_GmC907_1
cccaagacacccttcagaaccttcctcactctttctctcttccttctttttcgctcggtttttctataaacctaacctaaccaaaaaacccttgtcattcttcttcattcatttattcttattcatcttttcattcactcactctcactcatggctgaagatgggaacaacaacgatgtacccttacacaaattcaaagacagcaatccaaaccctgaagagttcgatgcaaagggttacagcctcagcggaaaaatcatgctttcagcaataatccttcttttcttcgtcgtcgttttgatgttgtgccttcatatctacgcgcgctggtacctccggcgtgctcgccgccgccagctccggcgccaacgcgagctccgccgcacccagcttgtcttttacaacgacgacgccacccccgcagccgtgtcacgtggcctcgacgccgccatccttgccacgctccccgtcttcaccttcgacccggaaaaaaccgggccggagtgcgctgtttgcttgtcggagttcgaacccggtgaaacgggtcgggtcttgcccaaatgtaatcacagtttccacatagaatgtattgacatgtggttccattctcatgacacgtgtcctctttgtcgcgccccggttgaacgcgcgccggaaccggaagttgttgttataacagtacccgatccggtttccgaaaccggttcaggcgaaaatgagaaccgaaccggttcttcttcttcttcctcttcggttggattgagtaagcctaagccttcgttggttggtgtgacaattgaggtgcctccgagggacgagaattttcaaaacgagttgcaaccgagttgcgactcatcctcctcgtttcggtcgccgatgagtcgcatgctgtcgtttacgaggatgctcggcagggaaaagaaggggaacgtgtcgccgtcgtcgtgcggcggcggcgattgtagctccgccgcggagcgaggtgagcgagaggagactcagtgagtcggtgactcgggtgctgacgtggcacttgttggaagcggaaaaacttgggttgttggcgcgtggcggtgtgtaatagtgacgtttctggattttaatgtaggcggtgagcggcgcgtgagttaggtggcgcgagatactgacgtagaatggttttgggatgaacataaatgatgtacttattcgttgatatatatattttttctttatttgtttcttatcttcgggttccaaaaatagttaaatagaatacgaaaattgctaattgtaatgcttgcttacatagaaatgaaaccaattttaaagaataaaatattttttaaaaaaaaaaaaaaaaagggcggccnccgcct

SEQ ID NO: 29619 - DNA, 1204 bp, Glycine max
  unsure (1)..(1204): unsure at all n locations
  Clone ID: TF_GmC759_2
gggtcgagcttgttcttcttccttctcttcatctgtctctacccttctacgcaactttccttcttttctattgagcttccaaatattctcacggcttgctatagtagttgcaccctccaaacacaaactgattcccttgtcttttcatctaattgcttggtctttaatggacgcgctttaactttacgcacggaaactgataaggttcaggtacttgtaagagaacatactgtaaaactaaaaggaaaaaatggccttagatcacttcgaggagagtgtgcaccaaaaaggaaattggaaatcttccagtgaaatcattgcagattctggtagaaatgcctctggtagctttgactgcaacatctgcctggagtgtgttcaagatccagtggtgacactttgtggtcatctttattgctggccctgcatatataaatggcttcattttcaaagcacctctttggataatgaagagcaacagaagccacaatgtcctgtatgcaaatcagaagtttctcaatcctcccttgttccattatacggccgcggccaaaccacaataccttctaaagggaagccacatcaagtagggactgtcataccacaaagacctcatggtcccagaacacacaacattagnaagtgtttcccaaccgatttctcaaagttaccatccctatagtaatccttatcatcctcaacaacacttcaactcgattccaagcggttacacctcacctatgattagaacaactggttcaatagacaacacatttggaatctttggtgagatgatatatgcaagggtctttggtaaccacgtgtcaaacattcatacatacgccaattcgtacaatctttcggggaccagtaacccaaggatgagaagacatttaatgcaagttgataaatcactcagcagaataagttgtttcctcctttgctgcctagttttgtgtctgctcttattctgattgctacttcattttcatcattagttatagtgcatccttacatagaatacattcactcattgatccagatgtattctatgttagagaagctgcaaattgatgctgagttatgtgtaaattaccaatctctctacgagctatatgaagtgaataatgatattctcataccatttttagaacaaaaaagaaacccacgcgaccgcccacgcgtccggttatagatcgcgagc

SEQ ID NO: 29620 - DNA, 1437 bp, Glycine max
  Clone ID: TF_GmC324_2
ccagtctctaatactactaactataggtaaagctcctgcacgtacaggtaccgaatcccagtttcgacccagacccacgccctctatccctaaaatgaataacccaaatggaggaatctgtttccttctctttctcttcctctttccttttgcggcggcgcaacctgccaccaaccaaaaccaatcctattacaacaagttcagcccttccatggccatcataatcgtcatcctcatcgccgccctctttctaatgggcttcttctccatctacatccgccactgctccgactccccctccgccagcatccgcaatctcgccgccgccactggacgctcacggcgcggcacccgcggcctcgagcaggcggtgatcgacaccttcccgacgctggagtactcggcggtgaagatccacaagctgggaaagggaactctggagtgcgctgtgtgcttgaacgagttcgaggacaccgaaacgctgcgtttaatccccaagtgtgaccacgtgttccaccccgagtgcatcgacgagtggctagcttcccacaccacttgccccgtttgccgcgccaacctcgtccctcagcccggcgagtccgtccacggaatcccaatcctcaacgctcctgaggacatcgaggcccaacacgaagcccaaaacgacctcgtcgagcccgaacagcaacagcaagaccccaagcctcccgttcccactgaacctcaagtgctgtcattaaaccagacgctgaaccggaaccgcaccagaggctcccggtcgggccggccgcggcgattcccgcggtctcactcgaccggtcattctttagtcctgccgggcgaagacactgaacggttcactttgcggcttcccgaggaagttagaaagcagatattgcagaacccgcaactgcatcgcgcgagaagcctcgttatcttaccgagagaaggtagttcgcggcgggggtatcgaaccggtgaaggaagtagcagagggagatcgtcgaggcggttggaccgggggtttaagtcggaccggtgggttttcaccatggcgccgccttttttggtgagagcgtcgtcgattaggtcgcccagggtggccaataacggtggcgaaggaacttccgctgctgcgtctttgcctccgccgcctgctgtggagtctgtttgagttttgattcccccttctgcaagatttcaatattttattgtatttaccaattattttttgctgccacgatttttttacgctagaatttgtaagatgtgtataatatttggcacacttgttttgcgtttgaagataaataactgaaatcctgaatcacgatagattcttaaatcataatcttggtcatcagttcagatatgaatccaacggaaatggagatatatatatatataaaaaaaaaggacgacgggcggccagtgagc

SEQ ID NO: 29621 - DNA, 1501 bp, Glycine max
  Clone ID: TF_GmC166328_1
ccacgcgtccgaaaaaacaaaaactccatggggtggggtcgtctcggaaggcatggctcagattccgttgacggcgcggtggccggtcctagcacctccgccaccgaaccacggcggttccctctcgcagctcagccggaaatgatgcgcgccgccgagaaggacgatcaatacgcctccttcgtttacgaagcctgtcgcgacgcatttcgccacctctttggtaccagagttgcggtggcttaccaaaacgagacgaaacttttagggcagatgctttactatgttctcactactggctcgggacagcaaaccctgggagaggagtactgcgacatcactcaggttgcaggaccttatggacttcctcctacccctgcgaggcgtgctcttttcgttgtatatcagactgctattccttatattgcagaacgaattagttctagaattgcttcgcgaggcattgtccttgctgactatgagtctgctgagggttttggtgaaaatgcccacaggagccatagtgctcagatttctggcaccagtccttcatcctcgtctggccaatctgttactactctgtcaaggttgaaggggaaaatgagtgcattttggttgcatttggttcagagatggcctacgatgctcccttttgtccgtgagttgttgcagttggttctccgtgctaacctcatgctattctactttgaaggtctctattatcatatatccaaacgtgcggcaggcattcgttatgtatttattggaaaagcatcaaatcaaaggcccagataccaaatactgggagtatttttgttgattcaactttgtataatagctgctgaagggctgcgtcgaagaaatttaacttcaattactggttcagttcatcaagcatccttcgcaacccacgatagatcagcaggacatggtttgcctgttttaaatgaagagggtaatttggcaactccagatattgacaaaagaagctgggtctctgaatcttcatcttctgagtatcatgcaaccagtggggttagcaaatgcacactttgcctgagtaatcgtcagcacccaactgctacttcatgtggccatgtattctgctggaactgtatcacggaatggtgcaacgaaaagccagagtgccctctttgtcgcacgcccataacacactcgagtctagtttgtgtatatcattcggacttctagagtctgctcctctttacgtacatatatagaagatagcattaaaggcagcattttcctcatcttggatcttacaaggactgtatgaacatttaagcaattcaattttgtattaggatttcaataatcaatctgattacactattaggtccgtgtttcatctcttttattatgcaataatgatttttttttttttttggaaaaagataaccattatagcacaacactggatggtgattctgcattaattatttctctccagtgggtggtgctaatgaggtttatgccagta

SEQ ID NO: 29622 - DNA, 668 bp, Glycine max
  Clone ID: TF_GmC25364_1
cccacgcgtccgctctgaactctcaatccacaaaaaagcaacatggcttcaattcgcgccttcttcacagccattgcttttgtggctcaatcatttcaaaactacatgatccagagtctgcacaaactttacaagcattatggatatgctgctgaagtgaaggacaatgaagagaaagaaagtgattattgttctgtgtgtctaagccaaatttgtaaaggggaaaaagctaagtctcttcccgtgtgcaaccacagataccatgttgattgtattggtgcttggttgaagaatcataccacatgccctctttgtaggaacaatatcactgatcatatcacccaaaaacataaacaggtgaagagcttaggagaatctttgttcaatctcattcagagtttctctgatctattggtagctattctctacatgatgcttccatctaccatcactgagagtttccctttggttcattaatattgctttctgctcacacaatactagtatgagttgtatgcaattatgtatgtaatatgtagaatagtaaatcaggattcctgccattcattaaattgctaatattttgagtttttgcttgtttggcactaggaaatatgtaattgtgcctaattacgattgattccttcaatacagaatttgattagtgc

SEQ ID NO: 29623 - DNA, 792 bp, Glycine max
  Clone ID: TF_GmC1100_1
gataaactaagggatgagctttcctgtgctatttgtttggagatatgctttgagccaagtaccactccttgtggtcacagcttctgtagaaaatgtctaagatctgctgcagacaagtgtggcaaaaagtgcccaaaatgcaggcagctaataagcaatggccgaccatgcactgtgaacacagttctctaacacaatccagcttctgtttccacaagaagttgaagcaagaaaagaagccagtgccttgaatagtctccaacaagctcaaaatctgattctggactcagattttgagctaatctaaggaatgacagacgacagccttttaggggggcatcaacaacaacatcatcaacacagcaggatgaggatgctgcattggctagaatgttgcagagacaaattgatgaacaaagaagcccgggaacaactcgaactcggtttgcaagattgagggcaagaagaggaggggtttctactagccaacatgaggatgcagctttggctctaaggatgaggagagaagagttcatgcaaacttatagagggagcagccagtctagcaggctaccctcatcattattagctagagaaaaattgagggctatggtatctagagccatgaacagaagagaagatcttagacaagggtgaatgttgttaacaactaaactttttttttctgaatgtcattttatggttatattcgtgtctcataatttgtgaggtgtgcattgttttgattttcaaggtacaaattgaattattcaaaactgaactggcattctg

SEQ ID NO: 29624 - DNA, 503 bp, Glycine max
  unsure (1)..(503): unsure at all n locations
  Clone ID: TF_LIB4281-017-R1-K1-D11
ccggnnccggcaattcccggngtcgacccacgccgttcggggagtatgaagggatggaaacaacatgcgagtactaccgtgccatcatgaatttcatagaacatgtatagacaagtggctgaaggagattcacaggtatgtgaaaataggaatttgagttttcttcttgttaactataaaacttcgaatttatgcaaactcccaatttactggtgtactgtatctatgcatattttttctttacagcctcactgtatctatgcataagggtttatggcatagataaatgagctctacattttttgttcaagaagcacaactaatggaatttaatgctggcagaatttagatattttcaaaattatgagctggttaaattgtacattggcaaaatatggtgaatgttgaaccatcttatggtcatgtgccttagtctatggcagttatcgacctgataagatcttagtatcactagaatgactatctaactgtcattagacatt

SEQ ID NO: 29625 - DNA, 1858 bp, Glycine max
  Clone ID: TF_GmC836_1
atcccaaacccgagtaaaattctggtaaaaattgatgtggcaaaaatacagctctatttttgtgtcatcaatcaaatattagggatatgtttgaaggataaaggtaaaagagtattgataatatagggaaattatgacagctttgattgtgaatagtataaatggaatgatgacccggaaacactgatttttactgccatgttgggtcccttggggatgattattattactgtgtatgaccattttatatggtatatgaagaccttaaactatactttctatattagctgcccagtacactttcacctgccagtttctattattgacttaaaatgctagttgaaatggaaatttagcccttcatctggaaattttatggagtctatatatgcactctaaataaattggcgtcttttttgtttaacaaaaatctaataagaaacgaagaaaccaaagaaaaaaagaaaaactatatcagcgattctcgtgatcttcggcctcgaatcgagaggtaaaagacccaactccgcctctgtttttgtgatcgaaaaccataaaaaagttgtttccgatcactgccttaatcggattcagctgttgttcctcctcctcaatttcgaatattgaaaggctttagttgttgattttggtcaagtctctagtcaacctgtgaattttttattcaagtttaaaaatatatagagcaatgagttttgtttttcgaggaacaagagcagatattgaaaatgggtttccaggatttatacctgagaggcgagcattgcgcgttcatgcaacacgtcctagtaattccaattcactcacttttctcgtgacagttcttctgttattcatgatactgaactctcaccagatgtccccaaactttctgctctggctggtgcttggtgttttcttgatggcaacaatgttgaggatgtatgcaacatgtcaacagcttcaagcacaggcccaagctcatgcagctgcagccagtggcattcttggccacacagaattgaggttgcatatgccaccatcaatagctcttgcaagccgagggcgtctgcagggtctcagacttcaacttgcacttcttgatcgggagtttgatgatctagattatgaaactttaagagctctggattctgataatgtttctactgcaccctctatgacggaggaagagattaatgctcttcctgtccacaaatacaaggtttctggtcctcaatgtggtggttcctcaatgcaacaagcatcatcttccactcctgctgagaagaagcaagataattcaaatgctgttgggagcatgaaagcctctgatgatgacctcacttgcagtgtatgcttggagcaagttaatgttggtgacgtactgcgaagcttaccttgcttgcatcagtttcacgcaaattgcatcgatccctggctgcgccaacaagggacatgccctgtatgtaaatttcgagctggatctggttggagtgacaatggacataatgatatcatcgcggacatggtctgaatacctcgtctaattttatttatggacgtgtgattataaccttgtacaactgtaacttactctcttcatgtatcaagattagtatctcatgactagcattcgtgtaattaccccgacgtgtatgtagggaacagaagaacggcctagtgccgtgtaacaaccatacaaattatacaatttgttgaccattaaacttacatttcttgggtcgctgtgcttaacccaacagcatgtacaaaaattttcttttctgctatggtgttctctgtgtcaaaatgcttgtatatctgacgggattggatagttagcgcatgtttattaatgttt

SEQ ID NO: 29626 - DNA, 685 bp, Glycine max
  Clone ID: TF_GmC836_3
ttcaactgtgcacttcttgttcggaagtttgatgatctagattatgaacctttaagagctctggattctgataatgtttctactgcaccctctatgcgggaggaagagataaatgctcttcctgtccacaaatacaaggtttctggtcctcaatgtggtggttcctcaatgcaacaagcatcatcttccgctcctgctgagaagaagcaagataattcaaatgctgttgggagcatgaaagcctctgatgatgacctctcttgcagtgtatgcttggagcaagttaatgttggtgacgtactgcgaagcttaccttgcttgcatcagtttcacgcaaattgcatcgatccctggctgcgccaacaagggacatgccctgtatgtaaatttcgagctggatctggttggagtgacaatggacataatgatatcatcgcggacatggtctgaatacctcgtctaattttatttatggacgtgtgattataaccttgtacaactgtaacttactctcttcatgactagcattcgtgtaattaccccgacgtgtatgtagggaacagaagaacggcctagtgccgtgtaacaaccatacaaattatacaatttgttgaccattaaacttacatttcttgggtcgctgtgcttaatccgacagcatctacaaaatttttcttttctgctg

SEQ ID NO: 29627 - DNA, 1432 bp, Glycine max
  Clone ID: TF_GmC41583_1
gctcactgtcctttttgaccttgaatttaatgcacttccactttcacctcactcacatcattttctccctcattttcaacctttctaaagcacaatcctccatggagccagttcccgcctacatcacccaccacagctgggagccttccgtcgccatcaccgtcgccgccatcatcttcgccctcctcctcatggctatcatctcagtctacctccgccgttgcgcccagtctcacatcatcatcaccaccaccaccttaccctgctcctgctcccaggggatcaacaaggacctcctcaacacgttcccaacgctcttttactccaacatcaaggacctcaataaggccaaccaaacgctcgaatgcgccgtctgtctaacggatttcactcacaaagactcgcttaggctgctgcccaaatgcaatcacgtgttccaccctcattgcattgattcctggctgacatctcacgtgacatgtcccgtttgtcgcgcgaatctcagccaggaatcatcatgccatgtttccataaccgtccctcctcatggcgaggagggaagtttgggaaacatgacgacgacgacaacaacaacagaagccacccaagttgagcaaaggccaagcaatgacatcaaccaggattgtgttggagatcccacatcaactagtgatactaccaaaataatatatataagcgaggaacaacattcgtctagtgagctagcttgtgaggttgagttaggttcaaagacgaatgttaggaattctactatcactaatattggtgatggggttgttgcgtcggagagaaacctttcgaggtcgaactcgacggggcattcccttgtggaggagcaagggaagggtgtggagaggtacacgttgaggttgcccgaagatgtgaggaggtacattctagtgaaccatggaagaagtgttcaacgttccgcgagtgttaaaggggggtgttggagtgacagcgaagagagttacgtggggaagagggtggagaagaggtgggtgatctgcacgccgccatttgtggcgcaacatgattgaagaatttcgtcgaacaattggtctgcgttctgcgttgcgccttctataaagggtcgttgtcaattcttgcaagagattgtgagagtttggtgttacagagatgaagcagaggactgaaatggaagaagagtagagttctcaatgatcgagtcaactcgttatgtttcaaccctattggcttatgagtcaactcgttttctttctttccttttttttgcttattttttggggtgagagtgtgtgggatcagtggctcatttgcacattgtgttatttattcatttataatatacctagtattgttagtctaattattttcttatcatcttgactatatgaatttaagggcacttggttttgtcggactttgt

SEQ ID NO: 29628 - DNA, 708 bp, Glycine max
  Clone ID: TF_GmC342_4
ccggggatatgcgacttgatgttgataacatgtcttatgaggagttgttggctctggaagagcgcattggaaatgtgagtactggattgagtgaggaaaccctatcgaaactcttgaaacagagaaagcactcggttgaaaaagggtctgagactgatgcagaaccctgttgtgtttgtcaggaggattatggtgatgggaatgatattggaacgcttgattgtggccatgatttccatagcagctgtatcaaacagtggctaatgcaaaagaatctgtgtcccatttgtaagacaacgggcttggcaacatgatgtatgtgactctctgtcctcaggcaaataccatgaccatgaaggaaaaaaaaaattggcacaatttacccaggaaattctggtgcttggtgccttgtcttctgtttctagcctagtaaattgtcgtacctgactgacagaggtttcccctaccctgcctccctcccccgaatttgtttatttattatctaaatccaaaggtctcccggtttaggtgatgaaggagcgcttcttaactcaagttgacaaggcttggtttacatttatgaaattttttaatattgttcggattggagttatgctgaacggaaaactaggtacaaaaagaaatgattacaatataagaatcattggtactggatttaagaaaaaaagaaaagaaggggggggaggg

SEQ ID NO: 29629 - DNA, 1246 bp, Glycine max
  Clone ID: TF_GmC871_2
ggtccggaatcccgcgtcgacccacgcgtccggttagagcttcttcccacttcctccgccgccaccgccaccaccaccgatggcggatccgaaagcctactggtgccacgagtgcgacatgagcgtgtccctgacgctcccaccctcccctctcctctgcccgcactgccacacccacttcctcgagctcatggactccccaaccctctcccaaaacgacaccgaatcctccctcttcgacgtcgttttccaagacgctctcttactcctcaaccccccttcctcaaaaccccgccccctcccctccctccacgtcaccccctccctcctctcctccctcgaccccaacggcgtcgttcgctgcgccgtctgcaaagaccaaattaccccccacgccgaagccaaacaattaccctgcaaacacttataccactccgattgcatcacgccgtggctcgaactccacgcctcgtgtccgctatgcaggtttcggttggaagaagaggaggaagaaggcggtgacggcgttatgacgaagatcaggagggagattattgccaggctgacggtgctgacggaagaggatttctacgggctgaggaccacgctcaaccacattgcctcgcgccacgcgctcatccaagagaacgagaatcgcggcgcccagattggggaaactcaaggtggcgattcggcttgctgatcatattggttcataaggtatatagtgtattaaaataatgctgaagttgtatcaccatagatcgtcttttcaagtgtaaatctgcaccgacgattatgctgctgttcttttccctccttttttgggaatctccaactagctaggtctagtgctatagctaaaaaatacaataaattgatggagtgcacgggtaatgtgcacttctctacccatcttccactctctctatgttggtccttgtaactggatttccttagccaaatttcttgtgtaaaacttagctttcttttatgttgtgtctgaattgcccaagtggatgatggatccttcccaatgaatcatttcgttcccaatttttttgctttggctttacagtagatgctattttttcctgccaatgttgctgtagttacggtatgagatattgagattgttgagggattgaatcatttgagtgttgttgtgtccatggaagagccttaaaatgcataatatattgtggtgtgtaaaaaaaaaaaaaaagggcggcaaatgactagtagc

SEQ ID NO: 29630 - DNA, 1058 bp, Glycine max
  Clone ID: TF_GmC127299_1
ttatcttattatattttatcttatcatgtcatgagaaggagaaccaattatagtccaataccttcgcctcttcaccaaccagtcccactttcaattccgtgggttcctgccatcaatgatagagatcacatgtatctaaaccttgcacctatcattataattgtcatagctggcacaacttgcataattttttttctcatcaccttgttcaaaatcctaaggtactattatccaaatagatacaacgttagcagaagtaacccaccaatattatttgacattcgtggagattctcccttttctgatgatgaggaacatgatcaagccattaggcaccccatatggttcatccccacagagggtctccaacaatcaatcatagactccatcacagtctacaaatacagaaaagatgaagggttggttaaagaaactgagtgtcttgtttgccttggtgagtttcaacaagaagagagtctcagagtattgccaaagtgtaaccacgcttttcacatcccttgcattgatacttggttgagatctcataaaagttgtcccttgtgccgtgcacctattgttcttgatgttgctacagtgttggtggtggcaccgagtctgccccatatgtttctgacatgaacgaatacgtagaagaaagtaatagtggtggagtgagggttggagatgaagaaaattctagtgaagaggggagggatgatggaattcatgttttgaatgaatgtgtcgaggtgagtggccattctacaattctaattggttctgcttctgatgttagtgcacaagaatttgatgatgaaattgaactcaaaatgaagagatctgtctcggtggattcatcttctgcttcaatagtatttagtgatgtgttggaattaaattttgatatagaaagcttagacaccaacaccaacttggtggttgaaaaggtttcaatttcaagtaacaaggatgttgctattgctaaggagggtagcgaaagttcaaccaataacaaactggcttcagagccagagtttaactcttccattgtgaactag

SEQ ID NO: 29631 - DNA, 1572 bp, Glycine max
  Clone ID: TF_GmC723_1
tgttatttcttccttctgcccactttcccggccttgtctaattcttttctctgactctgtacacactcactactccaatcctacggaccctttcttcttttccttttccttcaccataaaactcttctccatcacacacacacacaccactgtgctgctaaccatggcaaatttcacttctttttcttcatctctgtcacaccttcttcccctttcttctccttcttcttctgcagctttcgacgattcttccgaagactcctgcagtatatgcttagagcccttcagcgttcatgacccatctactgtcacctgttgcaaacatgaatatcatctgcattgcattattgaatggtcacaaagaagcaaagagtgcccaatctgttggcaatcacttgctttgaaagatcctgccagccaagagcttctagctgcagtggaagatgagaaatgcatgagatcaagaaacattgctaattctcgtgccccccttggacaacttaatgaaagccacgatgattcttgctcagatgactctgattttgatgatcagattatgaagcgcctagtttctgctgcaagaagagctcattttgttcagagacaggaaaggaagagatcacctagtgctggtccatcagaggctcttggtgttaactcttccatgcatgtttctgaggtgcaaacaactcttacaacttcatcatctgggggtagtttgccagcttctggtgtaccatctactgttagcattcaacctccagcactaaatactactcctgagagtgcaaggagaccaaacacttctgagatttccttccctgagtccttcaaatcaaagttttctgctgcttcagccagatataaggaatcaatttcaaaaagtacgcttggtcttaaagagaagttacttgctcataatgtctcggttaaagagctgagtaaaggtgttcagcgcgagatgaatgcaggcattgctggagttgcacggatgattgaacgccttgatcttagctcaaaacggtccagtgctcctctcattgctgtccatagtgtggctacttcagacttcccttcttcagggaagtctgttgaagagaatggcattgggggttctcctagtaaagagaatggaggtgcagttcatgatgttagttcagatgttcccccacttgttactaacatgcaatcttttcgaacaaaaactcctccatttcttcagagtggacatggaatggtatgaagacttagcttgtggtcatcatcaacttgactatgctgtctcaattgtcctagaagagtgcaagagacgccctctgataaccaatgtactcattggtatgcgtcctgcattgttatcaatggtaaattacgcgtaggaattaaaattatgtacaatcaattgataagagccagcggtttcatccgttggacgattattcaatgcatctctgatatagtttcatggtttcttatccatgtttacacctttatttttttcgattaaagtttacatcttttacatgccagtccttttaatgatataaaataaaggctctctgttttcctttt

SEQ ID NO: 29632 - DNA, 1052 bp, Glycine max
  Clone ID: TF_GmC12959_3
agatgaatcaaataagtagttaaaaaaaaactataaagtaccaagtcaattaaattataagtattgccttcactttcaacccgtactttctctgtttctaaacaccccccacaaaattttctcactcgagaattttcccggaaaatctcacctttttcgatttctcagtcaagacaaacaacaacaaaaactctaaattctttcttaattcttgccaaattcgaaggagagagaaagagaaaaagaaaaggaaaaaaggttaatggcatcactgggatctccgtcttctttctggtgctaccgctgcaaccgcatagttagggttccacaaaaccacgccgttctcctctgccccgattgcaactccggcttcctcgaagagctccaaacccctccccactcgcgccgatccacgcgcggcggcggtgggtcccccttcaacccggtaatcgtcctgcgcaacgcaaacgacgtcgtctcgcccgaaacgcggaacttcgaactctactacaacgacgccgtttcaggttcctccggcccaagcagtctccgtcctttaccacagggagtatccgagttcctcatgggctccggcttcgacaatgtactcgaccagctcgacgccgccgcggggggcgccggagcactgccccccacggcagcgtcgaaagcggcgatcgagtcgatgccggtggttaagatcctcgcgagccacacctacgcggaatcgcactgcgcggtctgcatggagaatttcgagatcaactgcgacgcacgtgagatgccgggcggtcacgtgtaccattccgagtgcatcgtgccgtggctctcggtgagaaactcgtgccccgtgtgccgccacgaggttccttcggatgaagttgaagaaagtaataacaatactgtggggttgactatttggagacttgctgagggaggattcgctgtgggcaggttcatcggagggagggagctcccactggtgtatacggagatggacggcgggtttaacggcgctaacggcgttccaaggagagtcgcttgggatagct

SEQ ID NO: 29633 - DNA, 694 bp, Glycine max
  Clone ID: TF_GmC43458_1
gatacaaatgttgtcatgatacactcggtcctgttatgtgctgtcatttactcactcgggttgaactccatcataaagtgtgtcctaagatgttcaatcatagtcatcaataacaatgacccttcttcttcaagtgtgagcaacaacaagccttcaccgagattggccaacacaggaatcaagaagaaagtcctcaagacttttcctactgtgagctactcaacagagatgaaacttcccggtttggacatatagtgtgtgatttgcctctcggagtttgccaatggtgataaagtgcgcattttgccaaagtgcaaccatggtttccacgttcgctgcattgacaagtggctaagttcacactcatcatgccccaagtgcagacagtgcctcattgagacatgtaagaaaattgttggatcccaaatacaaccagtgccacctgtgccagaaagtaccattataaggattcaaccactagaacctgaaggtttggagcgtaactatagggaagtatgttagctaattaattactttaattagtactagaatgtaagacaaaccaatcaaccatcaacaatgcggtggttattgggggattttcacttgctttttgttttgacctcagatgtaagataaactagttcaatttttgtaactgcaatattattcttttcagtaatattctaaagtt

SEQ ID NO: 29634 - DNA, 1701 bp, Glycine max
  Clone ID: TF_GmC258_1
gtgggctcggacccacgcgctcgcttgtttctctctcttcaatggccgagccccactccaccgccgcgattcttcctccctccaccgcccggttggaggaaactccgtccgggagctctcagactcccctccgctccggaagaggcggctggagtattgtcgatggctccttcgccattgttagggacaatacctgctcctgcttcgtcgtcgtcttcagcttgtggttcttcgtgtcgatgactatgatactgggggtttatgggtccatgaccatcgtgctgggtccaaaatcttcaattgttttccaacctagtcccgtgttcgttcaatctgtgaaggtagaaaacttaaaggcaaaccctggcccaggacccattctttatgggacatatcggtatcccccacttgatgttgttaccacttggggagaaagtattaatgtttctcttccctctggctcatacaaggaatggaaatattatctgaattgtgggtcttcaataaatatttcgtatcacgtgagctctaagagctcttctgttttccttataatcgccgaaggggacgtgagcctcacacggtggctggaggacccaacagaacctaatacaactctgtcatggaatgtgatccatggaactggtatgatcacacaggacatattctggtcgtcgagctattatgtggcattgggcaatttggatgaggatgtggaggtagcattaaacctcagtataagggcctccttgcataatacaacgaatgctttctacaaatgtgatcttgccaatggtccatgcagtttgaatcttttgttttctgatggaagtgcagctgtcttagttactcctggtccacaacagaatgcatccaatgagtggtatgtcaaactgtcctatggaccaagatgggtgacctatatttttggaattggtggattgactttgcttgtgtttggggccttcaacttcttgaacaagcttcagtgtgctcatgaagatagagcaggagttagatctgagggaacagaacgtcagagagcccctttgcttcctcacaaagatgatgatctttcaagttggggttcatcgtatgagtccttgccacaagatgagaaggatcttggctttcttccaggaggccccattgatgggaagactttagttgatggtgaaaccagtaataacacacggcatctttgtgctatttgctttgatgctccgagggactgcttcttccttccatgtggacactgtgtggcttgctttgcttgtggaactaggatagccgaggcagctggtacttgccctgtttgtcgtaggaacatgaagaaggttaggaagattttcactgtttgatcagtgcacttcctagtgtagagattaaatgagtagtcaccagaatcatagaataccttttatgtactcaactatacattattttcttgccaatcattaacaatgatcaagcaaatggtgtctgctgatgagggtcgtattggccattgcagcattgcctactgtaatagtgactagatgaatagccaccggaatcatagattactttttatgtattcaactacacattattttcttgccaatcaacaacaataatcaagctaatggtgcctgctggtgagggtcgtattcagcattgcagcaaaaaaaaaaaaaaaaaaaaaaaaaaaaaaaaaaaaaa

SEQ ID NO: 29635 - DNA, 1486 bp, Glycine max
  Clone ID: TF_GmC121969_1
ggtttaatcaatcataaatatatgtagtttttagtcttttcctttggtctcaggtgtttccattcatggtgcacaacttgtgaaggttttattaacttaagagccttgcaaacaaatgtgctgaacaggttttggaaatcaagtctttaaaaacattgactgaaaagttacagaaggagaatcaggaattagagtttgttctggatatgcatggcctggagaattatgataaaagatattcggaagtaagagaatctgaaagtaaagctcactctcaagctgaaatgctgaaaaatgctttagatgagcatagcctagagttgagagtaaaagctgctaatgaagctgaagctgcttgtgaacaaaggctttctgccgcagaagctgaaatagaggacttgaggtccaagctggatgcatctgagagggatattttggagctgactgaggctgttaaagttaaagatgctgaggcagaggcatatatatctgaaattgagactattggtcaagcatatgaagatatgcagacacagaaccaaaatctgttgaaccaggtgatcgagagggatgactataatattaagcttgtatcagatagtgtgaagacaaaacaggcgcacaacactttaatgtcccagaagcaggccttagctaagcaacttcaacaaatcaatacatcaatagaaaattcaaagacgaggattacacacagtgaagagcagatgaaagctattctatccgatgccattaaatgtaaccaagaagaaaaacaccttgcagtcaccctggaatttgcaaaatgggaattggctgatgccgagaaggaattgaagttgctcaagtctgctgtttcctcttcagagaaagaatacgatcaaattcagaaagatacggaagctattgaaatggaattggagagtgaaaggagtttacggaagaagcttgaggaagaactaagagaattgaactgcaaaattgatgagctgacttctgaaactggagaaaccacgatacaaaaactcgaaaaagaaataaggatttgcaagaacatgatcaagtgtactgtctgtactgatcgtccaaaggaggttgtgattgtcaagtgctatcatctgttctgcaatccatgcattcagagaaatctagagcttcggcaccgcaaatgtcctgcatgtggaacagcatttggacagagtgatgtccgctttgtaaaaatatgagacaaatgttaagatagacaacttgtagataggtggtgattgtaatgttttggatcctgatcatagtttcaaacaagcattcctacccgaaagaaacctatgcattagagatatcagtattggttgcacttgtttgtgtatcatctcatactccctcccccactcttttgggtcttgactaatctaaagtcaacttggatgtacttattcaccgagacaactttttcaagtttcaattttaaacctgaaatctagtttagaag

SEQ ID NO: 29636 - DNA, 996 bp, Glycine max
  Clone ID: TF_GmC67144_1
ggacttccgctcgagtacggctgcgagaagaccacgcgtccggataatcaccccaccaatatatatcttgtggcaagaggtttatgaatgcatgttaggaggcagtgctgcacagattaatcatgagtcttccacaaactgcaactagccctcctccacatctgtatccacaggaacttcagctgaagctttaccaaaccttcatattctcaattccaatactcttctccatcattctctttctcttgttttacttgttctacctcaagagaagggcttcctctctctcttccactcctcacttgcttcctaggaccattgccaatccacccaccacctctccctatcattcctcaccttgtcgtttggatctgaccctccatttcctggataaacttccaagaattttgtttgatgaggatttgctagcaagggattcactatgttgtgtatgtctgggggaatttgagctgaaggaagagttggtacagataccttattgcaagcacgtgttccacttggaatgcatacatcattggctgcaatcaaacagcacttgtccactttgtagatgttccatcatccccactaccaagttcctcaacccagcaccccctattaacattatatcaacagacccaccccagcagcatggtgctatcatttcggacttcccattacaaattctatcattgccacctcagccacaagaccatcaagaagttgttggtgcttcctcaaatgctgctaatttgtcaagggaatgatacacattaattaattagcttgattataataatggtcattaattaatttcaagggagtattcagctacacatcaagattatggagtagttgtttacattttatgatatcaaaattttcttttgcccttttattaatttctacattggaatattcagccagtttgtggaatgtactactataacacagcttctcctgtcaattgtcatgacctttctggattggctattc

SEQ ID NO: 29637 - DNA, 813 bp, Glycine max
  unsure (1)..(813): unsure at all n locations
  Clone ID: TF_GmC96_2
cggttgcgccacgcgtccgctctctctctcactccaaaatcccaaaaccgaattcacattcacaaccacacctccgcaataaaataaaaaaaggtaacctccctcagtccctcgctcatggaagagctctccgcggggcctctcgtccccgccgtcgtcaaaccggaagcgtccaaaggcgccgccgtcgccgccgacacctccgaaggccgcggcctccggcggcacgttcccggcctccacgtcggagccggacaaggacttcctctgcccgatttgcatgcagatcatcaaggacgcgttcctcaccgcgtgcggccacagcttctgctacatgtgcatcatcacgcacctccgcaacaagagcgattgcccttgctgcggccactacctcaccaacaccaacctcttccctaacttcttgctcgacaagctactgaagaagacttctgcgcgtcaaatatcaaaaaccgcttcacctgtggaacatttccggcaggcattgcaaaagggttgtgatgtgtcaattaaggagctagacacccttttgtcacttcttgccgagaagaaaagaaaaatggaacaagaagaagctgagagaaatatgcaaatattgttagacttcttgcattgcttacgcaagcaaaaagttgatgagttgaatgaggtacaaactgatctccagtttataaaagaggacattaatgctgtggagaaacatagaatggaattgtatcgtgcacggnacaggtactctgtaaattacggatgcttgatgactctggtggaagaaaatcatggcattcatcaatg

SEQ ID NO: 29638 - DNA, 771 bp, Glycine max
  Clone ID: TF_GmC57441_2
gccctcacccgaagaagatgtgtttcccctggttatatgtgctgaaactactagtaattccgtaatagatgcatctcctcacatgcaaattactcaagctgtcttagagaaaagcaatggtattggtcctttccaggtaaaagtagttaggcagattctgtggattgatgatattcgttatgagctgagagagttatatggaataggaagttcaacagtagcagattttgatgataatgatcctgggaaggagtgtgtaatatgcatgactgaacccaaggacactgctgtcttaccctgccgacatatgtgtatgtgcggtgattgtgccaaagctttgcggcttcaatcaaataaatgccctatatgtcgtcaaccaattgaggaactaatagagatcaagataaacaatggcaacgagtgacaggtttttgcctgatgcgaagctgaatttcatggtatttttattttgtctttgtaaattgcagtcaataatctgtttatagttcatatgtttgtgatcaaagagaaaaaagatcatatgtgcttttactattattgaatgctactctcgtgtcatcaatattgtacagattattattttttatttttctgtgtgagtgatatttaagataggatcatttgtaggtctgatttggttagccggaaaacattcattatgtatcttgaggctaaaggttcctctaatgaattatgtttgaaaattatatatgaaggttaaatttaatcacataaagttatagtgttaaa

SEQ ID NO: 29639 - DNA, 1619 bp, Glycine max
  Clone ID: TF_GmC342_3
ggctcgagaatatggttggctgcttactatttggcttaatggatatttatagcaagcttgtaaatgccggtgtaagaaccgtgttttcattttgtgacaggatgttgtgatccttgagcatcaatcatttctttctggaatagctgatgttcatgatcgacacggggatatgcgacttgatgttgataacatgtcttatgaggtaaaatctcatttctgcatctggatgcaaatattaatatatctatacaaccataatgtcagtttatcccttgcttgtctttcaagatagtacttcattttagagagttagtttctcatgtgaagtttgactataacaggagttgttggctctggaagagcgcattggaaatgtgagtactggattgagtgaagaaaccctatcgaaactcttgaaacagagaaagcactatccacagttagagcttcaagttcaagtagtgaaaatttaagtattcccggaaatgttgcttcttcatcacggactggatcaaatccagctaccaatccctcatctgccacaactttttctcgttctaatcctccacagcatccacggaggttatctgaatatgttcgtctcgtttttctcccagttctgatgctattggaagtccaagccataattattcttccttgcgctctggtctttctacatctgaaccaagggcgttatcatctgggagtggggcaaacccgagatcagcttcatggttggagaggcaaggtgatagtgaatttggaattccttattcactacgtactttggctgttgcaagtgaaggaggaagtagtagacttgtatctgagctccgcaatgttttgggccttatgcgtagaggtgggaatgtgcgatttgaggatgttgtgatccttgatcatcaatcatttctttctggaatagctgatgttcgtgatcggcacagggatatgcgacttgatgttgataacatgtcttatgaggagttgttggctctggaagagcgcattggaaatgtgagtactggattgagtgaggaaaccctattgaaacacttgaaacagagaaagcactcggctgaaaaagggcctcagattgatgcagaaccctgttgtgtttgtcaggaggattatggtgatgaggatgatattggaacgcttgattgtggccatgatttccatagcagctgtatcaaacagtggttaatgcataagaatctttgtcccatttgtaagacaacgggtttggcaacatgatgtatgtgacgaatctgtcctcaggcaaataccatgaccatgaaggaaaaaaaattggcgcaatttacccaggaaattctggtgtttgttgccttgttataccttgttttctatctgtagcctagtaaattgtcgtacctgactgacaaaggtttcccctacccttctctcccgaattattaactcaagtttacaaggtttggtttacgtttatgaaatttttttatattgctcggattggatttatgctgaacggaaaactaggtacaaaaaatattattcaaatataatcgtaggttctggatttgcgcgtttaaaatggttttatttgtttattattaaactaagctctcgtaattgct

SEQ ID NO: 29640 - DNA, 1483 bp, Glycine max
  Clone ID: TF_GmC23452_1
catccctcatcttctctgttctatagcaaaaaaacagtaatcataacttgatttagatctcaaaaatcttgatcatcaccatcattacctttagatctttctcccttttgctcactatcactctcagtctctcacctatccacccaacatgccttctagggtttccattctctgtgtcactgggacaatacaacagtcccaattctcaccctttcacaccaccattctctgattcaccctccaccctcatatccaccaaaaaagcatgcatctttggtgccactgcctcaaacccacttcagattctcctctgaaacccactgagggtgttgttggcggtgtctcttagtgttcattggtgttcactgttcaatttgggggttttaatctggaatctgaaattggatcaatttggagtttatttttggttgcaaaatgatttcttctgggattaacttggtgatgactgtgattgggttcgcggtgagcaccatgttcattgttttcgtctgcaccaggctcatatgtgcacgaattcacctgaatgctgcaaggagatcctttcctattgcctccagatccaatctcagcatgatggagcgtggttgccatggtcttgaacgcgtaactgtagccaaatttccaacaaagaagtacagtgacaagttttttgctgcagcagaaaattctcaatgcacagtctgcctctcagaataccaaggtgaggatatgctgcgtatcctcccctattgcggacactccttccatgtgacctgcatagacttatggctgcagcagaattccacttgtcctgtttgtcgaatatcgttgcgtgaatttcctgatagaaagcggttaatgcaacccctgttcagctctgctttgcaacctcactatgacatagaatcctttgacaatcgtcattatcactgtatgatagctgataatggattatcatcaagaacccctgacaaccatgcggtgaatcctatagaagaagatcattttccatccgagggtgatggagcagttgctatggacaatatcacctgtttaagtgagggtgacttcattaaagatgaagggaagaaacatgtagagagcccttcaaacttccggatttgattggtttcatggaagttgaagcctcaatatgatactttgaaatcacaaattgagtataaagttaatgttccaaaattggagtgaaaatgtgaaatgcattagcatgctgaaggatggttgatatcttttactgtatatatagctgagaacaccccccaccccccgaactgcactttactgtcttctcctttgttcttttcttgatcttcaatactagatagtatttgaaactctctctctctctctctcccttcctaattgtaattgttgtaagactagaattagttgaataccccttcaaaactttgtattaatgcaaatccgtacagtgcaattaatgtatcttgtttttttgtcc

SEQ ID NO: 29641 - DNA, 1077 bp, Glycine max
  Clone ID: TF_GmC170148_2
tgtaattgttgcatgtcaaagaaattggttgatcacatatgccgggaaaagggtttagaaacaaactgccccatctgctgtgattttttgttcacatccagtgaatctgtcagagctctcccttgtggacatttcatgcattctgcttgttttcaggcatacacatgtagccactacatctgtccaatttgtagcaaatctatgggagatatgtcggtttactttgacatgcttgatgctctactggcttctgaggaactcccagaagaatatcggaatcaatgtcaggatatactttgcaatgactgccatgagaagggtactgcaccatttcattggctataccacaagtgtgggttttgcggatcttacaacacaaggttaatttgaattgaactcgagtttcgattgctctaatatcaaacttgtgatgactctatctcaagtgcattttgtgtaaacaaaatatgtgcatgactctcttgatcagaacgaaaacaattaaccaactgatgagtaacaacaaagagctacaagcagcaaagcccaatgtgagtaacagcaaggagttgcaaacagcaaggcccaagaggcaaagccacactcctagtcatttgaaggattacgtattagttgcataatcattcacgtgcgcatgcaagttagtaacagctgcacttgtatcttcctcaagctttgggactaagaactattattaaggaatctaacttccctctattgcatcgttattatcctccggcttttctatacataccataatccttgaaaacacaacagctgagattgcacccaacattccggctctttaccacgctcactttgagattccaatgtcagggcctgtgatcaaccctattaatattatgctaaatgcatacacagtagcttttattcttgtgcattgcacatctgcagcaacaatagtgaatcaagaacttctttctttgacacaataagctctgaaaaaacgtctgacaaggccaacaccttctaccctccatttttaatagtcatcaatgatgaatattgcaaccctacggcacttaactatgctct

SEQ ID NO: 29642 - DNA, 1779 bp, Glycine max
  Clone ID: TF_GmC1361_1
ggtgtgtgaaattgagtgacttggttttgtagatgtctggtatcccaagtgggcgatcctacagcgatattctcttctctcctcctatgcgccttatctcatcccaagtggtcattctctttttctctatcactgctgcctgcaaacaaaagatatttatattgcattaaaaagatgaaaaaaaagggcaagagtgtgtggtccttttaagttgaacatgatggaatggctcccttcgcgtctttctcttttgggtatcacgccacacgtcttcccaaatcaggaaacactttctcatcttccctttcccagtctcacaccctaacctcatggaaggctctgtcaacgaacgtcttcattttgggaagatgggatatggatgcaatcattaccggagaagatgcaggattcgtgctccctgctgcaacgagatctactcatgccgtcactgtcataacgatgccgcgagcttgttgaagaatccctttgatcgccacgagctcgttcgccaagatgttaaacaagttgtttgttcattgtatgccatttatttgcctatttcggatacgggcacaatcagtatcgaagaaattgcagaattagagcaccatgttgccatgatctctacttatgatgtcattttcgtaccaagtcactgtgctgactgagcgacctgctttgttggggacgaacttgtctggccacgatgttcaacatgtggtctttttagtttgtgacactgagcaaccagttgctcaagtttgcacaaactgtggtgtcaaaatgggagaatatttctgcaagatctgcaaattcttcgatgatgatactgggaaaaaacagtttcattgtgatgattgtgggatttgtagacttggtggtcgtgagaattattcccactgcagtaagtgtgggtgttgctattcaactagtctgcgtgataatcatttgtgtgtggagaactccatgaggcatcattgtcccatttgttatgagtacctttttgactcattgaaagacattgctgttatgaaatgtggtcacacaatgcatagtgaatgttacctagagatgctaaagcgtgacaagtattgttgtcccatatgctccaagtcggtgatggacatgtctaaggcatggaagagaattgatgaagagattgaagcaactgtcatgcctgatgattatcggtacagaaaggtttggatactatgtaatgactgtaatgacacaactgaagtttacttccacattcttggacaaaaatgtggtcactgcagttcatataatactcgtgctatagctcctccagttctttctcaatgactagattcttgcggttttggagacagattttttagggcagaaaattaaaattatgactcaattatgcagagccttatttgattcatcatcaagattaatgatgtactgtgccctgaaacttttctagggttactcttcctccaccatttggagtaggactagtggtgttgttatgagccactaattgagttgatataaacatgtgtatattgtaatatagggtaatgtggtttagccatcatgagctgctagtaatcatgtttgctagtgacgtgttgatgttggaggttgcatggattggcttgtctttgccattattgaatttaatcaacacaacagactcaatgatttcttccctgcataaatcaatcatatgctattacctttatagtgattgaaaaaaaaaaaaaaattcctgcggctgcgaattcttccctcgtgccgaattcttgg

SEQ ID NO: 29643 - DNA, 1019 bp, Glycine max
  Clone ID: TF_GmC1701_1
cgacccacgacgtcacagcaagagggaaaataagcctggaaacgatggaagatgatgacccgcagcgattgaggtgaggaaccatgtttccccagaaccagagccagagtcggaggaggattccagttgttgttgcccaatctgcttgggaccattccttcaactttcctacctcgacaaatgttttcataagttttgcttcaattgcattttacgctggaccaaggtggttgctggcaagcaccgttctccaccttcttctgtaaaatgccccctctgtaagttttatcttatcaagagcgcacagatatagattacaatgctattacactgaacaaggtttcttagatgacatattcaatatatcgcaatattggagatctctaaagtacaatcagccaaactgttggcttgaaaattggttaagaagagaaattcaagctcttatccaggaggaggatgttgacatcattttgcaccatatccttgctgtggtcaaagcagcattatggactaggagagagcagaagtcacacatgaatgcacctgaaaagaaacaggaggagttcaagatgtcagtctctgaagccgcaaggccttttctggcagcaagaacggacagatttgtatatgagattcaactatttcttgcttcgggaatgaatattgaagcttatgatgctgcttacatacaacggttaggttggagctcacctggggtaaacactgaggtttctcatagtgaattggttgatcgctcaactgtgattccatacatgcacctatttgatggtgactttgatgaaaatgagtagattctttgttctgtttttctcatgtatttgctgtaattgctacccgaatgaattgtataggagaaatttgctcacacaccaatgagtgctattgattctttccagctactgcagaagttgcaaattctccacccaagggtgtaaagttgtttaacatatgtttgttatcaatatcatattatattggttaaataaaaaaataaa

SEQ ID NO: 29644 - DNA, 895 bp, Glycine max
  Clone ID: TF_GmC122884_1
tgttattgaattattaaatgctgctaaataatgacactggcaagtggcaataataatgggaatgaacaaaaccacaaaagaaacttgtaatatgtaacacgttcgttggttaagactctcaagtggtggttgaaacctagcaaatatggataataagcaatgtccaatgaaacacgcaacgctacagtttcatcttcttcttcaaagttcttctaatccaaatttagaaccacttcttcttgtcttctcgctgacaccgaccccaccacctcttctccacatagcagctcactgcaccggcacacggcgcacgtgacatgcttatcgagccacgtgtcaatgcagtgcgggtggaacacgtgcttgcagtacggaatcatcttcaccgcgtccccctctcgcagctcctccaggcatatcgcgcactccgcgcacccctccccgcagtgcgccaccaccggcaggcacttctttgcctccgccgccgctgccgcgccctcctcccagcggcggcggtaggatccggcggcggcggcgtcggaggcgaactggcggaagtagaggaagacgaagccgacgaagaagaaggtggtgaagaggatgaggaagacgtaggccacactcgatgaaaaaactggaggaatcgaaacctgcagtgggctttggaattggaaagccgaagattgcggcggcgaggatgatgatgcgttagtggcgtgtttggtgtgagtgtgagagagaggtggcatcgagaggggaacgtcctcgttctgtagtagcaatctgcggttccagaattccatgtttttaattctctgctaccaaacactgccttatactctaatgtgtttgttgtgataactgagaagagaataataaattaaagttgcagtgt

SEQ ID NO: 29645 - DNA, 1396 bp, Glycine max
  Clone ID: TF_GmC938_1
cccggctgcgagaagggaaaccagattaggggaaagaaagaaggaaagcaaagtagacgagtgattgcgttgcgattgacgacgacgaggaatcatgtcttccggcggcggcggtggtaagccgttcttctgccacgtgtgcagtcagaggattacgtgctccgatgagtcggaaccattctgcccgatgtgtatggaaagtttcgtagaagaatgcaaccctaacaatcccaaccctaatctcttccccgacagtgatgaatcttcggatcccgaactccccttccaccgcttctcacttctccctctcttgctctcatcagtctctaggtcccgatccgaacccgacgtgttcgacccgatggtcttcctccagaaccaccttcaggaccttcgcgccgacggtgccaacattcaagttgactttgaccatccttccaacgagaatcaaggctttcgccttgcgaacatcggcgactactttatgggccccggcctcgagcagtttattcagcagcttgccgacaacgaccccaaccgctacggaacgccgcccgccgccaaggacgccgtcgagaatctccccaccgttaccgtcgacgacgacttgctgaactccgagctgaaccagtgcgctgtctgccaggacgagttcgaaaagggttctaaggtgacacagatgccctgcaagcacgcgtatcacggcgactgcttgattccgtggcttcggctgcataattcatgccctgtgtgccgctatgaattgcccacggacgacgccgattacgagaacgaggtttcacggtggtgatgctgggtcgaggacaggtgggagcgacggtggaggtgggagtaatagaccttttcgcaggactgttaggatatatttgcgccatcctgatgctggtgactctgcgcaggacggtgctgaaagggaatggagatggagaagttgagattgaaatttatgttttgtttcatgttgaaaaactggaaactatcttgtgcagctctgagcttccgtgaatagattgtagcattgcaatgtttacagaagtccttgtgaggaatgcaagaaatgttatttcccgtggcaaggaactttgttcgatcaaaggtctttgtttgttatggtagtagatagctggaacatgggaatgcacgaaaacacaactattgagattttaggtactgtgttaatgagcgttgataagaaacttcccgttacttttgtacagatcatcttccaaacatccaatattgattatcgtccttttgtacaatatgaactagtcatggtctatattgctcctgtgtgtgtgtataaaacgttttaatttagaaaaatgttcttttgacctatttagaaaaggtttaatgttacttttgattcatt

SEQ ID NO: 29646 - DNA, 1296 bp, Glycine max
  Clone ID: TF_GmC10535_2
cgagaataaaacaaacaaaaaatattcaaagatacagagaaccataaccaaagcccgatgagccaccttcctgaaacccaattcctcaatagtttctcacccttctcttctcttcatctactctttccaaaagaattgatgtataaagtctggtggcctctgatgtgatccccttttgatgtcaaataccagaagagaatgaaactatgattgattgatttgattaagtaaaaagaattagtggaaaatgggaggttgctgttgttctgccagaaaacctcatctgcaaggggcaccagtgtattactattgcccaccaacttttgaagagcgtgagtctttaacatctaatgatggcttgaatgcttcagtcaatgctggatttcttattggtttgaacctggaagcatccatgcctgatactttccagccccctcctgtgcctctaccttatgatatggtcttgggaggttctgcatcaacagattctgaatctggcagagaaacagttagtagttttgaaacttcaattacacgtgaagatgttgaagaatcagattgtaaagctcaagccaattctgctcttacatcgccaaagaaggcacaactaccaaaatcaaatgtaactcaagaattagtgacagaagaagaggatgtctgtccaatttgtcttgaagaatttgatgttgaaaatcctagaaatttgacaaaatgtgaacaccattttcacttatcatgcattcttgagtagctggaaagaagtgactcatgtcctatatgtgatcaggagatgatattttgaccagacaatgaattagtttgattgttctaaaatcaagcttgtaaaatgaatggaagatagatgaagatcattttatgataattggttagatgatggtagctacagattcattttcaattcgtggtgcattgacaaagtcatcattttagtaggcccaacctttggtcacgaggttttgacggaatgccataccatatgatatagcatatctgttcaaatgcaattcctttggtcagaatttgcccgttattattagtggaaaaaatgcggcaattctgtagatgccaacatttattttcacagatgcttttctatttatttactgctctccattctcttttgtaaaaaaattctcaatatttatttgtcatgcctgatttacattttcattgtatatatatacactagtggatttttggggttcagtgtttttgcaataagtacttaattatcaagtatacaataagacccttttcctattaaattttattcct

SEQ ID NO: 29647 - DNA, 1607 bp, Glycine max
  unsure (1)..(1607): unsure at all n locations
  Clone ID: TF_GmC260_1
aagggccaatcgctagtgcanttcgantgncnnnctncntnnnttnnttnnnnggnnaccnncccnnnntnatatatcctccccctaaagcttcaacctttgggacgccctactttttttcttctatcttcattgatcatcacttctctttcttcattttccttttcggtgggaattaggataaccctcctcaatttttcaactctaaatttgatcatcaccttcacccactttactcttactaggaggaacccttctctctgtgtgtgtgttctgagttgattctgtgcttcagctttccacaaagtaaagtagaaagatggcaatgattccttaccacctttgccgtttaccttaccaggattccctcaaagcacttgaggctgatatacagcacgccaatgctttggctgctgcaattcccagagccaagggtgagactcttcttcaaatgaaattggtttacaatcacttggctcctctcttcctgttatttctacaatggatggattgttcttgtgcaggctttctccataggtatctcgacctcttccacatacttatttacaaggtacataatgatggtagatcaatcatgcctactcatggaaggaaggctaccattggggacttttatgctgttatattaccatctctccaacggcttcatggtagtttggagaagttggaggttgttaaagaagaaggccagtcaagcatagaaggtccaagttatggcaagaaggtcattgaagaaggtgtgaaactaaccgccaatgttgatttgcaaagagaagatgaatgtgggatttgcttagagccttgcaccaaaatggttttacctggttgctgccatgccatgtgtattaaatgctaccgcaagtggaacagaaagtcagagtcttgtcctttttgccgtggtagcttgaggagagttaattcggaggatctatgggtattaacttgtaatgatgatgttgttgatgctgaaacagtttctaaagaggacttgttgcgtttttatctctatgtcagcaagctgcctaaagatcacccagatgcacttttcctaatgtattatgaatacctcatttaattttctactaaataagaagaagaaaaaaaaaatgtacagataggaaattccggactgcaaatgtgaatagagtctggtacaaaaagaaaatactctggtaatttaatcacagttgttatggtaagagaaatttctggttttttagtccagaaaaaccattcttcttactcccgtgatatatctccattgtagacattgttcttgcaattaacttggaattccttgcataaaggatccattaagtttattaaatgctaccgcaagtggctacctttatatcaacagcttacctaaagatccccctgatgccctttttttaatgtattatgaatacctgatttgatgttatttttactaaataaggagagagagaaattgtccagatagggaaatccggcctgcaattgtgaatagagtctggtaaaaaatatttttaatttgtaaggcccagctctgctaaaataaatttttgttattctagcccagaataacccccctcttgccttgttat

SEQ ID NO: 29648 - DNA, 453 bp, Glycine max
  Clone ID: TF_LIB3242-254-Q1-J1-B6
ggctcgagccgtttcggttcgagcacttgttccacccttctccaattctcttatctgtattcaggcactcttcaaagaacactttgtgagtcaaaagagacatggccttagaccagtattttgaggaggctatgccccagttggattccttcgaagataaatcgtttctcgaaacatggaaatgtgacagtgacgatatcgcagattctgatagaaatgcctctggtgtctttgattgcaacatctgcctggagtgtgtgcaagatccagtggttactctttgtggccatctctactgctggccctgtatttacaaatggcttaatttcctaagtgcctcttgtgaaaatgaagagaagcaacaatgtccagtatgcaaatcagaaatttcacagtcatcccttgttcccctatcccggccgcggccaaactgagttaccttctaaaggcaaa

SEQ ID NO: 29649 - DNA, 1800 bp, Glycine max
  unsure (1)..(1800): unsure at all n locations
  Clone ID: TF_GmC631_1
cacgcgtccgctcccctctgtctctgatgcggtggggagtggggacagggagggtttgatggatttctagcattcaacccttccttttctccttgcctctgtcctgacccgttcttttcttctccatgcattcccagaaagttgtagagatggaagacaagacagaaagtcatatgagttcagctgcggcctttgttgaaggggggattcaagaatcctgtgatgatgcttgcagcatatgccttgaggagtttggtgcaagtgatccttcgacggtcactacctgcaagcatgagtttcatctgcagtgcattctcgaatggtgtcagagaagctcccagtgtcctatgtgttggcaacctattagcttgaaggatcctactagtcaggaattgtttgaggtagtagagcaggagagaagcttgagggctaccccatcaagaaatgctgctatttttcatcaccctgcctttggagattttgagttgcagcatttacgcatgagtctaaatgatgctgattttgaagagagaattattcaacatttagctgctgctgcagcaatgaggagagctaaccaacttggttggagggaagggcagcgagctcgttcatcagctcatggtcatccacaattcttagtgttctctaatcagcctattgcaccttcatcagttgctggaggagaaaatgacccaactgcaattcctaatagaagtccatctaccccaataacatccgttggaaatgaagcatcgcagcagatcctgcaccttcaaactcaaagttcttcttcagcttctggatctcctgtcatggctacaaatcctcgaggaatttactctaatgaaagaggctctactgcttgttcttcaccagcaaaccaagatagagcagagccatcagagttgcagtcattttctgattctctgcgatccagacttaatgcagtgtccatgagatacaaagagtcaatctcaaaaggcacaaggggatggaaggagaggctgttctctcgtagttcttccatgtcaaaacttggttcagaataaaggaggagagagataaattctggaattgctagtgtatcccgattgatggaatcccttgaaactagtgaaaataatagagttgtgggtacttctttgtcaaatcatacggagggttgttccataggaggggtgagcaaccagaacaatgttgaagctagaggggagaactcttcacatgatgacaatactccagctgcttgttctgctaactcacatttaaattgagctcttttttggtttccgttaatgcatctctcctcagcatctcatatttggaggtaactttctcacgacatgacatggtgaggagcagatgctttggaaatagtcgtgtggcatttacgtcgtggtttgcaataaagattaagatctgaaaaacagctgtgcttatagctaaaaagttaatgtttctatgtatataaattatgcctggaacagtgaagagttgtgcgtgtctgggtgaacggatttttaaactggcatgtactctggacatcaatctatccatgggagaaaaatgctatgaaattcaacagaacttatgccacagttgtgcttatagctaaaaagttaacgtttctatgtatatatattatgtgcatggaacagtgaagagttgtacgtatctaaagtgtctgggtgaacggatttataaactggcatgtactctggacatcaatctatccgtgggggaaaaatgctatcaattgcgaaggatcttgtgtccgtgacccnnnnnnnncccccc

SEQ ID NO: 29650 - DNA, 668 bp, Glycine max
  unsure (1)..(668): unsure at all n locations
  Clone ID: TF_GmC67144_2
gacaaacaagtgtagaagaagtttttcattatagctccttttgtacttaaaatgaaattgtatcattttacggctgcgagaagacgacagaaggggatgaatgctaggaggcactactactgcacagattaatcatgagtcttccacaaactgcaactagccctcctccacatctgtatccacaggaacttcagcttaagctttaccaagccttcatattctcaattccaatactcttctccatcattctcttcctcttgttttacttgttctaccttaagagaagggcttcctctctatcttcctcttctcacttgcttccaaggaccattgccaatccaccaaccaccactccgtatcattcctcaccttgtcgtttggatctgaccctccaattcctggataaacttccaagaattttatttgatgaggatttgctgacaagggattcactatgttgtgtttgtctgggggaatttgagctgaaggaagaggtgctacagataccctattgcaagcacgtgttccacttcgaatgcatacatcgctggctgcaatcaaactccacttgtccactttgtagatgttccatcatccncactaccaagttcctcaacccagcaccccctattaatattatatcatcagacccaccccagcatggtgct

SEQ ID NO: 29651 - DNA, 1664 bp, Glycine max
  unsure (1)..(1664): unsure at all n locations
  Clone ID: TF_GmC871_1
ggccggaaggtgttttgagccccactcaaagtatgtgccttctaacttttaagtgtggcgtatgcttttggtgtancatcttttatccattcgctatttgctgcgggatagtcgttactaataatgctttttgctctagcagctttaaccattttctattttgaaagagtctcaattggtgcttatgaactaatgttgctgttcggaatgatgccgttgaactattgaagtcggtgcgggcccgagcttcttcccacttcctccgccgccaccgccaccattcttaacaccgatggcggatccgaaagcctactcaatagtagtgcttcttcacttcttccctcctccgccaccgccaccacaactaccaccacggatggcggcgacggcgacggcggaagcgaaaacctactggtgccacgagtgcgacatgagcgtgtccctgactctcccaccctcccctctcctctgccctcactgccacacccacttccttgaactcatggactccccaagcctctcccaagaaaacgacgccgaatcatccctcttcgatgtcgtttttcaagacgcactcttactcctcaaccctaaccctaaccctaaccctaagccacttccctccaaaccccttcccctcccctccctctacgtcaccccctccctcctctcctccctcgaccccaacggcgtcgttctctgcgccgtctgcaaagaccaaattaccctcaacgcccaagccaaacaattgccctgccaacacctctaccactccgattgcatcacgccgtggatagaactcaactcgtcgtgtccgctatgcaggtttcggttggaggaagaagaggaggaaggtggtgacgccgacgctgacgccgacgccgttatgacggagatcaggagggagatcattgcgaggctgacggagctgacggaggaggatttctacgggctcaggaccacgctcagccacattgcctcgcgccacgcgctcatcgaagagaaccagaatcatcgcgcgcagattggcgagcctcgcggcggcggcggtggaggtggcggcgattcggcttgctgataacgacgtttacaataaggtatatagtttattaaataatgttgaagttgtatcaccatagatcgtcttatcaagtgtaaatctgcaccgacgattatgctgcttttgttcttttccctccttttttgggaatctccaactagctagttgtagtgctatagccaaaaatacaataaatttgatggagtgcacgagtaatgtgcatttctcctccatcttccactctctctatgttggtcacttggtcttggaactggatttccttacccaaatttcccttccaatttaggcaataaaatcttgtgtaaaacttggctttcttttgtgctgtgtctgaattgtccaagtggatgatggatccttcccactgaatcattttgttcacaattttgttttttgttatggatttacagtagatgatattttttcctgccaatattgctgtagttatggtatgagattgttgagggattgaatcatttgagtgtggatgtgtactattgaatagccttaaaatgcatattttgttgtggtgtgtaagttttgttctgatctttactcatgtaatgaatgcagctggttaatt

SEQ ID NO: 29652 - DNA, 1218 bp, Glycine max
  Clone ID: TF_GmC292_1
ggctcgaggatcaaggtgaagtgctatgctacatggtgcggctggcgattcagcggttccgttccctcttcagacaccaccactgaggagtttctcaatgagaaccaagttgaccaccccgtgtggctcattgccactgtggggttgcaagaatcgatcatcaactccatcacggtttgcaagtacaagaagaatgaagggttggttgaaggaaccgagtgttcggtgtgtttgaacgagtttcaagaagaggagacattacgactcttgccaaagtgcaaccatgcttttcacgttccttgtattgacacttggttgagatcacacacaaattgccctctttgtcgtgccggtattgtttctaatagtgtcaattctgaagcaccagcacccgtgtcgaattcggagcaagaaaatgcaaatttggggaggaatcaagatacccttttggacaattcacggattaatgaaggtgggttaagcagcaacatggttgctggggaatcaagtgaagcaatagatgaatcaaattctaaggatcgggtaaatgatgaaactcagaacaatggggttctgatgaatattgagattcaaacagagatggggtctgtttcaactacagaatgtgaaagtcatcgtgttgttgatgatcataaacatgatgatgacacaatgttgcacacggataatctagggaagcaagatcaagatggtgattactactactcaaaaacgtgtaaaacagtgcgtcgttcctctattgaagagtgtttgcatttaagcccagtatctatgaaaaggtcattctcctcttgcaatggaaggactctaacttcgagaggttacatgagtctaaactctaaactcaattcatccctactagagttctcattttatgaaagatgaacatattgatgagtaacatgatgatttgatgtccattttactctcagaattttgagggcaccctaggttggagtttgaacattgacaatggtataaacagcaaattgtgaaagagaaaagaggtcaattttaatgaagaataaaatgtaaaattgtaattgaagttttaccaagtgctcgggcattgaaaataactctggtgtatcatgtatgcaattgtatcacacatcacaatgcccagtgttgcactgcagaacaggtttgctcccacaaaagggaataaggtacattaaatgctctattttttgcttc

SEQ ID NO: 29653 - DNA, 577 bp, Glycine max
  Clone ID: TF_LIB4164-019-Q1-K1-G8
ttccggtccggaattccggtcgacccacgcgtccgtttatttggtaacctgactttcagaactagttttttacagtgatgaatttatatatgtattcctgcgtagactgttgttgacaggtacgctttggtttacttgtttggcagaatttgtgtgcaatatgtttagatcctctgagtcacaaaagcaaaggcagcaaagctatattcactgctcagtgctctcatgcattccactttgcttgtatctcctccaatgttcgccatggtaatgtcacttgcccgatttgccgtgcccaatggacccagctccctcgcaacctgaacagtggttcaactatttctactaaccgaagtgatcccatcctgcaaattcttgatgattctatagctaccttccgagtacatcgccgcactcttttgcgctccacccgctatgatgatgatgaccctgttgagcctgatgatgcacctgagatacacaagctgcgtttctctcttgcacctattccaccaaaggcacctactagccatctatcccctcatcccttatcctgcgggtcctcatcactgttaca

SEQ ID NO: 29654 - DNA, 1471 bp, Glycine max
  Clone ID: TF_GmC1275_1
ctcgagccgattcggctaaagaacatctcttgctcttcccactttctctctctaaagaatataatactcaaaattcatccatttttattttatttttcttaaaaaacaaagcgcgtatagtctcacgcgcccgacgatgggttttcccgtagggtacccggagctgctggttccgaaaatgttcctccacgcgctctccctcctcgcgtggctgcgctccctcgtcttcgccctcttccgcctcctccgcatctccgacctcctcgacaccgattccgccgcctctgacctccctccgccgcctccgccacgcgagccgactctctccgccctcctcatccgcgagttcctccccgtggcggcgttccgcgacctggcagccgccgacggggatcctccgccgtcgggctgcgccgtgtgcctgagcgaattctcctcggaagaagaaatccggtgtatggcgaactgcaagcacattttccaccggtggtgcgtggaccgttgggtcgatcacgatcagaagacgtgtccgctctgcagaactccgtttgtgccgcatcacaagctcgaagaatacaatcagcgactgtgggcagcttctggagtttcacagttttactaccaagacgattacacggcttctctctgattttttttttctctttctttttccacttatatatttataattatatagcactatatctttttttcatattattattatggtgggggacttgacagctagtgtagcgaaatgtatatagctaattaaaacaaaaacattgtatcaataaaaaaaatcagaattttttggattggtatatacttttttccaacttttacttctatcattctgtgtactacgtacaaattttcattatgtttttaggtttcataaaatgaaattgtgtcagtttttaacgtggaagtaggttggagtcaatcgatccatacttgcaatgatggttttttataacaattatgtatataattgataattaataaataatataaatgtgatattttttttattaattatgtatctaattgatatgaaatatgatattttttatattgattattcatttaattaatataaaaaaacaatgcacataaattcatatgtcttgaatcctattttgaaaaaagaatatattttaattttatgagaataaaaaatatactaaaatttttacactaataaattttaaatatttttatatttaagaaaaggaaaaacaaattttagttatttaataataaggtggatttggattaagtgtttttaatttgtattgttatgatatgtgatggcaatattcttgttatgttgctagtgatattgggtcttcctaaaccggggcatagaaattagagttattcttttttactagtaatatttatagtgtgaaatagtagtattattttaacgatgcttgttaacttgaaaaattaatgtgtggttgtt

SEQ ID NO: 29655 - DNA, 1328 bp, Glycine max
  Clone ID: TF_GmC1703_1
actcaccaactcaacatcatgtcaaataccaatgaaagcaactactggcgcattttcttcttcgtcttcgtctcctctttctcaatttcgatttctcaattctcaattctcaatctcaaggtgaaatgatgcactcagtggcaataattacttttggatgctggagataaggcgtgatgggcggttgctgttgttgttgttcttctaaggagactgtgttgagcgctccacctgcgtactactattatccaagagcatcagaagagcatgttcctctatcttctcacccgggtgctgcttctgctttctctgggcggctattggttgatactaatctagatacttcatctcctgatacttatagacctcctcctgctcctatccctttcaatgttaccttaggtaccactcaaactccacctgcggctcaagaaattcgtagtgacaagaataatacttccttgccttctacaaattctaatgcaattcaagaaccagttgctagagacattcatgggacctcagctaagttggaagagccgaaggaatccgagtgcaaagttcagactgatctggagctagattctgcaaagggttccgaaattgaacttgctaagtcggggaaacctatagatttagtggaagaggaagatgcatgcccaatctgtttagaagaatatgatgcagagaatccaaaactcgcaacaaattgtgaccatcattttcaccttgcatgcattctggaatggatggaaagaagtgaaacttgccctgtgtgcgatcaggatttggttttcgaccctcccattgaataatacatcaacataggagttcaaatatactgtgtagtgtttgagaagcgaggttacaaagtcatgagtttaatatgatagcaacccgaacttatggctgtattttgattgtttcgttttctgagttttctgggtttattccattttttactcagagtccctgcgttgcagcatacaggaaattaaaggaaatattctctgtttataatttcatcatttagaatgtttttaagtgatagccggatactacatgcgaaaacagcggtcgatatgatttctcttgtggattgtaagacttttgttacattgtcaaagaatggtaggatgttctcactctggttgtactgctttcatgggaataggagtaattcttgtttgagttattactttcaataacttttttgtatatattaaatttcaataatttaacagttgcatattttgatattatctcaagatttcatgcacagaaaaattgagataaattgaacatttgtagttaaaaaaaaaagaaaa

SEQ ID NO: 29656 - DNA, 1315 bp, Glycine max
  Clone ID: TF_GmC1703_3
ggctaccaacgaaagcaactactcacgcagtttcttcttcttcttcttctcctgcgcttcgtctcaatctcaagcgtcaattctccatcgccaatcctctctttctgctgatttcggactcgtcacttacttgtgaaatgatgctctcagcggcaataattacttttggacgctggacataaggcgtgatgggcggttgctgttgttgttgttgttctgctaaggagactgtgttgagcgctccacctgcgtactattattatccaagagcatcagaagagcatgttcctctatcatctcaccagggtgctgcttctgctttctctgggcggctcttggttgatactaatctagatacttcatctcctgatacttatagacctccccctgctcctatccctttcaatgttaccttgggtaccactcaaactccacctgcggctcaagaaattcgtagtgacaagaataatacttccttgcattctacaaattctaatgcaattcaagaaccagttgctggagacaatcatgggacctcggctaagttggaagagctgaaggaatcagactgcaaagttcagaccgatctagagctagattctgcaaagggttccgaaattgaacttgcaaagtcggggaaacctatagatgtagtagaagaggaagatacatgcccaatctgtttagaagaatatgatgcagagaatccaaaactcgcaacaaattgtgaccatcattttcaccttgcgtgcattctggaatggatggaaagaagtgagacttgccctgtgtgcgatcaggatttggttttcgaccctcccattgaataagacatcaacgtgggagttcaaatatactgcgtagtgtttgagaagcaaggttacaaagtcatgagtttgatatgatagcaacccgagcttatggctgtattttgattgtttcgttttccgagttttctgggtttattccattttttactcagtcccctgcgttgcagcatacaggaaattaaaggaaatattctctgtttatagttttatcaattagaatgttttaaagtgatagctggatactacaagcgaaaacagctggcgatatgatttttcgaatagattgtaagacttttgttacattgtcaaagaatggtaggatgttctcactctggtggtactgctttcatcttatatatatgtatagggtgggaataggagcaattcttgtttgagttattactttcaataacttttttgtatatattaaatttcaataatctagtagttgcatattttgatattatctctatttcatgcacacc

SEQ ID NO: 29657 - DNA, 1577 bp, Glycine max
  unsure (1)..(1577): unsure at all n locations
  Clone ID: TF_GmC1254_1
ggctcgagtttggagaaaagtagtaatcctatctttaccccatcaaacaattgtcttctcaaaagaaaaatccagattctctgcattccacataacttgttagttcctttgcttccaagaccagtttcggattattgttcactcatctcattctcttgttaatttctctacacatattctctctctcaagtctaaaccatgcctgttgtgacagaacacatgaaatggagaagaccaagaaaccaatttaggaaccccatttcagaaaccgatgatccaatcactcaaatcccttccataatccaatcctctcacagcaaatccaccatctcctctctcttgtcttctttctccacctccggtgaaaccacacatgccagagaccaaaacagaaccaacaacaacaacaaaagcaacagaaaattctctgcagcaaccttcaggggcttcggctgcactgccggttcatcgcagaaggtgtcggtgccggcggtgattcgctcctcagcagattgggaagggaagaggaacagaaagaagaatcacagaaggaagagtaacagtaacggtaacagtggctacaacacatgtgatgatgatgataaaacttgatgtggtggaggactgggtaacactcagggagcgttcatcttattttggaaggcgcactgtaaagccagaaagcttctcctttctggaagatgaacctgacatttttgcagcacgccctggattagagccttttggaactgctagattctatcgccatgttccacatccttcccctgatggtcttgctgacataatgatacttcaaggaagaataatgatgggggacagatttgaagcacgccaccaatttagagcctttgactagaggttgataacatcgccatgttccacatccttcctgtgatggtcttgctgatataatgataattcgaggaagaataatgatggggggacgatttaattcacacgaccaatttagagactggagacttgatgttgataacatgtcatacgagcaattgcttgaactgggtgagagaatcggttatgtcaacactgggctcaaagaagatgagatgggactcaacataaggaaagttaagccttcaagttcaaatgatacatcaaagcatcaactagacaaaaagtgcagtgtttgtcaggaggagtatgaatcagatgatgagctggggagattgaagtgtgaccacagctatcattttcagtgtataaaacattggcttgagcataaaaatttctgcccagtttgtaagcaagaagttgtggttcgacactaagtggcactatcctcatgttttttacccttaaattggtgtatagttttttcttatgcaatataagcaatattcattactttacatatttttaaacttttggcttccttaaggaggagtcggcaatattatacttgtaagttttatattatggtctcgttattggacaatgattttgcatattatacgcaaggttttgaaactatcttgatccaaatctaccatacgttntttgatggggacccagcaacctaccttttgatgcttgct

SEQ ID NO: 29658 - DNA, 1928 bp, Glycine max
  Clone ID: TF_GmC1038_2
agttcgggtggagagagaagttcaattttcctaactgaaattgtgacaaaattatagacatttcgttagtatttttctacttgtttattggagaaaatgaaccgttaaataagacccactaattacattatcaaaataacaaaaaatgagaaagatcctttaccaatttgaaggataatactaaacaagtagtattattatcgattttattgtaccttccaaacaaaccctgcagcgatttgtttccttccatctccgccgtaccatgtcggaagcaccaccgcctccaactgccgatgcgtcaccgcctccgtactggtgctaccactgcgagaagcgcgtctccgtcgaaacgctcgcgaatctccccgacgtcgtctgcggcgagtgcaagaacggctttgtggaatccatgcccacgccgtcgcgctctcgctccccctccgcctcctccgacgacccctacttcggctcgcagttcctccaggtccttcgcctaatcgctcagtcggcgcgtgacgacgacgcgtcgcctccgccgccgccgagccgctctccggagaacgatttcctcaggatcgagctcggcggctgggacaacgacgaggagaacgaaaacgacgacgataacggcgacgaggagttcgaggaacacgaggaggcggaggatcgctccggcaacgaagatccgcacggaggagacgacgaggatctgagaagaaggaggcgcgagctacttcggcttcggattagggatttggcgactcgtacgaggagcatgcggaaccggatcttggattgggccgagattctgatgggcctcgaggacaattccatcgagttccgcctccagctgccagaatccgaccgctacgtcggaaatcccgaggattacgtcgacgcggcagagtacgaggcgctgctgcagacgctggcggagagcgacgggggaggcaggaggggagcgccgccggcgtcgaaggccgcgctggaagccttgccgacggtgaaaattgcgtcggaaagcgaagccgtggcgtgcgctatatgtaaagatttgctcggtgttggagacgcggcgaagaggttgccgtgcgggcatcggtatcatggagattgcattgttccttggttgagttctcgaaattcttgccctgtttgcaggtttgagctaccaacggatgataaggaatacgaggaagagagagtggttatcgctgcttcttcgaattcgaacggagcttcgagttccggtggaggtggaagtgccattgtttgattccgcttggtatgttccgtcatgctctgctctgctctgttctgttctgccatttgtgtaatatatttcgtggtttctgaatttctctttcttttttttttggtattagtggatttaaatcaaagcttgcgccatgttattatttattttatttgaagcttttattatgtagttggcttcttagctctcggatgatgctaagatacttgtatatagcatttgaatcaatgtgaatgtgatcatatcacactatctcaatggaatttacactttctccctgtgattaatttatttgaagcttttattatgtagttggcttcttagctttcagatgatgctaagaaacttgtatatagcatttgaatcaatgtgaatgtgatcatatcacattacttgaatggaatttgatggattaagctaattatgtcattgttgctactttggcatcatgcctaattggtttacttgatgcatgctcttcttttttcaggctgtgtcctttgtgtaataaattggaaagattgttgtttcttttatggtgtgtttggtagagaggagagaaataatattggagagaaaatttgtatttttttatattcatcctcagatatattacaagtgattctaatagtactcttttatttaaaaa

SEQ ID NO: 29659 - DNA, 2461 bp, Glycine max
  Clone ID: TF_GmC1008_1
cgaagctcggaattcggctcgagctttcttccccccttttttctctgcgccagcaaaaatggatgattctggaagtaaaactaaactgttgaatccatggatgctccacttccagaaactcgctctcgaactcaagtgccctctctgtttgagtttgttcaagaggccggtgttacttccatgcaaccacttgttctgcaattcatgtttggctgattgcataacggctgggcctggatgtgctgtttgtaaggcaacgtatgctcaaacagatgttaggcatgtgccttttgtggaaaacgtggtggcaatatatagaagcttggatgccactttttgtgctagtttgtttcagccatgttcttctggtgatgggagggttttggagccgtgccaagcaattcttaattcaacttctagtagtttaaaagctgccaagcttcctcggaatttaactaattcaatgaggttggggttggcaagaatttcaaatccaagagtgtggtgcatgacaaagcagaggagtttgagttgtctcgtgagagagggaagcccaatccaatgcaatcttcccatatgggacttgggggccgagaacagtgtggagttatggaaatggatgtgaatcaagtaacacaatcagcacctgatagcccgcccttttgtgataccaaaggttcagataatgactgcagtgatcaagatagtgagcatccattacctcctggcagattggaaaattcttcactaaacagagcaagcacaggaaatggaaatttgaaagaaagaatgggacagcttaggtctgaaagttcggcctctgaaactgagggtctggcaagggatctcaagagacagaagaatctggactttaaacctggaaaggaccctggtgcaccattgcccacaaatgcttcaattgacttgtgtccaattggaaggatctgctcattttgccaatcctctaaaatctcagaggttactggaccaatgctgcattatgcaaatgggaacttagttaccggagatgcagcaatgaaaccaaatgtcatacctgtgcatagaatttgcattgactgggcaccacaagtgtactttgttggtgaagttgttaagaatttgaaggcagaggtggcaaggggagcaaaacttaaatgcagtaaatgtaatctaaagggagctgctcttggttgctatgtcaaatcctgtagaagaacgtatcatgttccttgtgcaatggacatctcagattgccgttgggatcatgaggattttctcttgctctgtcctgtccattcaaatgtcaaatttccatgtgagaaaatcaggtccaagaaaaaggcaacacagaagcatcccactttttctcatctgccatctcatcactcaaatcgtcttgaagcttcccaggatgctagtaaaaaattggtattttgtggatctgctctatcaaatgaagaaaaggtatttttgatcaattatgcaagcaaggttggtgctactgtgaccaagttctggacctcaaatgtcacccatgtaattgcagcaactgatgcacatggagcatgctccaggacgttgaaagttctgatggcaattctaaatggacgatgggttctaaaaatggattggataaaagcatgcatgcaagagataaatcctgtagaggaagaaccgtatgaaattaatcttgacaatcaagggtgtcaaggtggcccaaaagctggcagacttagggcattggccaatgagcccaagctattcagtggcttaaagttttatttttctggagattacgtgtcaacttataaggaagatcttgaagaattaattgaagtggggggaggtactgttttgagaatcaaggaagaattggaagcacacagacatgaatgcaaaggggattcttcaaagttgctagttgtttacaaccttgatcccccacaaggatgcaagttgggggaggaagtttcaattctttggcaaaggctaaacgacgcagaggatttagctgcgaacactttacaagtcattggtcacacatggattcttgaatcaatcgctgcatgtaaattgcagccttttgtttactaaaatgcattaggtagctgatattttgtcgatcacttgatagggcgttctctgcaaaagttgatcaatcgtgtacaggatttagcttgaatttatttgaagtcttgttcgagtcactggatgttagggtgtaatgcttatgtaacattaagtagttatttacttagttttgtctgctcttgcctcgtcttaatgacttcacgctgaatgtacttatgttttaaaattaaccggatcctcagagttgagattgaccatgatgcctcgtacatgctaaggcaaattctaccacgcaacaagctagatgaggtgcatcggtgtactaaactatttatcattaattaaatgagtaatgctatgttttcgtatt

SEQ ID NO: 29660 - DNA, 757 bp, Glycine max
  Clone ID: TF_GmC25542_5
ctcgagccgctcgagccgattcggctcgagattattttcattgtatgaaatgcaatgggtgcctggggataaaatgggcatctcacaagtgcctggagaaaggtttagaaatgaactgcccaatttgctgcgacgacttgttcacatcaagtgcaacagtgagagctttaccttgtgggcattacatgcattcatcttgctttcaggcatacacttgtagccactacacatgtccaatctgcagcaaatcactgggagatatggcggtgtgcttgagagagggagttcctttgggaaccattttgttgggagctcacttctactcttgggggctcacttagctgtttctttacctatccagggttactttggtatgcttgatgccctattggctgctgaggagcttcctgaagagtacaaggaccgctgtcaggacatactctgccatgactgtaatcggaagggcacttcacgcttccactggttgtatcacaaatgtggattttgtggctcttacaatacccgggttatcaagtgtgagacgtcaaactccagctgctcttagtgtgcttcttttgtcgggaggtagacagagtttgtaaatacttgtatagcaaattaggaatccaaatttttccatgaataggagcccccttatcttttcgtcttatacttgaacagatgctcctaatcagtcttatagcaattatgtacagatcaactttctattaatgcaacatatattgttgcagctcct

SEQ ID NO: 29661 - DNA, 2568 bp, Glycine max
  Clone ID: TF_GmC1166_1
aaaacgcgtgggtacacataactttttataaaataaatatatataatatagaggtgtctatatatatactatgacttatactatagcctgacgcgtccgcgacaaatgggctcctccttctctcttcatcttcacctctctctctctctctctctctctctctctctctctgtgtgccttttcctttgcctgtgcgtgtgaaagatcgcagcaactccaccaccatcacaacaggaccgtaaccgatttccaaggttgagttatttgctggtctaacttaaccatactgtctattttgactcctgagattgctagtgagtcatggggcatagacatttatatagctcatctccaatatttgagggtgaacctgaccagaactggaatcatatgcatatggatcaacaatatgtgaaccatggtagggagtaccacttcagacaatggttcttttatttatcctttggaaaatatgtccatagatagcatttcttttcaatgctcattggaacactgccccaaggtcaaacggatatgcatccacaagtctcaacattgaagcaccccctcatcaaacagatgtatcaggcacttctcatgatcattttctgccttcatcaagttgctggaatgttttatgcagtgcctgaaaattatgtacaccagccttctaattctaattatgacagacaagcattttcggctgctgatgggggtattattgatcttactatggtacatggacgagggcctcaaaagcgtaagatccctggaattcctccagtctgtgaaagaggcagtacaagcagatatttcaatgctacaaatgcagctgatcgtcctacatcttcagaattgtggccagagaagcccaatatggattctctatatatgccttgggaccatgttaatatgacacccacatttagaggtagaggcctttctataaggggtgagggtcctttaaggaatgtgaggagccgttctgcacttgatttggaatccaacctggctaggacccatttatcaaatactcatccacacaactcatactctactggtctaccaattgaccattctaacatggtcgatctttcaactcaaacttctggcactttgaccagggattggagcccaatgagtatatgtcctcctcatggaagggtgtcatcatcagatgcaaatgcttttaatcacgaggcaagtcatttccttattggaagcagttctagtaatgctcctgtagatgttggaggttttcataatgaatttggaactagtagaaatcctactgctcctcaaagttttcataataatctgactcaaactgcaagaggagttcacagtaactactctcaaagatccactccaacttttagggcttcttctagcttacgtttgggacgtgtggcaccttctgatgatggattgcatatggtgtccgaaagttactcttctagacagccaaggccattgaccaccgttggctggcagaacaataatagaaatggaagatcaagaatacctagtgacagatatcggtcattggatgatgagggtttcatgattgttgatcgcacttcactgtatggacctaggaatatgcttgatcgacatagagacatgaggatggacatagacaacatgagttatgaggaactacttgcacttggagagagaataggccatgtgagcacaggattgtctgaggatttgatttccaagtatttgacagaaacaatatactgttcatctgagcaaagtcaagaagaagaagcttgtgcaatctgcctggaagaatacaagaacatggacgatgtcgggacgctgaaagcttgtggacatgattaccatgtgggttgcattaggaagtggttgtctatgaagaaagtatgtcctatatgcaaagcttctgctttgcctgaggataagaagggcaaataaacaatttattcattatactttagtttaacgtatatcatcattctgtacatatatttggatattccttgaagtggagaaaacagacttccatttggatatgttgttgtaatagctaatgctatactctatctatatgtctatgaattcgttctctttggcttcactcttaatttcgtgaagccttgaaattaaattatcgtacttcaatatttgatttaattcgattgacccttgtttggttatggaagtgaatgaattccttcatttcttcaatgtctgaatcacagatgaaatcttggtgctaagaaatgacttatgagttgtatttattattatatgccaggagatgctcgttatggaagggtgtcatcatcagatgcaaatgcttttaatcacgaggcaagtcatttccttattggaagcagttctagtaatgctcctgtagatgttggaggttttcataatgaatttggaactagtagaaatcctactgctcctcaaagttttcataataatctgactcaaactgcaagaggagttcacagtaactactctcaaagatccactccaacttttagggcttcttctagcttacgtttgggacgtgtggcaccttctgatgat

SEQ ID NO: 29662 - DNA, 1049 bp, Glycine max
  Clone ID: TF_GmC1166_3
ctggtctaccaattgaccattctaacatggtcgatctttcaactcaaacttctggcactttgaccagggattggagcccaatgagtatatgtcctcctcatggaagggtgtcatcatcagtcatttccttattggaagcagttctagtaatgctcctgtagatgttggaggttttcataatgaatttggaactagtagaaatcctactgctcctcaaagttttcataataatctgactcaaactgcaagaggagttcacagtaactactctcaaagatccactccaacttttagggcttcttctagcttacgtttgggacgtgtggcaccttctgatgatggattgcatatggtgtccgaaagttactcttctagacagccaaggccattgaccaccgttggctggcagaacaataatagaaatggaagatcaagaatacctagtgacagatatcggtcattggatgatgagggtttcatgattgttgatcgcacttcactgtatggacctaggaatatgcttgatcgacatagagacatgaggatggacatagacaacatgagttatgaggaactacttgcacttggagagagaataggccatgtgagcacaggattgtctgaggatttgatttccaagtatttgacagaaacaatatactgttcatctgagcaaagtcaagaagaagaagcttgtgcaatctgcctggaagaatacaagaacatggacgatgtcgggacgctgaaagcttgtggacatgattaccatgtgggttgcattaggaagtggttgtctatgaagaaagtatgtcctatatgcaaagcttctgctttgcctgaggataagaagggcaaataaacaatttattcattatactttagtttaacgtatatcatcattctgtacatatatttggatattccttgaagtggagaaaacagacttccatttggatatgttgttgtaatagctaatgctatactctatctatatgtctatgaattcgttctctttggcttcactcttaatttcgtgaagccttgaaatt

SEQ ID NO: 29663 - DNA, 898 bp, Glycine max
  unsure (1)..(898): unsure at all n locations
  Clone ID: TF_GmC705537_1
gcggtagacttacaccgtaattattaatttttttgatttacaaataacataacaggtgtacttgttctgaaaaaagcaaaaaaaaaaaaaaaagtgtgcccatgttgggataacatgtggtaattgtcattgcaaataacaaattaatatttacagcgtacccattgatataacatggtaaccaacaaatatggcaatttgacatgggatctttttggggtaacatgtatcctcaccctttctaaattatacatgggtttatctatggagggaaatacaagggtaggacgacaagtggcagtattatacagatctcgaacttcgtagaatctggtgatgaattcaatttttaacgtgattgaaacttgaaggccattaatttttgaatcgcaagccaatgacagcctcgtgatcgtgacatcttaatctactgcctttacatgcaagttacaatcctaaccagttgacgagcctcagatgtaaaccatttgagagcttaaagaatgcaacaagagggctgcctccgattagctctagagaataatgtgggactgttagatggagaatatcctcttgcgccgtcaccaacgcattcatcaccctccgacgacgacgacgacgacggcaccggaacctcgtgccggcacacggggcaagaattgtgcagcctcagccacggaacaatgcaatcggagtgatatatgtgcttgcactgaagctccctcgcttctccacccacttcgaactcctcctgacaaacaggacactgagaattctccttcagatgcgcgctctcgattttcaccgtcggaatagcctcgatagcccgttccggcgccggcgccnnnnnctgccggtcgttttctgttatctgttcgatgagttcgttangccctgg

SEQ ID NO: 29664 - DNA, 2631 bp, Glycine max
  unsure (1)..(2631): unsure at all n locations
  Clone ID: TF_GmC279_1
gtaaaatctcgccgccttcacataaaaataatctttaatgaaagaatttcatatcaggtgaaattaatttatgatctttgaggtagacccgtattatctgacctatgaaaaaatccctgcttatccacgcacgatttggaacttctgaaaacacgctgaaatagatttttttttttgggtataatattgattgtagtagtatttattttatcttctgatattatatttccaattttgctgtcaaaacattattagcgatcaatttgaaattgatacagagctgagagcatcaaggaatcgaagaatagaagattcatttttttttctttttgatatggaagctgatgtttctattatttttgttgcgttttcaaaaccctaaattggagaaatcccaatttctccttctgtctttctgctttggatgtttttcaaccaaaaaattgtgcttttcaaatcttttgctctgatgggtacttcaaatcttctcttgtttttctctctgatgagcctgtgtgctatggcggcttccaaggtggtgcttattgggaataatatcactctctcctttgatgatattgaagctaattttgccccagcagtcaaaggttctggaaaatatggggtcttatatttggcagaaccactggatgcgtgtgcagaattgacaaataaagttgaacaacttcccaatgcgagttcaccttttgctttggtggttagagggggatgtagctttgaggaaaaagtcggattagcacaaaaggctggcttcaaagctgtaattgtctatgacaatgaagagggtggcatcttggttgcgatggcaggaaattctgctggtataagaatacacgctgtatttgtatctaaagcttcgggtgaaatactaaagaaatatgctgggttgactaatgtggaaatatggctcattccaacttttgaaaactcagcatggtctatcatggcaatttcatttatttccctgctagctatgtctgctgtcctggccacttgtttcttcgtccgcaagcatcgcataagaagagaaaggcctcgagcttctcttgttcgtgaatttcatggtatgagtagtcgcctagtgaaagcaatgccgagtttggtatttacttctgttttggaagataactgtacatcaagaacatgtgctatatgccttgaagactattgtgttggtgagaagctcaggattctgccctgctgtcacaagtttcatgctgcctgtgtggattcgtggcttacttcatggagaaccttttgtccagtttgcaagcgtgatgctagaaccggcttaactgatccaccaccttcagagtccacacccttgctctcatcaaccccagcatctatggcatcctctgtcttatcttctgcaagatcatcactagcttcatcttcagcaatacaaattgcccggacagcatctatggcatcctctgccttaccttctgcgagatcatctctagcttcatcttcagcaatacaaattgcccggacagcatctatggcatcctctgccttacattctgcgagatcatcactagcttcatcttcagcaatacaaatttcccgggcagcttcacagaccccatctgtttcccgtaaccactccatagccagtacaccttatgttcagccatctcttaggtcctcctaccatcaatccccctccctaagcatcagccgaagctccgtagatcttaggaatgcatcccaaagatctctagcttctcacttgaattcaccatgttccatgggatacccatctttgtcatctcttaactcaaggtacatgtctccacacattccaagtccaagcaatgcttcagtaagctatatgggttcatccagtcatcaacaacatcctctccgttatagtgagtcggctgcaagcttctccccatttgcatcgacacactcccttccagaatgttaaattgttcaattgattatatcatatgattgagacgtccacgcagttgaactagtaattgccaagtcttgaactaaaaggtggccatgtgatgaccggtggtctagttgaatagtcctatgtgatgcttggggcattccctacctctgtcatttgacttccgtcttggcacctggtgtacattgtagcttctctctggtgttagtttcgtttacatgtgctggttgaggttcttacatttataggttggagagcttgcatacagtaacttgtgcgtattgtttgtactttgaatgttgacgttttcatggccttgatgtccaagtatagtcaactgctaacaagagaaatgttgggctgtattgacactagacacattgaagtaagaagagttctttatgctctgtctagtggatttgtccaactgaatcatgagagatcatgtgatgtatcactctagtgttatctatacttgatcatctaattgcaactctgagtatcaataatacttgtaaaattttcgtaaaaaaaatagctaatagataatgctggtaagtgttatcaattttaaaccatgggggcaaattagatatcctatttgatccgtggaaaattcatcatctagatatgttaaataccttctgtggcatcttcgatttatagnnnnnngnatnnnt

SEQ ID NO: 29665 - DNA, 1074 bp, Glycine max
  Clone ID: TF_GmC6770_1
tgacgccacgtaagctcggaattcggctcgagcaataatttccacctgaagccggacaatatattccgtagaaacaaaataaattaaccaaaaccatatctccatataccttagattgaaattgaaaccaatcaagcatgtctaaagacaaagatggtgaggagccacttggtataggccttcaggtgatgctagcagcagctttctcattatttggtatgatcttattaatcatcatcttccatttttgtgtaaaatatttcattagacgccaacaaaggagacgccaaaacgaccttctttatcaaatcagcactcaaattgcaccaattgatgtgagttctgtggagccacgcaactctggccttgaccctttgatcatagcttccctgcctaagctcttgtacaagcaaacggaccaattcaagcaaggtgaagaagttgtagagtgctcggtttgcttaggcactattgtggaagatacaatcagtagggtgttaccaaattgtaagcacatttttcatgttgattgtgttgataaatggtttaattctaacaccacatgcccaatttgccgcaccgtggttgacccaaaggtgcaaccagaacatggtcatttaggtgccacacggcttcacaaccaagtccaacccacagcaccaccagctgagggtggtgatgagctaccagatggtaatgaattggagagggtgggatgttcaggtttgagaataggatcttttcataggatggttagtaacagggaaagatccgggagaaggactcagagctgtgatggatctaccatagtagatatagaaagaccctaaattaagtagtgaatatattgttaattatttgttaattttctcctttcatttggatatattccttagtttaaattagtattggtatgttttcatttggatatattccttagtttgaattagtattggtatgttttttgtaatgagtgttggattgtttacgtcacaattttctcgcttgtttgtcaatgcttgtatttcaatttatttacttaggataccaaataatattatgtgaaatttgatt

SEQ ID NO: 29666 - DNA, 1358 bp, Glycine max
  Clone ID: TF_GmC37985_1
gaaggagtgagatgggtgagttatgaagagtgacgaagccattttcgacattatcactcctctcgcaccaaaagcgatgaagctctagttgctgcttttctcgttttgatccgtacattttccctctactcgttgcgatccccgaagctgcgagattcttctgcttcgattgcgtgcttcatgtgattctgcttctctctctatgcaaatttcttttataggagtagctgaatcatatgaggtggatggtcctttgttgatgaccacaacttagactgcagatttctcgtctaccaaaaaggatgcaaaatgagttggaactcacgcatggaggcccattacaataccattagttatccctataatacagcaggaagctttattgaatattttgaaggtctcacctatgaacatgtcaacttcattttttctggtgcatcacatgctcaggagagttcttacccttcaaattcaagcttttacaagtttggccactgtgaaccagagaataattcatactatcgttatagtcatggttatgaggtaaatcatcatgaaccactggtggatgagtacaggagaccttcagagaactcattgacaatcaatgaacagtcaccagcagtaagcacagaatgggttgaaggtggaaacactgacacacaagacaattctattgaatgtcctcgaagacatcatagtaattcaaatgattatcaggttatttggcaagacaatattgatcccgacaacatgacctatgaggaactacttgaattgggtgaagctgttggaactcaaagccgtggtcttacccaagaacagatctcctcgcttccagtgtcaaagtacaaatgtgggttcttcttgaggaagaagtcacgagatgagagatgtgtgatttgccagatggaatatagaagaggggacaagcgtatcaccttaccatgtaaacatgtttatcatgctagttgtgggaacaagtggcttagcatcaataaggcttgccctatatgttacacggaagtgtttgccgacaagtcaaaacacaaataatctcaagcggataagttacctgcatatgtttctgtttctccttgagtgtgggggtctttcatagaaatacatttttatttgacttttcccttttcgtagtgaggtcagccctgggtttagcaaaaatacagagagaatctaaagttttataaaaggatatgggacatgtctcaattatcattgttgtactggagaggttggattacggtttgttttcataatatctaatacagtgtgctatgatttcacgtaattagtatctcgtgctactgatacagtgttctcgagacccgttctccagc

SEQ ID NO: 29667 - DNA, 1264 bp, Glycine max
  unsure (1)..(1264): unsure at all n locations
  Clone ID: TF_GmC635_1
atttttgcctcttggaactttgtcgaaaaaaaaagaagaaaaaagaagaaagtgattggattagggaagaatcgcagacagtgttgggcttcttcatggaacttgctagttgccattgacctctctttcttttcctttcctttttttctccatctctcgcaactcttcacctcaccgcgtcattcgcagcaaccaccgaacactgaatcgtgattcgcagtgtatgacgagcgcttcggagctattccactccagaaggcatcgattgggacgaaatgctctcgatctagggctcgacaccgaactccacgccgccgattctctccgccaactccgccttcgccactactacctccgccgccaccacccggagcgtgcatctgatagaattgatgggaggtatcggcggtctttcgtaagtgagagcgtggattctgaagaaaacgtgagaagtagtcttagagggagtagcagcgagagactacccgtaggtgtggttcttgcacgggcaagactccttcagaggttgagaggggaacctctatccacaaacaggcaatatgatagagattcatttggtgaggatccagaaagtgaatcatcaaacgaagatcctagcggggcatctctagttactgagttgacttctcaaatggcaaggtcccagttcttgcaagaactaagcacaaagccacctggccttactcaagaggccttggactgtttgcatcaggaagtttttagcagcaatgccagtgagatagggttggattccagggtactgcaggactgcagtatatgtttggagtctttcacagacggagatgagctgatacgtttgccatgtggacataagtttcactctgtttgcttggatccttggattcgctgctgtggagactgtccatactgtcgaagatgtatagttgtaaatactcactcatcattaaacgaggacgagtaattgatttcttgattgactttgttttgttctgtggttgtatgacaggataagaatgctgtaatggagctggttttttgtaacgatgctgaatacttgtctcttaccttgatatcgtattttttttttatcttttcctggtgacaatgggaaagatgtgggtagctaaatttggtattgtaagacgtgttataaaataataacagtcacgtgaatagtaaatagtatttttaatatttgtattcttatcgggaaaatacctattcatttttatcaagattcatgtattacattttagttnnn

SEQ ID NO: 29668 - DNA, 1181 bp, Glycine max
  Clone ID: TF_GmC635_3
gcaacctccgaacactgaatcgtgattcgcagtgtatgacgagcgcttcggagctatttcactccagaaggcatcgattgggacgaagtgctctcgatctagggctcgacaccgaactcaacgccgccgattctctccgccgccactaccacctccgccgcctccgtcaccacccggtacgtacatttccttttctttccgccgctattccactaattacaatttgaaatttcttatatttattaaattattattattaggagcggaaattgaaattgatgttagtgtgttgaggttgtggctattaattttgtggtttttaggagcgtgcatctgatagaattgatgggaggtatcggcggtctttcgcaagcgagagcgttgattctgaagaaaatgtgagaagtagtcttagaggaagtgacagtgagagactacccgtgggtgtggttcttgcacgggcaaggctccttcagaggttgagaggggaacctctatccacaaacaggcaatatgatagagattcatttggtgaggatcgagaaagtgaattgtcaaacgaagatccaaccagggcatctctagtttctgacttgacttctcaaatggcaaggtcccagttcttgcaagagctaaacacaaagccacctgggcttactcaagaggccttggactgtttgcatcaagaagtttttagcagcagtggcaatgagataggattggagtccagggtactgcaggattgcagtatatgcttggagtcattcacagatggagatgagctgatacgtttgccatgtggacataagtttcactctgtttgcttggatccttggattcgctgctgtggagactgtccatactgtcgaagaagtatagttgtaattaactaaatactcccttaccacagaacgaggatgagtaggttggttttctagattgactttgttttgttctgtggttgtatgtcaggataagaatgctgtagtggagctggtttttttgtaaggatgcttaatacttgtctcttatcttgatattatgtatttatttttatttttttcccttttcctggtgacaatgggaaagatgtgggtagcttaatatggtattgtaagacgtgttataaaataataccagccccgtgaatagtaaatagtaattttaatatttgttttctt

SEQ ID NO: 29669 - DNA, 1111 bp, Glycine max
  Clone ID: TF_GmC340342_1
cttcaatcttcttcttccacatttcactctcgtccattgtttccctcataatcattttctcttctattacaattctctttccctttgaaaccactttttttcttcttctcttgtttccttttatccattgcgttcttcatttgcacttgaattttccttagtttgtaaaagggtgtaaattggggaagaaaattccatggaatctaaatactttgactccaatggggaggtctcactaaagcaaaaatcaaaatccatttcagcagagccaacaatctctactagtgaatatgattgctttgattgcaacatttgcatggaatcagcacatgaccctgtggtcactctctgtggccacctttactgctggccatgcatatacaagtggcttgatgtccaaagctcctctgttgaaccgtaccagcagcagacatgcccagtttgtaaatcagagatctctcacacttcagtagtccccctctatggctgcggaacatcgaactcggaatccaatgccaagaaacttcagatgagcctgggaatacctcacaggcaacctccttgcagcttgaatgctatgttaacttctcctcgctcgcggatttcgcatcctagtcagcaactgcatccaagttatttccagacacaatcaagaccatttcattatcagcagttttatggaagttatggtaccaatggattaccttatcttggaggtgcttctatgactagtttctttaatactgtgattgatatgtttggggagatggtcttgacaaggatttttgggatctcagatgcaaatttgtttgcaaaccctcttaatggaagtggaagttctaggatgagaaggcaggaaatgcagattgacaagtctctgaacagactatctattttcctcctatgttgcatcatgttgtgtcttctcttattttgaggacatttcatttcagactgtataggcacttatgtgcagctctgaatgttcatgctgttagggatctactgtaggttgtaccattatgtagatagtagactttggcatatattatgattatgttgatattggtcttgttattttatgattaactattgcatgcatgtaataact

SEQ ID NO: 29670 - DNA, 734 bp, Glycine max
  Clone ID: TF_GmC6834_2
tttgaaactcctcagagccaaagctgttctcttttttcatctgggtatgcaatttccttcttgttatcctctttggtctcctggattccataatctgtgttaggaaaacttccacatccaaggtctaaagaaccactggtgaccaaaattgtgaaaaggggttccttgattttcaccaattcatggcatttcagcactacatttcccgggatttgaaaaccatcccaaatgctgtgactgaggcagaaaaccccaatggttgttttgattgtaacatctgcttagactttgcacatgagccagtggtgacactttgtggtcacctctactgctggccatgcatctacaagtggctccatgtccaaagtgattctcttccacctgatgagcatccacaatgccccgtttgcaaggctgatatatccaacagcacaatggttccactctatggccgtggccatgccgctaccacagctgaaggcaaaacagcttcttgtgatgtttttataccaccaagaccatctgcttcatgtgctcaagcccttttggcaacatctcaaaggggtcagcaccttccatatcgtaatccttatcagggtcactacttcacctctcatccataccaagaagaggatgatgccacttcacaaatgctgcaatcttggatcccatcaccaccctgtgactggggatgtttgggggagatggtttatgcccaggggtgtttggcaacc

SEQ ID NO: 29671 - DNA, 479 bp, Glycine max
  Clone ID: TF_GmC37342_3
tgtttcatttgtagaaacacttttgtggatcctgtagtaaccaagtgcaagcactacttctgcgagcattgtgcattgaagcatcatgcaaagaataagaagtgttttgtttgcaaccagccaactcttggcatttttaacgttgctcatgagatacgcaggaagatggccgaggataaatcataaaaatgtctctctaggatccatggatctctttacttcatggaagttatcttttctcccccattttagtttcatgttaaagattgatgctatgtaatgagttgaaaacataccagaagtttgcacagtggaattagttgattcattttgttgtatttctttgccttatagattccagaatatctaatggtgagagacatttatgatatacccgtttgtatatagggtcatactgtggttctttttacagtagtttgttaccaaataaattttgaatagagcgccctttactttaa

SEQ ID NO: 29672 - DNA, 1025 bp, Glycine max
  Clone ID: TF_GmC5679_1
ggaagaagaaaatatccattagaaaaagaccgtagactttggccattttttcactccacacggagccaaagccaaatccaaagccaacaacaacgccaccaactcaacaacaggaaagtcctcataaaccccataacccaaaccaaaacccattgtctccttctcctcccattgaactccttctctttccccctctctctctctctcacacacaaagaggccatggattacctcgaccatgatcatgatcatgacccattccacgaccacgacgacttcaacagaaggatactcatcatggccatagtttccttatcagtggtcttggttcttgtctttgcacttcacctctacgcaagggttttcctccgccgccaaactcgccgcagagccgccatataccaactgagcctcaacgtggcacaagcacacgccgagccacacaacaacacagggctgaaccctgccctcatcaccacccttccctccttccccttcaaacaaaaccaacaccatgattctgctgagtgtgccgtgtgcttgagcgttctagaagacggagaacacgtgaggcttcttcccaattgcaaacacagcttccacgtcagctgcatcgacacgtggctttcttcgcactccacgtgtcccgtttgtcggaccaaggccggaccggtccagctcgaaccggtccgcctcgaacctcagccccgtgagggccccactggcttggttcttgctgatgttgttgcacccacggctcctctattgtttgaaaacgtggaaggaacctcggatggtgctaataataatgggtcacctaaggttagtggttcgaattcgaggttgagttcgttcagaaggattctcagtagggagagatcgatgaggaggattctaccttctagccatgatgatgttgaacatgacttagagaggcagtgagaactgagaaattaattattgaggtaccaacaccatgtatctggttttgattatttgtgtgaagtgtctctgatttttatttt

SEQ ID NO: 29673 - DNA, 1061 bp, Glycine max
  Clone ID: TF_GmC7726_1
ccgcgtccctcccggaaccctctctctctctctctctctctctgttcactctcactttttgttttcacctcctcctaatttccaagcacactttctttgtttcttatttcttcctgtctcaattataagtaaaagaaaaacatatttttaaggagattactgggacagctagatgacgcgagcgttcagaattctcgggtccgcggacaacgccacctcgctggcagcggtagcggcgccgccggaggcggtggcgcttgagtcggacttcgtggtgattctcgcggcgctcctctgcgccctcatctgcgtggtggggctggtggccgtggcgcggtgcgcgtggttccggcaaggctccggcggcggaagctctccccggcaagccttggcgaacaagggcctaaagaagaaggtgctgcagtcgctgccgaagttcgcgtacgtggacagcaaccccagcaagtgggtggcgacatcggaatgcgcgatctgcctcgccgacttcgccgccggcgacgagatccgcgtgctgccgcagtgcggccacggcttccacgttccctgcatcgacacgtggcttgggtcccactcttcttgcccctcctgtcggcagattttggcggtgaccaggtgtcagaagtgtgggcgttttccggcccccggggccggagcttccagaacgcctgcgaccgaacccgaattgaagtccagagaagacaacaatgtcgctagttacagcaataataatattaataacaacagcgacaggggtggcaataacagtaatagtaattgtaacatggaacatcatcatcacagccatcatgtgaatagtgggttcttgccatgaaaatagtagctactatttattagctttttttttttttttaactttgtacctttttatcccttcaagttgttcaagaagatcagaaattgggcatttttttcccctctctttatagatttttgtttatcctgcaaatattactaagtgcgtatgatataatgatgtataaaaagatgtaatcagtcgaaatgtaaaaagtttaaagtgt

SEQ ID NO: 29674 - DNA, 1263 bp, Glycine max
  Clone ID: TF_GmC166463_1
tgctttaccgttcctcttaaggattcatattattctttctcagactctttcactctgtgttattgtttctgttggaaaacatgaagttctgcaaaaagtaccaggaatacatgcaaggccaggagaagaagcttccatgcgtaggattcaagaagctcaaaaagatattgaagaagtgcaggagaaactcttcatcccagaaaccccttcatgcatcccttgccgccaaaacctgccccgaccattgcccagtgtgcgatgggaccttcttcccttcccttctcaatgaaatgtcagatatagtggggtgctttaatcagcgtgctcagaaattgttggagctacatctcgcttctggggtcagaaagtacttcttgtggatcaggggcaaattacaagggaaccatacggctctgattcaagaaggcaaagatcttgttacttatgcactcataaatgccattgcaattcgaaaaatactgaaaaaatacgataagattcattattccaagcaagggcaattgttcaagtcgcagatccagagtatgcacaaggagattcttcaaagtccctggctttgtgagcttatggccttccatatcaatttaagggaaactaaggtcaagtcaaggaaggcacatgctttgttcgatggatgttctctcacattcaaggatgggaaaccggcacttacttgtgagctctttgattctatcaaagttgacattgacttgacttgttctatatgcttggacaccgtgtttgatccagtttctctgacttgcggccatatattctgctatatttgtgcatgctcagctgcatcagtatctattgttaacggacttaagtctgcagatcctaaaatgaagtgtcctctatgtcgtgagggagcagtttatgaaggtgctgtgcacttggaagaattaaatattctgttaagccgaagctgtcaggaatactgggagcagaggattcagacagaaagggtggagagggttaagcaaataaaggaacactgggattcacagtgtagggcattcgtgggcgtctaagtacagcatgcaattttcttagtttcttttgtagagtttaaggtttgtagttttggctgaaatgtgaatatgcatctgtttaatagtttttgtgtatataatattctgaataaggcaaagccgcttttaaactctttggaagttttctagtgacaatgttattacttctttcctgatttatgaagggattctaattctattttagact

SEQ ID NO: 29675 - DNA, 763 bp, Glycine max
  Clone ID: TF_GmC1667_2
ccccctttcccctttcttctctatcagttccttgattatagctttcaatgggattctacgctgaagacactctctcaggcttgacaataggccaggccatatacgaggtagctctgatgattgcggttctgagatgggtcttgtgcttgatcttcagagtgatgaacgacagaagaagaacagaatccgatgagaccccagccgcagaagcatgttgtcagaaggagtacaacaacactcttgtgctgacgacgttcggagagattaaggagaggctgccgcagacggaggagacatgtgcggtgtgcctgagccagctgagcgtggaggacgaggttagggagctgatgaactgctaccacgtgttccacagagagtgcatagagagatggttggagcacgagcatgagaatcacatccccacgtgtcctctctgcagggctcctttgctgagttcttgctgccaccacagctccaccacttgtgtccctcctcctcagcctagttgggctgtggagagacttctatatctctttggggatgatctcttgccttgttagttctttattagattctgctaggggattcattatttgttatctttatcatcctatatgtaattgttgcttgctgctacaaaataactaaactaggacacaaactagcttccagtttgtgtgtgtatatatatatacatttaatctcttcaatttttatgattatctgtttattgtaaaaggaacaagggccttctcttctcttc

SEQ ID NO: 29676 - DNA, 1760 bp, Glycine max
  Clone ID: TF_GmC999_1
ttcgcccggattcatagtaattgacagcaacaacactttccacttgtctccgaattagttatcttgagaaacattattccctttgctatatctaatcgctcgaatgaaggtttcatgggtgtttgtgatcatgtgtatggaagtggtcggtgttccgataatggctcaagcactgacatgcatcgatgagacggttatcctcgctctgtctctatcttacttgatgcagcaacaaacaccttacagccacaacactttccacttgtctccgaattagttatcttgagaaacattattcccattgctatatattatggctagcatgaaggttacatgggtggttgtgatcatgtgcatggccgtggtgggtgcaccgatgatggcgcaagccatgacatgcaatgatgtgacggtgaacatggcacagtgcctatcctacctgatgcagggaggaacaccttcaacactttgctgcagcggagtcaagaacattcttggctctgctgtcaccaccgttgacaaacaaactgtgtgcaactgtctcaaggcggatgctgctaggtacaacatcaatgaccagtatgctcaggcactccctggtttctgcaaggtcaatgtcccttacaagatcagccgctccactaactgtgcaagcatcaggttctgaacaagccatggacagatttgctcatttctgcagcgggatactgaggcagcagtgaagcacttactatcagaataagagaaatcgagtgtgactgtagggcttcacttatgcgagccttttattgtattagtttctatttcttcagacacttcatagtctttgttgttgggtgtgagtgatcactagatgtatctaagttgattgttgcatgtaacaatcacgtatttgatataataactccatatgctattttgattattgcataccaaattgttcttaaattggatttttatctgcctaaattggcttgaagaagacacattcgaggatcccaatatagagacaaaatgttctcatcattttcatcttggttgcatttatgagtggatggaaagaagtgacagctgtcctgtttgtgggaaggtgatggtatttcaccaaacgactgattgaaaaggtttatgtcgtcaattatacccataccaaaggaaaggaaataggtagtattgatattgtgagtacttcagattaagcgcttatcatgtatagtaagtatataacatttttattacccatcaatgtaagttcaatctcatccaagttgttcctatatttgcccttttaagcccttgccgcttccctggtctgcctctgacttcaagcagcctattaatgatactatcaagaaccccacgttccattctcagtctcacgtttcaaaagtcaagataacacaaacaaacaacaaagtgaaaggaaaagaggtagtaggtagccaagataataaaggaagtctgatgttgtctatatatcggcaatgatcatgttgaaaacaaaatagagaataaagagagaagtagctttaagtcaaattcaaataagaagagaagacccttttgtttagagttgtgtgtctagtagaagaggttaagaaaggaaaggagtggagagcgttgaaaagaggaaagtgaagaagaacatattcgaacgcgtagagagaagaataaagtggggcgtgttgagttgaggtcccagcagcccctatgaaacataataaccacccatgggaagatgacgcggtttgaataaacaa

SEQ ID NO: 29677 - DNA, 730 bp, Glycine max
  Clone ID: TF_GmC999_10
aaggcccttgccttatgatgcagacctcaggtttttccgttcacagcgtgaaggactagtgtcaagacgtgagaagggttctagtcatttgaatgaagagtcagaacctctaagaggtgatgtagatgctgactcagaatctttaaattctggtggcaaatggaatgataccagtgaagatggatcaaaggaataccgttccaagtcctctgtaagactctcatcagcaaaacttacaactggagctggggttgtctattcatcctcagaagaggaggatgtctgtccaacttgtcttgaagaatacactgaagagaatccgaagatagtgacaaaatgctctcatcattttcatcttggttgcatttatgagtggatggaaagaagtgacagctgtcctgtttgtgggaaggtgatggtatttgatgaaacgactgattgaaaaggtttatgtcgtggatgataccaacaacagaggaaaggaaatatacagtatagacattgtgaatacttcagattaagcgcttatcatgtatagtaagtatataacatttttattaaccatcactgtaagttcaatctcatccaagttgtttctatatttatacttttctcccttgccaaaacatccaagattaaaaaaaaaaaatgccattttagatggcaactttgtcatggtttcaacagtttgccatttaatagaatgatttcctcctctctttttcttttt

SEQ ID NO: 29678 - DNA, 929 bp, Glycine max
  Clone ID: TF_GmC56608_1
cactctttacatctctctctctctctctctctccaaagcaaacagaaacagcgacaatcacatgactcgtgccttgagatatttaggcgagcgaaactcggccacggactccgccgtcgtcgattccgacttcgtcgtcatcttcgccgccctcctctgcgctctcatctgcatcctcggcctcgtcgccgtcacccgctgcggctgtctccgccgcctccgcctctcctcctccaacgctactccccagcctcctcccgcctccgccaacaaaggcgtcaagaagaaggtcctccgctccctccccaaggtcaccgcctccgccgaatccgctgtcaagttcgccgactgcgcgatctgcctcaccgagttcgcagccggagacgaaatccgagtgcttcctcagtgcggacatggcttccacgtcagctgcatcgacgcctggctcagatcgcattcctcctgtccatcctgccgtcagattctggtggtttctcgctgcgacaagtgcggcgggatcccggctccggcgagttccagctcggcgccaccgctggcggactcgggggacagattgaagggaagggaggaggacgcgaatagattcttgccttagctactgctttcggtttatatcaactcaaaattcatgaatccttctaaaaaagaaaaacattgtctatatagtgtggaaatagcaggtggtgtgtaatttgattttttataattctgatatggttagggctgtatgtattattgcatttgtgggcatcagttggatcagctgaattcgccatgtctcatttgtggaaactacttcattttttttttaatcatatatttttctgtataaagaaattaatttgttttaactagtaaaccagtagtatgtatgcctgtgacttttactttgccgtgtgctaatcgct

SEQ ID NO: 29679 - DNA, 1953 bp, Glycine max
  unsure (1)..(1953): unsure at all n locations
  Clone ID: TF_GmC5631_3
ccacgcgtccggtgacttagaaaagtaacagcaacgacggcaacagaagctggtcactgctgaattttgcagagctctttgtctcctctctcttttctctctctctctctctctgcctcacttgtggcctcatctcaggcacaaaaaacaaaagctttgaagctcagagggtaacacaacaaacacactaacactacaaagtttgagtctttgacacaaaaaattgagatagctcagagaaaaagaaaagagagaatgggagaaggaagaagaggagggacttcaaagctgagagaagcagcaaggagggtggctgtggcagcagcatatgcatgtggctcattctcaagaagaaaggctttggtggatccagtttccattgacaactcttgtagtctatctgccactgcctcaaattcctcatttttgtccccatcaacaacaaaaaattcctcagaggagttaacggaagaaacatattctggtatcactaccaacatcaacaatgagcttcatagtaagaatttgtgtgcaatatgtttagatcctctgagttaccacagcaagggcagcagtccaggccaagctatattcactgctcagtgctctcacacattccattttgcctgcatttcttccaatgtccgccatggtagtgtcacttgccccatttgccgtgcccattggacccagctcccgcgcaacctgaacaacaaccttggtcctttcacttctagtaaccaaagtgaccccattcttcgaatccttgatgattctatcgctaccttccgtgttcatcgccgntctctcttgcgctctgcgcgctatgacgatgatgatcctgttgaacctgatgaaacacctgagagtccaaagctgtgtttctctcttgtgcctattccaccaaatgcaccaaccagttacaatccagctttgcaagtgactaaacatgcctcatgtccttgccatctatcccttcatcctctaacctgcagctccttgtcattgctacaatctccaccaatgcaaaaaccttatgtcatgtgtccctcttccaatatgagcttatctctctgtgaaactgagccatgaacgtgccactgacttggtcttggttgctagtccaaatggaccacacctaagacttctcaaacaagcaatggctcttgtggttttctccctcagacacatagaccgcttggccattgttacatactcctcagccgcggctcgtgtcttccccttaaggcgcatgacatcctatggaaagcgcacagcccttcaagtcatcgaccgtttgttctacatgggccaagctgatccagttgaagggttgaagaaaggcattaagatacttgaagaccgtgtgcacaagaacccggagtcatgtatcctgcacttatcagataatcctacaagaccataccatgcagtaagcatggaactgccatctacaccaattcatagatttcatgtggggtttggctttggcacttctagtggatttgtcatacaagagtttgaggagttcttggccaagatgcttggaggcattgtgcgcgaaatccagctaagaatatgtggggctggggaagaagttggaagtggaagagtcataagaattggagagataagaggtggagaagaaagaaggattcttttagaccttggtgactgcactcatgtgtatgttgagtatagctacattgaaggggaaatcgatgagtgtgttaggaggacaggggaaactgttgtaggtgttggagaacataaaggtgatgtttcagaaaatggtgaaaacacaggtggtggtggtggtggtaggagtagcagtgttgaaagctgggactttcatgatccttacatggccagaagatgggccaagcatttgcatggttatagactttgaaattgctactattattttatatagaccaatgcgtttttgaggct

SEQ ID NO: 29680 - DNA, 875 bp, Glycine max
  Clone ID: TF_GmC747027_1
gctctatcacttctttcccaacccatcaattcttttggctaatcagtaattacccttaattttttggtccttcaatggaacgtgaagaaggcaaacaacctccccaaaaaaccccattacacaatcaacatgagcaagctaattctgacaacaattttgttcaacaaaataacttgcaagagcaaagtgggacattcacaacttttgcatcatttgaaagtgaaactgagggtgagtcctcttttgatgacaatgattatgatgctgattttttcctgagccaagagttcgaatcagaacttcaatttcttgagagtgaacgaagcaatgacaacggcgatgattatgataatgaagatgacgaacatatggaagaagatgagatcgatgtagatgaattgacttatgaggaattgattgagttgggagattttataggacaagagaagagagggttgtcagcacatgagatctgttcatgcttgcattctcacactttccattctgctgaaaacaaaagtggaattgatcgttgtgtgatttgtcaggtcgaatatgaagaaggtgaatctttggtggcaattcagtgtgagcacccttatcacacagattgcataagcaagtggctccaaattaagaaggtttgcccaatatgtaacatcgaaatttcagctcccaagatggttagttaagaatatatagttggtttttagatagtgtaaaatttatgcttccttactttgtgcaatcttaattaatttgaaatacttgagaaaataaaagctgctctggagcttaatttgtaacattgtaaataacagaaatttgatgttccaaggtataaaagtgattgaaaatcaaattatactttaaaa

SEQ ID NO: 29681 - DNA, 1035 bp, Glycine max
  unsure (1)..(1035): unsure at all n locations
  Clone ID: TF_GmC18_1
catccggctcctgctgctgcactatgtaaccatctatctaatactacatggatgcattttttgggggtccataactggtaggttgcctggtgttgggttgcttgcaaggaagagaacagagcagaaccatagatatgaacaccaacaccatgccacatgccgacaatcctatcaccttggagaatcatcattggaaccaccatggataccactcactgtcttagatgaaactgctctcaaggccagacaaaggcttcacaagaagcttggacacttcttttcctcatacaggtcaagtgagaatccaagaaaagaaggaaaagtaaaccaaagcagctacgagaagaaggatggaggaataggtcggaagttgttagagagttcatggttgttgcgtggcaacaagtttaagaaagatagaaaagtgtgtgctgtgtgcctagaagatttggggcaagagcaacaggttatgaacctttcatgctcccataagtaccattcagcatgccttcttccctggcttgcagcccatccccattgcccttattgtcgaaccccagttcagccctgacctcatattcaagggtcaagactcagtatatggtgccttgtagaaaggacaaaaatatcaaagttttatctagtattgcaatttgccgcacatttttcttgttactgattgcctaggaaatttgattgctcttctcaggtattggtggatatcccctattgtaatacaccatgctcttcaaaagattgaaattatacactatcccccaagaaggcaataactatcccttcttgcttgcatgaaaaaaaaggaccatgtttctaactcacaaaaacggtgaactttgaccacgtttcttgagctattttctcttcacaagcaatatacttatcgggcaagggcaaacctaacctaacctaacctacagcaagttaaacatttcctttgagtccaaggttcccaaaaatttaccttatcaatattttttcttctacagaatgtaataaaaaaagatgnatattaac

SEQ ID NO: 29682 - DNA, 1853 bp, Glycine max
  Clone ID: TF_GmC12124_1
cctttctctctcttcggtcaaaaacctgtcccttgtttctctctcttcggtcagaaacatgaatttggaaacgcaaccaggaacggcgtcgtattggtgctacagctgcacccgtttcgtgcacctctctgtccaaagcaccatcgcctgcccccactgtcaaagcggtttcgtcgaagagatccgtgccggcgccggagccgaagcctcgccacgccatcgactaagtcctttccccgatgatcctcttttgctccggcgacagggcttccgccgccgtaggagagaagcttccggcaaccgctccccgttcaaccccgttatcgtcctccgcggccccggcgacgactccgccgccgccgaccacgacggcgtcagcacgttcgagctcttctacgacgacggcgacggcaccggcctccgccctcttcctcccaccatgtcggagttgctcctcggctctggctttgacagacttctcgaacagttcgcgcagatcgagatgaacggattcgggcggccggagaatccgccggcgtcgaaggcggcgatcgagtccatgccgacggtcgagatcggagaaacgcacgtggaaaccgaagcgcactgcgccgtgtgcaaagaagcgtttgagctgcacgcggaggcgcgtgagttaccgtgcaagcacatctaccactccgattgcatcctcccgtggctctcgatgcggaattcgtgcccggtgtgccgccacgagcttccttccgatttggaaactagggttcccagccagatcgacgaggagacgatagggttaacgatttggaggcttcccggcggcggattcgccgtggggagattctccggcggccggagaacaggcgagagtcatttcccggtggtgtacacggagatggacggtggactgaacacgaacggtggtgctcctaggagaatttctcgttctgttagaagcaatagggttagggaaagtcgagggtttggtagagttattagcaatttcttttcattctttggaagaattggttctagaaactcttcttctggacatgggtctgtaagtagaagccgtagtcacgtgagttcaatcttcaatagaagctcgcggagacatagcaggacttgggttatggatgattaattggtgaatggtgatggcaattttgcaaagaatagtaatactttcttttttttcagctttgggttatgagattcatttcatactgtaaatagcatgtaactagcaactatagaagcaagttttttagttttccctctctgggaatctttaatatggtttgattcaacatcaatggaaggaagagtgctattttttagctttgtggatcaaacattgtgcgttggcaccagtaactgtagcagtggaccgggcatgcattgggaaacaagaatgatgctttgttccccgtgaactgaattatttgatttgtttatattatatctttcatgttagtcttattcttttattggtgagtatcctttcgggattatgttttttgagatgcctctttcaacttgcagcaccataatgttttgaccaatatgcttgataatgatgataagtataagtcactttttcctgtgtgatccacctttgaactgattgggaatgggaataggatgctgcatactgcataggaaatgcaatttgaatgaacagcagctgctaaattattgctgtggcttggtaatcataattcatctgaactctgattcacaaattgatttgtgccattgtgcaggacttttattctattattgagctagttgttggttaatggttgcatgatgaattcccaagtttcatgagttcctttttcacttttctc

SEQ ID NO: 29683 - DNA, 470 bp, Glycine max
  unsure (1)..(470): unsure at all n locations
  Clone ID: TF_GmC739933_1
gttaagcgatatctcnaactacaattcaactgcaaactcataaatctgaaacaaaaattctacacatggggcatgatccttgttggactagccatttgtctatgcagagagtgaaaaaagtggccacatttgggaagtgtcctcacaaattcctcatactcaaaatcctggaagcaaattgagcagcatgagtcgttgtataatttgaacattttactggaattaaattgttgaacaggaagcttttgaatgatattccaagccatccctttgactgtgattcccctgacaatatcgtcattgtaaatatctgattcttctccgtaagatgttgcatgtgcaatgacattgataggcttgtgcaacagctggacatatccattccacaaatatctttccatttaataaacttctcaacagggcaaccttagaaagtggctcatcacaagcagcaatgtttggcctggtgc

SEQ ID NO: 29684 - DNA, 1255 bp, Glycine max
  Clone ID: TF_GmC54233_1
aacctatctacgcattttacctggaactcattatatgaatgcttcacttccctatgtatatgtgcttctttcttatgatttttgtaaactatggtattcccttcctccttatacggcaactttcaaggacattttgtgacttcaaagtccgtgttgcagattacatacgttatcgtaaaatcacttcaaatatgaacgatcggtttccagatgcaacccctgaagagcttaatgcaagtgatgcaacctgcattatttgtcgtgaagagatgacgacagccaagaaacttatatgtggacatctttttcatgttcattgtctccgatcatggctggagcggcagcacacttgccccacctgcagagccttggttgtaccacctgaaaatgggacaactgcggctgcagggcagcaaggatcacagtgtgtccacaacggggaacaactgggacaggcagtggaagcacagctcctggactgatttgatgacatcaagctagctgctgctgctgtatattcctgtatgctctcctcgctacactcttcatcccccagttcaaatatatatggctgaatcttctgataaggaccgtaatggagagcaaacttccagtgaagaagcacaaaggcagtttcttatcgctggtagaccaccaaatctatcctttcctccaatgcaaaacttccattttctaccttcccaagcacatgcatcccctgtgaattatggagaggggtttgaaaatgatccaaatatcccaaactctcagcttgaagcttatagaaaacttcttcaatgccagattcagaacctacagattctgcaaaatcagctcgagatgctgcagaggataaaggctgatagaagtgtagatgagggcacgccatcatcagatagcagaggcaagagtgtcatttcctcatcatctggatctggtcatggttatcgtgaggatattcgagatggaaaagcataaagtctgctgtttctggtttatgccaggagcagactgcctaatgtagatataggaagaggaaaatacagaaatcacagcattgctctaatgtgacatctgttattcgtgatactaatcttgtaaatgcatagtgccccttaaaaatgatttattttggcttccttttttttgtttccatgtggattgtacgcatatattagcttttataaaagttaccttttgatcagaaacagaaatcacagcattgctctaatgtgacatctgttattcgtgatgg

SEQ ID NO: 29685 - DNA, 529 bp, Glycine max
  Clone ID: TF_GmC54233_2
taaaatcacttcaaatatgaacgatcggtttccagatgcaacccctgaagagcttaatgcaagtgatgcaacctgcattatttgtcgtgaagagatgacgacagccaagaaacttatatgtggacatctttttcatgttcattgtctccgatcatggctggagcggcagcacacttgccccacctgcaaaaccttggttgtaccacctgaaaatgggacaactgcggctgcagggcagcaaggatcacagtcagatgtccatcaacggggaacaactgggacaggcagtggaagcacagctcagactgaggctactgatagtttgagtcgacatcaagctagactccaagcagctgctgctgctgcttcaatatatgagaagtcttatgtgtatccctctatgaattctcttgtatggtatgacatttttcccaagatgctttcctttacaattttctcccttttaactccaaaaggaacctcttgtagttgtaacccactcattagtcactagtcacatattaactcg

SEQ ID NO: 29686 - DNA, 1064 bp, Glycine max
  Clone ID: TF_GmC98_1
aaatcaaactggccttatttgtcctgatcaattctcccttcataataaacccactgatcgcttctctttcctcttctctctctcagtagaaagcctacaaccttcttttatctgcgtttcctctctctctctctcgatcagtgctagacaaggactggtaaccaaaaattccaagaagggtacattaattcatggcctttgaggagcactatgtttctcaggaattgaaaaccatccccagctccatgacagtgacagaaaatttggatgggtgttttgattgcaacatctgcttagattttgcacatgaaccagtggtcaccctttgtggccacctatactgctggccctgcatctacaagtggctccatgtccaaagtgcttctcttgcaccagatgagcacccacaatgccctgtttgcaaagatgacatatgccacaccacaatggttcctctctatggccgtggccagggcatagctcatagtgaccatgatggaaaggcatcatcctatagaggcagttgtataccaccaagaccacctgctttgggtgctcaatcgctcattgcaacatcatctcaaagtgttccatatcgcaacacttatcaaaatcagcatttataccaagaagaggatgcatcatcatcacaaatgctgaaccctggtgccaccattttggcaccagggttcccccaccttgtgtttgggatgtttggagagatgttttataccagagtctttgggaactcggaaaatttatacacccacccaaattcttatcacctgggggaaagtaataatagtcccaggttgagaaggcaagagatgcaagcaaacaaatcattgaacagaatttcaatttttctgttttgttgtttccttctgtgtctaatcgttttctgagcaagaaattggattattattctctattgccctgttgtataattttaaagaaacacgggtgttagcttgagaatgagatagattgagcaattgtatgtagggtaaaagaactggtgttcttcatcatttactataatatatttgagctcgatttttccc

SEQ ID NO: 29687 - DNA, 468 bp, Glycine max
  Clone ID: TF_GmC1701_2
ggctcgagcgcagcagagggaaaataagcctggaaacgatggaagatgatgacgcagcgattgaggtgaggaaccatgtttccccagagccagaggtggaggattccagttgctgttgcccaatttgcttgggatcattccttcaactttcctacctcgacaaatgttttcataagttttgcttcaattgcattttacgctggaccaaggtggttgctagcaagcaccgttctccaccttcttctgtaaaatgccccctctgtaagactgaaaatttttctatcatatatgtagttgatgggagttgttttcaacgtcattatgtaaatcaagattttgagaatagttttatcttatcaagagctcacagatatagagtacaatgctattacactgaacaaggttttgtagatgacatattccatatatcacaatattggagatctcaaaagtactatcagccaaact

SEQ ID NO: 29688 - DNA, 384 bp, Glycine max
  unsure (1)..(384): unsure at all n locations
  Clone ID: TF_jC-gmst024166b09b1
catgtcttgatgttatctacatattcacattagcagctgaaacccctgacctgttatatattgaagcttagctcgatattatatatctgagatcgcctgatagatttagncacacctgtgtcatttgccttgagaatactggacttgcaaagaggacaaggtgcattcatctttaaccatttgactatgcacgtatagtggaaatgatggtgacaagggagaacgtgaatatcacctccatactcataggacgagatgcatattcagcattatgcattctcaagtgaaacgtgtcgttgattcaccgagtaaccattgctgacctacataggaatcatggatgctccccgtcactgaccaggcgtagcctcattgcttaacatt

SEQ ID NO: 29689 - DNA, 2026 bp, Glycine max
  Clone ID: TF_GmC7715_1
atacagtcttctagtctgtgtttgatgagttaaagttgcactttttttactgttgaatattgatactctgattttgaagtctgtagatatggacatttatttgctaacatgctcctgttggggttcacaaatattttatatacatattttcatatttcttccttgtcttgtggtttattctttaatttcatgaacttcttgtcctggagaaaaaaaaatgttggtatcaagggaaaaagcattggctaaatctgtgctcgtcgacacaatccaattgttgtctgaatcacttaacaatatttggaggatagactttgtattcaattctaactcttatgttgtacccactccgcgcccgcgagacttctctctcacactcactttctctctctataactctttctcacccgctagggtttccttttcatcgcatcttgagtttgcaacctcgtcttgtgatttccatggagggtgctgggatggaagagaataatattattaatgatgatgataataataacaagtctgaggcgcatttgacttctgccgctgcttttgtggagggtggaattcaggacgcttgtgatgatgcttgcagtatatgccttgaagctttctgtgatagtgatccttccacggtgacgagctgcaagcatgagtttcatcttcagtgcattctcgaatggtgtcaaagaagctcccagtgccccatgtgttggcagcctatcagtctcaaagatccaacaagccaagaattacttgaggcagtggaaagagagcgaaactttaggttcaatccatctagaaatgccacaatatttcatcatccaacactgggggattttgagttacaacatttgccagttggagctagtgacgctgatcttgaagagcgtataatccaacacttagcggctgcagcagcgatgggaagagcacgccacattgctagaagagaaggccagagaaacaggtcatcagctcaaggtcgcccacattttttggttttttcaactaatcctaattcacctcccatggctcctgcttcttcctctccatctcagaggggggatgatgaaccaattcctacaattgctgttgccaatctgtctccaactcctgcaactggagaagaatcatcacagctgactttagttccgcctattcaagcagaacaggtgtctgcttcaggatctggatctactgctcttgctacagatcatcagggatcatcttacaacaataggagatctcctaatcagtcatctccaagtagtcaagacagagcagggccatcagaattacaatcattttcagaatctctgaaatctaaactgaatgctgtatcaacaagatacaaggagtcaatttccaagagcacaagagggtggaaggagagatggttctctcggaacaacactatgtctgaccttggatctgaagttaggcgagaagttaatgcagggattgcaactgtgtcacgcatgatggaacgcctggagaccagcgacaataatagaagcaatagcaattctgcccccagtaatatagaggatggttcagttcaggaatataatggtcaaactttaacaccaggcaatgaaggggacggtcttttgagagacaataacacaaaagcttcttgtgctgcaggctctagttcgaactaggcatgtagaaggaattgcttgaactctgaatttgttttgtccaaaaggtagaaatagaattgcccattggggatgtgaaattccatggatgtgatgcattgcctattggctggcgcagaccaggcaagtgataatccattggcctgcagaagaagaccaacaattgtgatattggaaataaaaaaacttaaaaaaggaagcagtggtctctttcgtttgaaacctaggaacctatatatgattgtatattcacattgtaaacttatttatggatattcctcagataatctttgcataaagtactgtgtttctttcttctacttccagagataaatcactgtttttggcttaacgtt

SEQ ID NO: 29690 - DNA, 764 bp, Glycine max
  Clone ID: TF_LIB5118-039-A1-PF1-E1
ctgtcttccttggctcagcaacatcagtggctatagctatggcataggaatttccattggaattctcttgctcattataaccatcactttaacttcctacttctgcaccagatcacaggtgtcatttgctccagccactaggaataggagacgcaccccaaatgtccttgaaccacagcactctatagttgatgtaagtttagatgaagccacaattctgagttatccaacccttttgtactctgaagccaagctcaagaaatctgattccactgctacatgttgctccatatgtctggcagattacaagggtacggatatgcttcggatgctaccagattgtgggcaccaattccacctcaagtgcatagatccatggttgaggttgcatcctacttgtccagtttgcagaacttctccgattccaacaccactctcaactcctcttgctgaagtggttcctttagctagcagacaggattcataggtagggcaatagcataattttgactcaagttgatgtcctcatcacaagtcatcattgattcacaaaatatatcagatttggcaatttgataaaggtgcttgtttgtattcataggggattttttttgttgtcaattgcttgatcctttacttaattttttcttgtatacccttcgcatggtaaaagttaaagttgttgttcaaatattggccctatcaagagtacaaactctgtggggatgcctcatttcctaattttccggagggtcctgcatacc

SEQ ID NO: 29691 - DNA, 2781 bp, Glycine max
  unsure (1)..(2781): unsure at all n locations
  Clone ID: TF_GmC273_1
tccggaattttcccgcggtcgaccccacgcccgtccaccactttcaagtgcacaagcttttccccattgcaacccgtctccacaaaacaaaaccatcaaaatcctcagctagtgagtgagaaaactcagaaatatggtttcgggatggagaaggacgtttcgcacatccaataccattccccaaaacacgcaagaaccagaaaattgtaattattgttacgacaacaacaacatcaattcaagtcccaaaatcacttccaccaatttctcatcatcaattcccaccctccattcccgaaccaattcaccactttccaaacacaataataataatgcaagaactccctctcccaccaaacgcaatacccccgtgtcgtttcatcaatccactccctcttccccaaactcaccctcaaccttctctcttctcaaatccaccttacgcttatccaaaggctcatgcgaaatctgcatgcggagtgtgaaaaccggcgaaggaaaagcgattttcactgcggagtgttctcacgtctttcacttcccatgcctagcaggtcacgtgaaaaaacaccgaatggtcacgtgccctgtgtgcaacgctaactggaaacaactgcagcaaaacgcagacgaaaacaaaggaaacgcagaactcaaaacgacgaggtcgtttaagctccacaactacgacgacgacgagcctctcatgtcgcccacgtcggtctcgcgtttcaatccgattcccgaatctagtgagaacgaagaagaagaagatgaagaacaaaacgacgaagaaacaaatttcaatgtgtcgtcgatgatcagaaccaaaaacatcgacgcgttcttctcgccggaggctgcggttgtggcttccaaccggagttccgagacgtacgttgcggtgttgaatgtgaagtctcagccgcgtaacgcggcggcgaatcggccgccggcggatctcgtcgcggtgatcgacgtcggagggagtgtttccggcgaagagtatcggatgctgaagcgctcgatgcaggttgttatctcgtcgctcggctccgctgatcgtctctctgtcgtcgcattctccggcggatcgaaacggctgtttcccctgcggaggatgaccggccgcggccagatggcggcgcggcgagtagtcgacgcgctttccaccgttgagctccgccgcgatggaacggcggcgaggaacaacgcgctgaagaaagccgcgagggttctggaagatcggcggcagaagaacaccgtcgcgaaaatcattctcctcacaaacagccacgaggatcagcgattatcctccacgcgcttcgacattcattcactgagatactcttacgatggcgcgtgtaaccacgcgcaacacgaccacgagttagcgaagcgcgtgggcaatttgttgagcgtggcggcacaggacttcaaactcgagttaaaactcacgtctcgctcggctccggcggagatctccgccgtgtattctctggccaagggttgcaccgacgctctctcgccggaatccgtcgcgctcggcgatctctacgcggcggaggggagagaaattctagtggagttgaaagtgccagctggcacagcttcgcgtgggtcccaccaacgtgttatatccgtacggtgttcccatcgtgaccccttcactcgagagcttgttatttccaaggagcgtgagttaattgttccaggaccccgcacggttcgatcatgcgaccccagaatcgaacagttgagacgttgccaggtcagcgctcgcgccgtagccgagtcgagaaggttgatggctcgtaacgacgtgtctggcgcgcttgagttgctatcctcggctcgagcatctgtgagccgcgaacagggtgatgagtgcttgcgctggctcgaatccgaacaagccgagctgaggagccaaaagttaagaagtagttgtaataataattgcttcgatgaaaagggggagccacttacgccgatgtcggcttggagagtagctgagagactggctaaagtggctattatgagaaagtctatgaacagagtcagtgacttgcatggcttcgaggatgccagattttaaatgtattttttctctttttttcagtatagttctaaattttgtagtttgtaaagggagaaaataaagtgtcaataaaatttttttccgatttatgctcaaaaaaaaaaaaaaaaaaaaaggatactgaatgggtgaattcacggcacatttgggagcttgtattttgttgatgcctgaattatgtaagcatagctatagttaccgcactttagttagctaggcatgaaaatattaagaagttatggctctaatcatgaaacctgtgcacaaaactcatcactatacctcatttcttggaaagattaagcaatatctgcaggattgggaagtctggatatctcatacttaaggaaatgaaatgcagttgcagattggttggctaacaatagaggcaaatttagtgtaggggtttgttttaaaaacaatttactaaataaggtctctttttgtaacgcgctggcaatgacgggagcgtggatgtcgctattggcagcaacggggcaaagagagaggaaagagncgcccttggtaaagaaaaaacagggagagaggagagagacccgtcattggcactggcgagacatgccaacgtggacaatcctgtcattggatttgcggcacacatgattggtgtgtgataaaattacccgcattgatagaagaattggaagcgctaattagag

SEQ ID NO: 29692 - DNA, 415 bp, Glycine max
  unsure (1)..(415): unsure at all n locations
  Clone ID: TF_7042560
gcagcgtcagaggcagcgaccgagtcatgctccaattcaggtaactaactatgcaggagaattgggaacagtagctgatctaccagccgaagaagaaaggttgcatcaagagtttggtggtattgatgttggaggagagatggtgggagatgggagaacgtgtnnaaggaaggctagctntttggttgctaaagcattgggtgtggaaaccagtcagggtgagggttttgcagcaaatttgtttcattgtaatgtatgcttggacacggcaagagatccgggtttgacctgttgtggtcacttgttttgctggccatgctttcataagttgtcgtatgctgattcagatgtcaggaaatgtccggtttgtaaaggagatgtcccgtgagaaggagtggtcgcagtatatggcagt

SEQ ID NO: 29693 - DNA, 2673 bp, Glycine max
  unsure (1)..(2673): unsure at all n locations
  Clone ID: TF_GmC278_1
cgacttccgtttattcgtttccctgcttctgtgagaattttgctgacgatcatacgctttctctttctttggctttcggtttcttggtgctgtttgagtgtttgtgcattgtacattattatctctacatgttctgatgttattttccttgcaggttgtgaattatttgcaaatctgattcaactacagtgtctattttgactcccaagattgcaagtggcagttatggggcataggcagttacataacacatcttcattgttcgatggtgagcctgaccagaactggaatcatttgcatactgatcaacaatgtgtgcaccttggtaggactaacacttcagagaatagttcatttatttatcctgctgaaaatatgtccatagatagcatatctttcccctctcattggaattcttccacaaggtcaaatggatatgcatcctctagtcacaacattgttgtacctcctcacagtcagatgcatcaggcacttataatgatcaatttcatgtatttgtctaggacggtaagcctgtttagagcgtcggaaaattatttacaccaaccttcttcctccaattatgacagacaaacatttcatgttgatgctggttttattgatcttacaatgggaagtggacaagggcatcacaagcgtaagagccctggaattccttcagtctacgagggaggcagtactagtagatactttaatgctgggagttcaactgatcttcctatatcttcagaattgtggcaggagaagccaaatattgattctcaatatatgccctgggatcattttactatgacacccacattcagaggtactggcctttcaattaagggtgagggttctttgcggaatgtgaggagccgttctacacttgatttggattccaatctgtctaggacccatttatcaagtaatcattcacacaattcctaccctactgtcccaccagttgaccattctagcatggcggatctttctggtcagacttctggtacattaacaagggattggagccaaatgaacatgtctccagctaatggaagggtgttattatcagatacaagttcttttggtcttgaaacaagtcacttccttgttggaagtggtgctactgctagcaatgcttctgtagatgttgggggcttccatcatgaatttggtgcaagcagaaatcctactgctcctcaaagttttcataatactcatactcagaccgctaggggaattcgaagcaactattctcagagatccacaccaacttttagggcttcttcaagcttgcgcttgggacatgtgacatctgatgatggattgcctatggtagctgaaagttactcttctagacatccaaggccattgagcaccattggctggaggaatggtgatagaaatgggaggtcaagaatttctagtgaaagatatcgatcattgactgaggagagtggtctccatgatcgattttcctctgagggtttcatggttgttgagcgtgcatcagtgtatggttccaggaatatgcttgatcagcaccgagacatgaggatggatgtagataacatgagttatgaggaactacttgcacttggtgagaggattggctatgtgaacacaggagtctctgaggatttgctttccaaatgtttgacggaaacaatatattgttcatctgagcaaagtgaagacgaaggaaactgcgtaatatgtctggaagagtacaagaatatggacgatgttggaacacttcaaacttgtggacatgactaccatgtgagctgcattaaaaagtggctatctatgaagaaattatgtcctatctgcaaagtatctgctttgcctgaggatacgaaggataaataacttctgtaatataaattaatcccattttgtgtatatatttggacatccctaaaaaatgaggaaacgaacctgtttttggaaatgttataacaggaatgctactctatatcaatgtatttgttttcggcttcgatctcaattactcgaagccttgaaatgcacttggtgaaagaattggctatgtgaacacaggaatctctgaggattcgcttaacaaatgtttgacggaaacaatatattgttcatctgagcaaagtcaagacgaaggaaactgcgtaatatgtctggaagagtacaagaacatggacgatgttggaacacttaaaacatgtgggcatgactaccatgtgagctgcattaaaaaatggttatctttgaggaaattatgtcctatctgcaaagtatctgctttgcctgaggatacgaaggataaataactactctagtataaaattaatctcattttgtgtttatatttgaacatccctcaaaattgaggaaacatattgcttttggaaatgttgtaacaggaatactgctttatgtcaatgaatttgtttccggcttcgatctcaataacgcgagccttggcgctctctctcaagatgtggatgaattctacggactctgcgatccagataaggagaacttgtgcctctatggacatnnnnannaaacatgngaagngactttgncggagaggaagttccttcggagctttcggagcctgcactcggaaataattttgctagggatggcatgaaccgcaaggactggctttctctggttgctgtgcac

SEQ ID NO: 29694 - DNA, 2180 bp, Glycine max
  Clone ID: TF_GmC278_2
ggccggattcccgggtcgccccgcgtccgcatttccctacacctttcttcttcttcttcttcttcctctgcaactctctctctcatcttgcgtgtttaagatcgtcactcaaacggcgccgtctcctctccgattcctcagccacgtttatcaggttgtgaattatttgcaaatctgattcaactacagtgtctattttgactcccaagattgcaagtggcagttatgggtcataggcacttacataacacatcttcattgttcgatggtgagcctgaccagaactggaatcatttgcatactgatcaacaatatgtgcaccttggtaggactaacacttcagagaatagttcatttatttatcctgctgaaaatatgtccatagatagcatatctttcccctctcattggaattcttcctcaaggtcaaatggatatgcatcctctagtcacaacattgatgtacctcctcaccagtcagatgcatcaggcacttctaatgatcattttgtgcattcgtctagtgctggaccatcattgtttataccgttggaaaattatgcacaccaaccttcttcctccaattatgacagacaaacatttcatgttgatggtggttttattgatcttacaatgggaagtggacaagggcatcacaagcgtaagagccctggaattccttcagtctatgagggaggcagtactagtagatactttaatgctgggagttcaactgatcttcctatatcttcagaattgtggcaggagaagccaaatattgattgtcaatatattccctgggatcattattgtactatgacacccacattgagaggtactggcctttcaataaaggtgagggttctttgcggaatgtgaggagccgatctacacttgatttggattccaatctggctaggacccattcatcaagtaatcattcacacaattccgcaaagaaccctcacccttcattgagaggtactggcctttcaataaagggtgagggttctttgccgaatgtgaggagccgatctacacttgatttggattccaatctggctaggacccattcatcaagtaatcattcacacaattcctaccctactgtcccaccagttgaccattctagcacggcggatctttctggtcagacttatgttacattgacaagggattggagccaaacgaacatatctccagcttatggaagggtgttattccacgcgtccggtgcttttggtcttgaaacaagtcacttccttgttggaagtggtgctactgctagcaatgctgcttctgtagatgttgggggattccatcatgaatttggtacaagcagaaatcctactgctcctcaaagttttcataatactcaaactcagactgctaggggaattagaagcaactattctcagagatccacaccaacttttagggcttcttcaagcttgcgcttgggacaagtgacatctgatgatggattgcctatggtagctgaaagttactcttctagacttccaaggccattgagcaccattggcaggaggaatggtgatagaaatgggaggtcaagaatttctagtgaaagatatcgatcattggctgagagtggtctgcatgatcgtttttcctctgagggtttcatggttgttgagcgtgcatcagtgtatggttccaggaacatgctagatcagcatcgagacatgaggatggacgtagataacatgagttatgaggaactacttgcacttggtgagaggattggctatgtgaacacaggaatctctgaggattcgcttaacaaatgtttgacggaaacaatatattgttcatctgagcaaagtcaagacgaaggaaactgcgtaatatgtctggaagagtacaagaacatggacgatgttggaacacttaaaacatgtgggcatgactaccatgtgagctgcattaaaaaatggttatctttgaggaaattatgtcctatctgcaaagtatctgctttgcctgaggatacgaaggataaataactactctagtataaaattaatctcattttgtgtttatatttgaacatccctcaaaattgaggaaacatattgcttttggaaatgttgtaacaggaatactgctttatgtcaatgaatttgtttccggcttcgatctcaattacgcgagccctt

SEQ ID NO: 29695 - DNA, 1938 bp, Glycine max
  Clone ID: TF_GmC665_1
cccacgcgtccgatttcttgattaagatatcaagagagagggagagaaagagttgtttgtttcattgcgatccctcccaagaacggctctgatagctctttggtgcagcaagcggcgtaggaatatcaaagacaaagccattcgtgcctcatacctcatttcatcacacccattcatctccatcacaacacaacatacatacgaaccagttttgtgattgaagctgcgatggaggaggagacctccgatgcaatgaaccttgatttgaatctgggcccaggcccagagcccgaaactgggcccatgagcaatgaagctgtgaacttggacgattggataggggagcctcttcagagaattagcgaagctgtgaggagggcacggcaaaggtggagatggcgccaccttccgctaccgcatcctgaatttcatgctcactttccaactgaagctacccggcattttcaaataccacctgaggctcgtaatatctccgtggaattgaaccactttttggtcaattctggcaatggaagcgccttgcaggccggcgaagggagcgtggcggccgaggagagaatggaggaggtgccaaaggcgtgtgacaatgtcaatggtgtggcagaggatgaggacttcacagaagaaggaggatgtagaaaagggtagtggcaatgatggggacttttttgattgtaacatctgtttggacctggctagggatcctgttgtaacttgttgtggtcatttgttttgttggtcatgtttgtataggtggctgcatctgcattcggatgcgaaggaatgtccagtttgtaagggagaggtgacacttaaaagtgttaccccaatatatggccgtgcgaacaatgtccgtggtcctgaggaggattctgcacttaagatccctcccaggccccaagcgaagagagttgagagtctgagacaaaccattcagagaaatgcatttgcactccctgtggaagagatgattcggcgtcttggaagcagaattgagcttacacgcgatttggttcagccacctgaaccggatgctgcccgtgaaacagctgagagaactacttccttgctaaggttcttgactgcgcaagggatacgtagagagcatcagaatctagtggcacccccagaggatgtaatgggtttggcacaaaacaatgttaatacttctgaggcaggggatccccggactagggtgcagtcccatttgcttcgaagaacacaatcacacagagcaacactttctactctttcatcagcactaacttccgctgaaaggttagttgaggcatatttccgtagcaatccattaggtaggaaccaagaacaacctcctcctccagttgatgacagagattccttttcaagcattggtgctgttataaattcagagagtcaactggacactgctgtagagattgattccatggtatccttgtcaacatcctcttctaggaggaggaacgatgcttcaagagtgtctgatgtggatagtggagattctcgtgctccaaggcggagacgtttgaactgataaaagtctgttagatgctcaagttttactattctatcatgtatcacatatgataataatcttccaacacctatgtaagtgcttcatgctttcttgttaccttatattatgaagttttcaccatttacgagttttggtagattaacaccggtttcagaagtgcttcggttcttgtttattaatctcctttgacgattgagccatttatagagtcttgtcatccaggaactgatttttgctatagaataaccaagctactttagcatttaggggcatttggaagagattacaagtagcatattagacttcatggaattggcttatgattttttaacgtttttttaaacttatttcaataaaattcataatgaaatttattcatc

SEQ ID NO: 29696 - DNA, 2310 bp, Glycine max
  Clone ID: TF_GmC187_1
cccagagtcgacccactcttctggtggcagactttgctggtgaagcgaattttgtttcctagtcgttggcctttcactgtctctctctccttctcctcttatctgaatcatcctctctctgtgagtgaggtgactcgttgttgtttgtgacccggcgattcgttcctttgactccattcgaagcaaccctttgtctttcttaagcagtttcctgtgatgggctttggatttttcttttggattccctgtgatcacctgggaactgggttgttcaaattgaattttttgtgaggtatgctgtgtttggggtttgacatggttgaggttgactctgaaagattgaaacttgagagtagaggagtggggatttggctgagaattgcatgtgggtggttggtgtttatgctgtttttcagtcctgtggcaggtttgagacccttgagctacagaactaattcatggggtgatgagtgggtttttacaagaaaagacgaaagtgacttaggtccattttcacaatggaacataagtggaacttacagagggaattggaagtttttagatactacaaatggttctaccgggatttccagacatcagaaaaataaatggaaattctgtaattgaattagttagtatgcccacaaagataactggtgtacattatgtgcagggggtagtcatattccatgatgtatttgacaatgaatacaatgttggtggagctcaaatcagagtagaaggtgtatatatatggccttataggcagcttcgaatggtagccaacagtggaaaagaggtggggttaaatcaggatggagattatattttatccaatccatatcatctgcttggagttttctcatcacaagtattccaagagtcttcacaacataagatgtggagaagaaagcattctccattacatggcatggagaaacattgcaatgtagaaatcgctgcacatgtttcacgcctgtcatcatcaaaacatgaaggggagcacgattctttccagctagaagggttaatggagagtccgtccgtggatgacgatgggtactcggtttgcaatttaattatatattctacattgaccaaaattgatcatacgcatataaagcattgaactatgcttgatgtttacgtttatctcatttttgcatgttgctgcaattcttctacttcaggagtatcgcaacacccaatctggggctgctaaggtttcaatattaatgattggtcagcaagccatagtagatgcttatctttgccttacacatttgactgcaggaatactagttgaatccctgttcaatgcttttgcaactgctgcatttttcaagtttgtggttttctcaatatttgagatgagatatctccttgccatctggaaggcaagtaggcctttgagcaatggtgaaggttgggagacaatgagacgtgaattgtcagttttatacagccgtttctatgggatcctattgggaggcatactgctcatgtatgaattccacaatcatttgagacctattcttcttcttgtatactcattttggatacctcaaataatcaccaatgttattcgtgactcgcgcaagcctttgcatcctcattatatcttaggcataactgttactcggctagcaatcccattatatatttttggttgtcctaacaacttcttgcacatagaaccagatcagagctggtgtgtttgtttggctatatttgttggacttcaagctgcaattctcttgcttcagcactattttgggtccttgtggttcattcctcgtcagtttctacctgagaaatactgctattatcggaggtttgctcaagatacaaatcatgccacagactgcgttatatgcatgacagccattgatctttctccgcgatctaatgattgcatggtgaccccttgtgatcattttttccactctggctgtttgcaaagatggatggatataaagatggagtgccctacttgccggggccctcttccacctgcataaagagatttctagtgttcatatcaagagaatcaactcacactgcccaacaacataattttggttgggatagaatccatattccgtataattgcaccttcagtacaatactgaaatacgatacttctcacaattgtatcatgcagcattgttataattttagactctttttttcctctcctttttatttcactggttatgtatcaatatcaagttgtacattagaaattcaatatgatgatcttttgacatccaaaaaaaaaaaaaaaaaaaaaaaaaaaattttaaggca

SEQ ID NO: 29697 - DNA, 1339 bp, Glycine max
  Clone ID: TF_GmC1777_1
aaggatgaaaaatgtaatttaaaggttgcattaacggcaaagtcatttggccaaaatcttggttgccgtgccggcttcaacggcttttgactttagttgtaaatccggccaacagaacactgatacgtgttcgatttagttacaacttagtattgtacttactaatattaatatatgatgatgtttagcttggttagcaaaactgttgaaataaatatggagtaaattgcttttgaggggaaaaaagaaaagaaaaaggagaattattgtatgcgtgagagagtgttactcaaattacgagactataaagaagcatcacagtctgtaaaggaactaggtttcttggatcttcttcttctattctggagtaaataagggaggttgcaatggacactagtattagtattagttaaagaaaaccccattgcattccatttggcaactattcctatccaattttaaatgctcttccacctcacgagatctccgtggccctagcctaccactactcacttcttcaatgtcctactcctcttcgatatgagtcaactcggcgccgtgttgcggactcagagggagcccaggaggagtaccattctgggtttgttgacggagcaaatggacggcgttgatagtgggacccgcaggaggcgcagcttcaaggaacgcttcggattcatcggcatggggtgctgtggggccacctggggcttccgttccgacgcgctaagtgtcacccaaggagaacagcaacagcaggaaacggatccagagtgcgtgggtccagcaggtttgggttcgggtatgaatctcgcggcggcgttagcggcggagaggcagctccgggggccgcaggaggaggcagtgagagcgccggggacgccgtggagggtgtcgctgatgaggctgctggaggagaccgaggcggagaaggagaaggagaaagagaaagaggagaatgttgtggggaatgattcggtgtgctgcgtgtgcatgggaaggaagaaaggcgcagcgttcatcccatgtggacacactttttgcagggtgtgttccagggaactgtggcttaatcgaggctcttgtcccctttgcaatcgctccatcctcgagattctcgacattttctagaatttcttctaactactttttattattcttgatccagaaccaaccacttcatccctccgcatgtgtaatagtatcatactatgaatctcatcatgtatttgttaccgcgctaaatgtttctctcttgtatgtactatatactactatatgcctgtgactttacaccagacaacattcaacaaagtcggctccattattttgttaaaaa

SEQ ID NO: 29698 - DNA, 678 bp, Glycine max
  Clone ID: TF_GmC101798_1
tgcaacaaatgcaaaaataataatttctattaactcgaggtaaactttgtaaatatacttttccatgatgacctgttcaacaagttgaataaccttcatagtcattctcagactaatgacaaccattgaaacacaagggccaaaaaataaataaaattttaggatacaacacaagggccttttatgaaccttcttttaccttttgtcctctcccttaagcaggtcatttttatctctaccatggatttgatgtttattcagccataatagtaaataagcattgatagtttcagaaaaaaaggagtgaagttctgatatttacagaaaaaaaggcaagtgacaggacgtttcaaagcagatattcatcaaccactagtcactcgagttctctgttggcgttgaatcaaatatgcatatgtcccctcgacaaagtgggcataccctgtgaatctccttcagccacttgtctatacatgttctatgaaattcatgatggcacggtagtactcgcatgttgtctccatcctcatactccacaaggcatatatagcatatcactagcttcttagtaattggacaacaaatggacggccatggcattttaattggaaacaatggaggatttgattgtgtgcagcatcctcttgatgcttatgcaacttctcatataatttgaca

SEQ ID NO: 29699 - DNA, 997 bp, Glycine max
  Clone ID: TF_GmC263823_1
actgcaagccaaacactgccctctcttatttctctctctctctaaaatattgttatcaaaaccctaacttgatagtatcttccatcacacatgacacgagggctgagactcctccaatccgcggcggcgccaccgccggaggccgccgcagccgtcgagtcggacttcgtagtgatcctggcggcgctcctctgcgccctcatatgcgtggtgggcctcgttgccatcgcgcgctgcgcctggctccgccggggacccgtcgccggctccggctctggtgccggagaatcgccggcgacggcgaacaagggcctcaagaagaaagtggtgaattcactgccgaagttcacctacgccggcggcggcgaccggtgcaagtggtcggagtgcgcgatttgcctgacggagttcggcgccggcgacgagatccgggtgctgccgcagtgcggccacgggttccacgtggcgtgtgtcgacacgtggctcgcgtcgcactcctcgtgtccctcgtgtcgcgcgccgtttgccgtcaccgcgcgctgccataagtgcggccattttccggcggtttccgcagccgccgcatcggagtccaaggccgtcggcggcgacaatgctgccgatagcactgcgaatgcgaatcgtaataatgttattattacgaatggatttagtaattacggtttcttgccttgaaagctgttttagtaattacgagttcgcatgtaagtatagataaaattaagtgcttctttcgtcatagtatagtgttcctcatgtgttatgtattaggaatttacgagtaccctctttcttttgtaatttgtatagagtcagctttttgcgcggcatggataagaaattaagaattgatagtataattatgtaaaagtttttttttttttccttttctttactttttcttagagaggaattctcttttctcctactccttataattacaaggggaaaaagataatgtcaccaggtttttatc

SEQ ID NO: 29700 - DNA, 632 bp, Glycine max
  Clone ID: TF_uC-gmroLIB3259P159g12a1
aattatactatcaattcttaatttcttatccatgccgcgcaaaaagctgactctatacaaattacaaaagaaagagggtactcgtaaattcctaatacataacacatgaggaacactatactatgacgaaagaagcacttaattttatctatacttacatgcgaactcgtaattactaaaacagctttcaaggcaagaaaccgtaattactaaatccattcgtaataataacattattaccattcgcattcgccattgtcgccgccgacgggcggctgcggaaaccgccggaaaatggccgcacttatggcagcgcgcggtgacggcaaacggcgcgcgacacgagggacacgaggagtgcgacgcgagccacgtgtcaacacacgccacgtggaacccgtggccgcactgcggcagcacccggatctcgtcgccggcgccgaactccgtcaggcaaatcgcgcactccgaccacttgcaccggtcgccgccgccggcgtaggtgaacttcggcagtgaattcaccactttcttcttgaggcccttgttcgccgtcgccggcgattctcccgcaccagagccggagccggcgacgggtccccggcggagccaggcgcagcgcgcgatggcac

SEQ ID NO: 29701 - DNA, 1725 bp, Glycine max
  unsure (1)..(1725): unsure at all n locations
  Clone ID: TF_GmC57441_1
agcgcctccagagcaaagatagcatctttttcccacacaacacgcttccgattcggagctacctcttttttgtttcatcttcttctttctttctttgtttctgattctgatgggtatctcatggagtggcagaagaagaaacaattacctccaaaaccgaccaccacctccacccccttcttactactaccatacagaatcccaccctgcaccaccaccgcagccgcaaggttactttctcccttcagcaaccccttacgcccctccccctcccatgccgccgccgccaccaccacaaacccactcaatttctttctattacagctccaaccccaattcctacggcactcccactctcgcccctcgctttcactacccgcagcattactaccacccccagccccagccccagctcgccgcgtggcccgtccctcgtcctgctgcccccactcctccgccctacgtcgaccaccagaccgccaagaagataaggaactacgtcaatgtccacaaagacaccctgcgcctcgaggtcgacgaccacaaccccgatcttcatcttctctccttcgttttcgatgctgtctacgatggcagcattactatcttatactttgccaaggaagaagaaaaatgtaggtttgttccattatatcccgaggcatttcagccggtcagaatcccctttcagaaaggagttggccagaaatttgctcagccttcaggaacaggaattgacctaggcttctttgagttggatgatctttcaaagccctcacctggagaagatgtctttcctctagtaatatgtgctgaaacaagtttgaaaactacctcagaagatgaaactcctggtgattccttgctagacgcatcccctcacatgcaaataactcaaggtgtcttagagaaaagtaatggtgctggtccattcctaataaaagtagttaagcagattttgtggattgatgatgttcgttatgagttgagagagttatatggaataggaaactcatccgcagctgattttgatgataatgatcctgggaaggagtgtgtcatatgcatgactgaacccaaggatactgctgtcttaccttgtcgacatatgtgtatgtgcagtgagtgtgcaaatgctcatcgacttcaatccaataaatgccctatatgccgtcagtctattgaggaacttatagagatcaaggtgaacaatggcgatcattgagattttttccttcggatgctaagttgcatgacagtcccaataaattccttttaagaaaattcaccccctttttacatgtctgcagtcagctattatatagcaatttgtttttttcttttttgtaaattgtagtcaataatctgtttatagattttgtgtgatgtgtttgagggaaaattagatcattagtgatcgaatgtttttcctcccgtatcatctattgtacaggtgatcatttttccatagtttttgtcttaatggtgtttaagagatcatttacatagtaatttgccaaacaagggagaaatgaaataacacctggtttgatgcataatggattatgtttgaaagttatctcacattttatcatctataatagatgtttgaaacaaattccaaaaaaaaaaaaaaaaaaaaaaaaaannnnnnnnnnaaaaaaaaaaaaaaaaaaaaaaaaaaaaaaaaaaaaaaaaaaaataaaaaaaaaaaaaaaaaaaaaa

SEQ ID NO: 29702 - DNA, 549 bp, Glycine max
  Clone ID: TF_20075430
ctggaatgcgccgtgtgcctcaacgagttccgcgacgacgaaacgctgcgtttgatccccaagtgctgccacgtgttccactccgattgcatcgacgcgtggctggcgaatcactccacttgtcccgtttgccgcgccaacctcgcgcccaagcccgaggacgcgccatcttccgttgagattcagctttcagatccggcccggcccattgggcccaatgagcccggtcatgatccgaattacatcaacccggtggaggagcgcgaaggtgaacaaaacagaatcgttacggagcctccacgtgttttagatgatcccaaccgggcccgtccggttcggtctaaatcgaccgggtttggcattgcaaggctgtttccgcgatctcactcgacgggtcactcgttggttcgaccgggtgaggattgtgagcggttcacgctgcggttgccggaagaggtgcgggaccggctcgtgcgatccgcgacgctgaaccggacgaagagttgcgggatgacatggcagctggagagcagcgagagaaggggttac

SEQ ID NO: 29703 - DNA, 1276 bp, Glycine max
  Clone ID: TF_GmC759_1
ttttacggctgcgagaagacgacagaagggggtactccatcatttccttgttcttcttccttctcttcattctgtctctacccttcaacgcaactttctttcttttctattgagcttccaatattctcacgccttgcaatcgtagttgcaccctccaaactccttcccttttctttcatctgttcaggtacttgcagtaagagaacatattgtaaaactaaaagggaaaaatggccttagatcactttgaggagactgtgcaccaaaaaggaaattggaaatcttccagtgaaatcattgcagattctgatagaaatgcctctggtgactttgactgcaacatctgcctggagtgtgtgcaagatccagtggtgacactttgtggtcatctttattgctggccctgcatatacaaatggcttcattttcaaagcacctctttggatgatgaagaacaacagaggccacaatgtcctgtatgcaaatcagaagtttctcaatcctcccttgttccattatacggccgtggccaaaccacattaccttctaaagggaagccacgtcaagtaggcactgtcataccacaaagacctcatggtccaagaacacttaacactagaagtgtttcacaacctatttctcaaagttaccatccctatagtaatccttatcatcctcaacaacacttcaactcgattccaagcggttacacctcacctatgattagaacaactggttcaatagacaacacatttggaatctttggtgagatgatatatgcaagggtctttggtaaccacgtgtcaaacattcatacatacgccaattcgtacaatctttcggggaccagtaacccaaggatgagaagacatttaatgcaagttgataaatcactcagcagaataagttgtttcctcctttgctgcctagttttgtgtctgctcttattctgattgctacttcattttcatcattagttatagtgcatccttacatagaatacattcactcattgatccagatgtattctatgttagagaagctgcaaattgatgctgagttatgtgtaaattaccaatctctctacgagctatatgaagtgaataatgatattctcataccatttttagaacattttctttttctgtccctctatatcacattgttcatcttatcccatttctttgctaattgtaaaagttttgggggagtagagttatacatttgagagaatagattgaagtcctatgggtaaacaaataaaaaaataatgtca

SEQ ID NO: 29704 - DNA, 382 bp, Glycine max
  Clone ID: TF_LIB3138-015-Q1-N2-E3
cgccaacgcgcgacgattacatcaaccaaaatctcacgccatcacccgcatcagacgaaagggcgtgccccatatgctacgaaaactggaacgcagatacagagcaaattatccggacccattgcaaccacactttccaccgcgaatgcttcatcgcatggcttggcaaggaaaacgtcaacagcgcgaactcgtgccccagttgtcgcgcaatctgctaccccaaagttgagcaccaaaaagagacaaggttgacgctggatatgtcgtttttgtaccggaccatgcgctcggagtacattacgcgaatttcgttggcgcgtcagtcgagggcaaagaaacacaccaaccagcgacgatatgatgatgaggatggcttttg

SEQ ID NO: 29705 - DNA, 1997 bp, Glycine max
  Clone ID: TF_GmC857_1
cctctcgcgttcgcccacgcgtccgtgtccatgttgaggcagagagagcgtaatcataaagtccgtccgaaacaaaaagtccctccctccctccctcccaccagcttcactcccgaaaccggcttataattcataaacaacgtttcatcattaatacggcgccgattccaagatgttcaataacatagagccacgtggttggcgacaagctaagacatgactacgcggtttcgctgttatttttgttcacgcgacacatgagcctgctccgtcgtccctccctcctcctctcatggaagaagaaatctgaaaccctcagagagaaagagaagtaagaaacattctgaacaacaccaccccatccacgatcttctcatccttaaactgtgttgtgcggatctcagatgatgatgtcttccgggacatcctcgtactggtgctaccgcttgcagccgcttcgtccgtgtctggccccaccacaccgtcgtctgtcccgactgcgacggcggcttcatcgaagaaatcgaacacccgccccgctccgtccacctcgacccccgacgccaccgccatcgcttccccgctgccgccatgtacatgatcggacaacgaccctcctccgacccccgccccgcctcatccctccgccgcacccgccgcaacggcggcgaccgctcccccttcaaccccgtcatcgtcctccgcggcggcgcggaggacgaaagtcgcggctttgaactcttctacgacgacggcaccggttccggcctccgacccctgccaccaagcatgtcagagtttcttctcggatctggcttcgataggcctttggaacaactctctcagattgagatcaacggtattggaaggtacgagcaccctcctgcttcaaaagcagccattgattcattaccaaccatcgaaatcgatgacacccatttagccatggaatcacactgcgcggtctgtaaggaagcttttgaaacaagcactgcagttagagaaatgccatgtaagcacatataccaccctgaatgcattttaccatggctcgcacttcacaactcttgccccgtttgtcgccacgagttacccgctgataccccgaatccaaatcaaaatcaaaatccgtctcaaaatgttgccttgaacgaggaggagaatgtggggttgacgatttggaggttgcctggtggagggtttgcggtgggtagattctccggtgggagaagaggtgctgagagagagcttcctgtggtttacactgaaatggatggtgggtttaacaatggggggggtgagccgaggaggatttcttggtccagagggaatagagggagggagagtggagggttgactaggtttttccgcaatctgtttggttgcttcagaggaagtagtactcagcgttctgcttctagtagagagtctatgagggcgagttcctctcgttctagtactatggatccttcgttgcggtctcggaggacttggtctatggatgtaaacagtgggatgagagcgtggtagtagtagtaataggatcgatgactgatgagggtaaaaggctaaaaatctcaactttgtttctgggttcctctgtgtaccgtgtcattgtcaaagtgtacataatgggattgatcgatcgagagtcgtcgaggatgcaatgtcttgtgattgattctcacattttcaggatgttggatggggaaaccgttgtgttagcaataggggattggggcagggagtggcatcaacaatgggagaaagtgaaaccaatggggaggaatgaggttgaaggagggactcgggccgtgattgtgaagtattatctttggaatttttggggggaggggggacatgatgtgatgatgatcatgaacttcattttactttgataatgaactgaagcaccttcgtattgttttttcattccatgctttatctttctcgtcattggtatatgatcctctaaattcatggtgtcgttttttgtc

SEQ ID NO: 29706 - DNA, 653 bp, Glycine max
  Clone ID: TF_GmC4135_1
ctctaccaatctttaagttcaaattgaagaacaatgaaaatggtgatgaccaggatgccaattcagctatagatgaaggtggaattttggctgcagggacagaaaaggagcgaatgatttcaggagaagatgctgtttgttgcatttgcttagcaaaatatgcagatgatgacgagcttagagagttaccttgctctcacgtttttcacgtcgaatgtgttgacaaatggttaaagataaatgcaacctgccctctctgtaaaaatgaagttggtacgagtaatggagggtccccttcagcctgagagagactccagtacgtagccgaagtttatctctgctgaaggcacatatcccccatgaagttgcagcttttcaagtgtacatcatcaaacttttggattctgctttgaaggtgagatccaaagatagatgcaaatcaatatcttaaacatgtgatgcaaatcaaggttgagaatttgtttctacccgccctagtcacctctctttttacgcttttttcaccggttttacatactcaccaagtattgtttgtagaaaataggatgtttcaaatctttcttctgtttatcagttctgtatatataacaaaatttagttaaaatgttgattttttaaaatttaaaactgta

SEQ ID NO: 29707 - DNA, 1421 bp, Glycine max
  Clone ID: TF_GmC6815_1
gtccaaatagagattattacctaattggtacttgaatttgaatgccttaaaatgacactctaactctctctacatcggcacttgtcgagtttgcataagcatggcttattttctccaataaacaaagtttcaatatcaaaaaaagtaaacaaaacagattcaacaagtgtcaactggagcaatggttaactgaaactgaccatatgataatcacatatggcaaatgtataatatgtcaatcatggacaacgttttttgggtcagaagatactctccaataaacaggactccaagctgatgcatgcttttgttttcatcgaccagaagatattctaattaattgtccaagacaaagcactacaaaaaccaacaaacattaaaagcgtgcagggtggggactgttatagtaaaatagaaagacaagattgaaagctttccaagttgtctgcattcgttggactaacaccagtggagagatgctatgatatgttatgccaatcaagtagtagcagccatttctgatttccactcacaaatgtttatttagtaagaaaagaatcaaaaagagagaaccaaaatctggtaattaagatcttctcttcagaagatgtgtaacaccctcaagttcaacccctttaagaaccgtttgctaataatgttcatgctggttctttctctccccttcaatgttcaatcccaagccaaagatagtgaagaacagaacctggcagaactccctcaaacggttcatccaagcaagggaatagtaatagcagttctctccacaatgtttgccataacattactcttacttctctatgttaaattctgccgaactatccctcatgaactccttaggcaaaactcaaatctccaaaactttcagggcctaactcgatcaaggtctagagtttctgggattgacaaacaagtagttgaaacacttcctttcttcaagttctcttccctcaagggttccaaagaaggcctagaatgcaccgtttgtctctccaaattcgaggacacagagactctaagacttcttccaaagtgcaagcacgctttccacatgaattgcattgacaagtggtttgaaagccactctacgtgccctctttgtagacgcagggttgaagcaggggacattaaaaacctcaacttttcattaagctcgcggttcctccgagttccttcaaatctcacggaggatccaaaccttgaaatctttgttcacagagagccatctcatggagggtcagcatcgatccaaaggtaaaataattaaaactcaaactttaaatttaccgacaaaattaatagttttcataaagcaaaaaaaaaaaaaaaaaaaaacttatgtctgaaaaaaagacctcaattaataaagctcacatttaaattaataaaaaatctgttaaaat

SEQ ID NO: 29708 - DNA, 1717 bp, Glycine max
  Clone ID: TF_GmC1738_2
ggctcgagatcgataaaagcaaagggcatctgtccatagaatagaattgcaagtattctaccaagaagtaagaagcacacccatccaccgttcaacgccttctactaatacttctcctttctctttcccaaacacaaatcactcttctcttctaattcttatcacaccactcccctctttataatcatgcaacgctctcactctttccctctctagagacctcgccctgccatgtcatcacaaaccgcgcccacggaggcgccggagccttatacgccgcttctccgctcccgcaccgatgccggccgaggtcccgcccccacgctggcgctccttctcggccgcgccggccgccgtggcccatccatgctggtacgtgagacggcagcgcgtgagctcgaggagcgccgcgctgactggggctactccaagccggtggtggcgctcgacatgtcgtggaacatggccttcgtggtcgtctcggcggctatgctcgcatgcaccacctccgagcacccgaccacgccgatccgcgtgtggatcgttgggtacgcgctgcagtgcctcgtgcacgtgttgctcgtgtggctcgagtaccggcgccggagccggagggactctcgcagcggcagccagagggcgcgggacgtggagagcgacgccggcagcggcgacgatgacgactacagtgacgacggagatgggagctctggcaacacgtctcgctccagattcgcaaaacgatgtgagtcgttaaataccggggtttcattcctttggtggatagtgggcttttattgggttgtctctggtggcgatatacttctgcaagatgccccacgattgtactggttggctgttgtctttctggcatttgatgtcttttttgccatcttttgtgttgtcttggcatgcttgattggcattgctctctgttgttgtttgccctgcatcattgctattctctatgctgttgcaggacaggaaggtgcgtcagaagcagatcttagcatgcttccgaaatacaaatttcgaatattaagtgatgtggataaacctagtggtggagctggatcaatggttcccatagaaaccagcagtgcttacttggaaaatgaacgaacacttctactcgaggatgcggaatgttgtatatgcctctgttcatacgaggatggagcagagctgcatgctcttccctgcaaccatcatttccattcgtcgtgcattgtgaaatggctgaagatgaatgcaacttgtcctctctgcaagtacaatattctcaagggaaacgaacaagtgtgacagaaaacgaagaacctaccaagtcccaactgggtgtttcaacaactgttgtgtaatatgtatatataatttcaagacaagaaagagtttacttccctactcgctgggttttgatggttgtttcgtttagctgtttctgtagagaaaagatatatagagcatttattgacgaataagttagcaactgtagtctacttagaattatttcgtcctttgttagattcagagatgtccaatttgtaggttgttcatttcttttctgacggaaactggattgtttcatttgctactggttgagtaatcgtaggctttattaagttgattgtgttacattaatccatctatgtatcttgtttatttatggactatggtatgaactttcttattttaagatgtgagttttttgattacg

SEQ ID NO: 29709 - DNA, 860 bp, Glycine max
  Clone ID: TF_GmC288365_1
tattcattgattcttagagttcttccttccttccttccttatttgtttgtttctttcttaatgctccaagagatcaataggtctaaacaaaaatgagttattgcaacaactttcatcatttaacttcaaggaattaatgagttattacatgcatgcgtaaataagaaaaatgagcatgcaaaaggagagtcctcttattagactccacagtttcgaccaaggccatgcatggctagctctactgcaccttctcattcacatctcaccggcagtaaccggtcagccggtaaccccgccggtgcaacccgacagcaacaaatccgtgatcgccatcatggccatcgtggtcatcatgttcctcatctcagccttcctctccctctactcccgcaagtgctccgaccggccggtccagacacgtggcatcctcgacctcgcgggccccacgggcgcagccggtaacccgttgcaagccgaatccaacggcctcaatcaagccaccatagaaacgttcccaactttcctctacgccgacgtgaagggtctcaagattggaaaagacacgcttgcatgcgcggtgtgcttgaacgagttcgaagacaacgacaccctccgcatgatccccaaatgctgccacgtgtaccaccccgattgcattggtgcgtggttagcctctcattccacgtgcccggtgtgtcgtgccaaccttgttccacaaccagaagacatgaacacgaacacgaacacgaacatgccttcaatcttgtccattcagatacccaatgaagaagaacgtgaacatgaacatgaacatgaatacgaggctgttattgttggtgagcacataagaggatgttgac

SEQ ID NO: 29710 - DNA, 3134 bp, Glycine max
  Clone ID: TF_GmC689_1
tggccatagaactcaaatgccctatctgttggagtttgctcgattctgctgtgtcgcttacctgcaatcatcttttctgcaactcgtgcattttcaagtccatgaaatcagcctctgcttgtcctgtctgtaaaattcctttcactcgtcgagaggttcgccctgctcctcacatggacaacttggtcagcatatatataaacatggaagcttcttcaggagttaatacatttgtaacccagaatgcccctgttactaacttatcagatggagaaaaggaatgtgaaggtgatgctgactctggcaagatgaaagctggtggaactcatgaaggtcgtccgcaggagaagaaaacccggaagaaaaagaagtctaagaagacggttcaggccagcatggaaagttcaggttctgagtttgcaaagccttcttttccagcaaagaaaagggtacatgtgccgcaaaatcttctttcagaaactccaatgaagaatttgaaaattggagactctctcagtgaaattaacaaagagaaagagggaacggaaaaggtcccagtcaaggaaagtgaaaggcccctccaaagtgaaaaagataatcctgttctttcgcctttcttttggttgagagaggaaaaagatggtgaaatgttaagtcaacaaactgatgaggatcaaattattgatggctcaacaccaaatcctccttcattcagtgatctcaaggactctgatgatgaagtccattctaatgttgatctaatggatgaggtgcaaaataaaagctctgttaatttatttgacagtgaaatgtttgaatggacacaaaggccttgctctcctgaattgttttcaagtccctctaaaatgcaggtcatggatacttatgaggatgatgaaaatcaagaggaattggtggcttcctcactagagctggaggcaaatctgccaagagttgatgctgacaacatggaatttgagaatcccaaagaaggaaatagaatggctgatgaagtacctccgagtgtatgttttcctcaaatcagaagttctgatgatctaaatggaataaagaagtctacaaaaagaaggaaggctagagataaaaataaacaagagcagattggagaaccaaaaaattcatttgatgaaatgtatgttgaggttactcaggaacaagcattggacaattcttctaatctggggaagggtagtagaagaggcaagagggtttgtttcaataccagtccaattccaacgcctataactgcttgtacagtccccaatacattaggagttcaaagcattggtgaaatgaagaaggctaagaatatagatattttgccatgtaaacaagaaaatgagaagcattatgctcaggaaatttctggaaaaagccagatgaaaatatctggaaaacaaaatatcaatcaaatgaatgagtttgctggttctgattcatccattttcagtctgcgaacagataataacgggaaggactctaataggaggcaatgcaaaagcaagtattccagaaaaactatatattgcagtaaagaattggaaactactaaaaggcaaaaactttcctcggcttgtatctctaagactaaaaacaatgaagaaattctacctattgaaagtattcatcaaggtcctgatgtcagggatttgaatgatacatcaaaagagaaacattgtcccttgatggatcaaacagtgttaaggaaatgtgagaatcttgtaaaaaattatcaatgtgttttctgtctctcatcagaagaatcagaggcttctggccctatggtgcattaccttgatggcaggcctgtaacatcagattatgaagggggatctaaagtcacgcattgtcacaggaactgcacagagtgggcccccaatgtatattttgatggtgattattcaataaatcttgatgcggaaataagtagaagtcgaagaattaaatgtagtttttgtggactaaaaggcgccgcacttggttgttatgagaaaagctgtcgcaggagctttcatgttccttgtgccaagtggacttctcaatgtcgatgggatacgcaaaactttgtcatgttatgccctctgcatgcttcctccatgttgccctgtgaaggttcaggatcccaaaaaaggagcaagaaatgcacagctagtgagggaaaagcccatggtcctaaacatgacacaacaagccaaagtcgggctgcttatttatcatacaaaaaaattgtactatgttgttctgctctatccgtgcaggagagggaagttgtttccgaatttgaaagagtatcgaaagctacagttttgaaaaattgggactcgagtgtcacccatgttatagcatcaacggatgaaaatggggcatgcagaaggaccctcaaagtattgttgggtatactggagggaaagtggattctcaatattgagtggatcaaagcttgcatgaaggaaatgggtcctattgatgaggagtgttatgaaattaatgttgacatccatggaattcgagatggtcctcgtcttggacgactaagagtattgaacaagcaaccaaagcttttttatggctacaagttttattttatgggagattttataccttcatacaaggggtatctgcaaaaccttgtggttgctgctggagggataattctgcacagaaaaccagtgtctggtgaccaagaatcaacttcaccagatatgcatacataccaaacccttataatttacagcctcgagcttcctgataaatgtaagccttcgaaaaaggatacaatttgcagccaaaggcgtcatgatgcagaggttctggcaagttctacaggttcaaatgtagcaagtaatacatgggttctgaattcaattgcagcctgcaaactgcaataccttgctcaatgaatgtgaaaattgaggtcatttacatgcatatgatctcaaattgatgtttttccttttcatctttaattatcatgttaagaataatattgacaatattattcaacaaaatatttagacctcataatatatactgtgaatgtatccccgatggagcgagaattgtgtttgaaaccgtcttatatcaatggtaaaatctcaatccttggcaatttt

SEQ ID NO: 29711 - DNA, 1886 bp, Glycine max
  Clone ID: TF_GmC1038_1
atctcggtatagggctggagccagggaaacttcactttttgtaaggaacttgtcaagttcataaatttcctttataatgtcatcaccaatagcatttttttaactatattgatatatgatcgatgatgaaacaaaatttgcaccagtgaggcgctgatgcaccaacacaatttgtttccgtacaccgtcaacacctgtgtaacccacccatgaatctgtgcaacttctgtgtcctctctgaatctgttaacaccaaccatgaagacagatcatcatcaggtcattgcctcatcacaactaagccacaccatttcacgaatcagcaaccatcctacgatcatcaggaggaggagcactgtccaaaggtttggctctgatttttgccgaaaatctcagggcaagagaactttggaaacacaaaatgtttgatgaggttctgattgaagacattatgcgtaatggacgcctgaataacatcagtgttgatggcagccaataatgccttccaaacacaaacaaaccctgcagcgatttgtttccttccatctccgccgtaccatgtcggaagcaccaccgtctcagccatcgcctccaaccgccaacgcgtcaccaccgccgtactggtgctaccactgcgagaagcgcgtctccatcgaaacgctcgcgaatctccccgacgtcgtctgcggtgagtgcaagaacggcttcgtggaatccatccacacgccgtcgcgctctcgctccccctccgcctcctccgacgacccctacttcggctcgcagttcctccaggtccttcgcctaatcgctcagtcggcgcgtgacgacgacgcgtcgcctccgccgccgccgagccgctctccggagaacgatttcctcaggatcgagctcggtggctgggacaacgacgaggagaacgacaacgacaacgataacgacgacgaggagttcgaggaacacgaggaggcagaggatcgctccggcaacgaggatccgcacggaggagacgacgaggatctgagaagaaggaggcgcgagctacttcggcttcggattagggatttggcgacgcgtacgaggagcatgcggaaccggatcttggattgggccgagattctgatgggcctggaggacaattccatcgagttccgcctccagctgccagaatccgaccgctacgtcgggaatcccgaggattacgtcgacgcggcggagtacgaggcgctgctgcatacgctggcggaaagcgacggcggaggtaggagaggagcgccgccggcgtcgaaggcggcggtggaggcgttgccgacggtgaagattgcgtccgaaagcgaagccgtggcgtgcgctatatgtaaggatttgctcggtgttggagacttggcgaagaggttgccgtgcgggcatgggtatcatggagattgcattgttccttggttgagttctcgaaattcttgccctgtttgcaggtatgagctaccaacggatgataaggaatatgaggaagagagagtggttaactctgcttcgagttccggtggaggtggaagtgccattgtttgattccgcttggtatgctccgtcttgctctgttctcttctgccatttgtgtaatatatttcgtggtttctgaatttcttctttttttgttgttggcattagtggatttaaatcaaagcttgcgccatgttattattaatttatttgaagcttttattatgtagttggcttcttagctttcagatgatgctaagatacttgtatatagcatttgaatcaatgtgaatgtgatcatatcacactacctcaatggaattttcactttctccctgtttctactttcgcatcatgcctaattggattacttgatgcatgctcttattttt

SEQ ID NO: 29712 - DNA, 896 bp, Glycine max
  Clone ID: TF_GmC787101_1
cactctcgaattcatattctaattctagagaaataaaacaagagcacaataatgtcactctgttatattgcaagtaacaaatcctatgctaagatagaaacgcagatccagcaagttgcttcttcactctctgctcaatcccctgatctcagacaccactccctctgccattccaactgtccctcatcattatcatctccgacgtcagatacagcaggtccgaagcctgcaagtcgctccaccgctgctcgagcccacacggacctgggcctgggcctgggcccgggccctggcccggggagacaataatccggtgctccaacctccgttccacgcttgccctctccgtctcttgcgtcaacaacatcccgtcttttctgggacgcacaaaacaaccaaccccaacgctctcgttcttctttctcgatgtggcgctacggccgcccggtgaccttctaaacgacgtcgtccacctccgactctgctgctgctcctccgttgtttctccttcccccaccccaagcggacgaatgcctccgtcgagactccactatctcctgcttctccaggtccaaattcaaacgcacgcgttcctcttccttgttccgttgttgttgatgactctggcggaaaggctttgcgtcctccaccaggagaatgtcctccggatccacgcggtagcggcagagaggacacgtggaatgcgcgtccagccacgtgtccacgcactccacgtggaacgcgtgcttgcatttcggcaacagccggagaacctccgcggcctcgaacttgttcaggcacaccgcgcaatcgagtccttccttttgcccccgcagcgctccgaatctgaagaccggcaacgattccaccacggaccggtcaatgccggagttttt

SEQ ID NO: 29713 - DNA, 1607 bp, Glycine max
  Clone ID: TF_GmC255_1
gcaaatagtccatagtgaaacttccaacctctcctcacctaacctaccattcatccaattcttcttccatattcccttattcccatgttgttttgatgtatgctttctctctaaacatggtgctgcatcacagaaagcttttattgtttccaccaccaccaccaccactctgtagaagtgcctgtcctgagaaatttaatgaccctctacccccacctaactccccagatgattatttgacccaaagtcccaccaaaaacatcaaaatctccaaatacttgatcataagtttctccattgtagcaaccgctttcattgtcctcagcttctacgccatctacgccaaatttttctctcctcggaacaggtcaatacgaagaacactatcacgcccagaaacagaacaagatttcttggacgaggaagaacaacaacaacatggtcctgtcgttgaccatcccatctggtacatccgcaccaccggtctccaacaagcagtcatcaccgccatcaccgtctgcaattacaaaaaagacgaaggcttgatcgaaggtacagaatgttcagtttgcctcagcgagtttcaagaggacgaaagtctcaggcttttaccaaagtgtaaccacgcttttcacttaccttgcattgacacgtggcttagatcgcacaccaattgccccatgtgtcgtgctcctattgtcactgacccaacaagggttccttcttccatggaccctactgcgtttgaaacaagttcttttgtggaggagatttttgaaaatagtgcggagaatactcaaaatagtagtgatgatttgttgaggggtgaggaagaggaaagagtgcaagaagatgaagcgtgtgaagagaacttggcttctgaacttgtggtgactgtgcagcagccgagaagatcggtgtctctggattcttcttctgctgctaagatcagtcttgctcttgctactgttgtgtcaggggaatctcacggggatcattcaaagagggttggtgggaatgggaatttggctactaaaggtggttctagttcttgttcttcgactagttcagtgaaaaggtcacgatcattcaatgccaaacacttgctatcatggtatagccgtagtcagagaaagccaaatgctcctttgagaagcttctgattgatttcgagttggaacccagccttaggtcggttctatgaaaaattattaggtggtctgacaccattactaagtatctatagtctcgatactccatcaatctctatgtaacatatgtctaagttttttcaatttaccagaaagaattaataaaactcaaatatatgttatacagagataagtgaagattatgatggtcatggaccatcctaataatttctctggttcttgccaattagagtgtcttttgaactctcaacaaaggtgagggtttgaagggtttatgtgtgaattgatgtaataggtcatgtgatgatcaagtgtatataaagtatgatagcaaagcaaaaaggttatgaatgaattgaaggttgatatccttgccattttggctgatcaaaaataaaaaaacaataaaaacggcgcggcccgccgtacctgagt

SEQ ID NO: 29714 - DNA, 946 bp, Glycine max
  Clone ID: TF_GmC765_1
ccacgcgtccgcttttggccacactctccacaacacaattatgccaacccaaccagattcaccacccaacaacaacacgttgacccaaatgtttcagaacatcttctcagacaacagtaacatcatgctggcagccatcatttcccttctcttagtaatcctctttgtccttcttcttcacctctacgccaagtggttcctcgctcaagcacaggctcaggccaacgcccgccgccggaggcggcgccgtcgcacgacggtgaccgtctccgacgtcctaggcccggcaaggttccaccacttccacagcttcaccatagaagacagttcacccctctcaacaaaagggttagattcttcaaccattagaacaattccactgttcatctatgaacacaacaacaacaacaacaaaaaggtcgaagaagaagaagaagaacttgaatgtgtgatttgtttgagtgcatttaagaatggtgaagtgggaaggtgtttgccaaagtgtggccatggcttccatgtggagtgcattgacatgtggttgagttcacactccaattgtcctatttgtagaacctcaattgtagcaagtattgtggaaaataattctagtgatgatcatcatggtggagatcatgatttggttgagattgtgactgaaggtggttctgctgctccaagttttgagactagagagggtgaacatgggaatagtaataatggaaatggaggagcaagaacaagtgtttctgttgtgtcagaaaattcttcttctgagttctttggatgctctttggagagaatgcttggcaagggtttcccaatatcaagtaatgttaattaattaatgaaatcacatgcttgagatgtatatgaccatcgaagtatctattttctctatacaattataaccatgaaatgtgcaacaacaactatagttctgtgt

SEQ ID NO: 29715 - DNA, 1383 bp, Glycine max
  unsure (1)..(1383): unsure at all n locations
  Clone ID: TF_GmC248_1
ggctcgaggttgattgttgaagtttctcttctcttgctctgactccaatatttcctttaaaataaaaatagcattctcttccttcttccttcttccattcattcattcacattccacgctttcttcagagcctgcacttgttccacccttcaacataccactcctcctcttccccaattctcttatccgtaatctggcactcttcagagaagactttgtaagataaaaagagaaatggccttagaccagtattttgatgaggctgtgccccagttggattccttggaagataaatcgtctctcgaaacatggaaatgtggcagtgacgatattgcagattcggatagaaatgcctctggtggctttgattgcaacatatgcctggagtgtgtgcaagatccagtggtcactctttgtggccatctctactgctggccctgtatttacaaatggcttaatttacaaactgcctcttctgaaaatgaagaagagaagcaacaatgtccagtctgcaaatcagaaatctcacagtcgtcccttgttccactatacggccgcggccaaaccgtgttaccatctaaaggcaaaggccaccaagtaggggttgtcataccaagaagaccccttggtcctacacttgattccgcaactgtttccccacctatttctcacgtttatcatcgccattatccgaatcatcctcaacaattcaactcaattcctggcagttacacttcaatgttcaacacaggtggttcactagcaaatgcttttgatacaacatatggagtctttggtgagatgatatatgcaagggtctttgggaaccagatgactaacacatatacatacccgaattcttatgatctttcaaggaacagtaatccgaggatcagaaggcatttaatgcaagttgatagatcactcaatagaatcacttttttcctcctttgttgcattgttttgtgccttctcttattctgactgctattgcatattttttgtgcaatacatccctgtatagaatacaagcagtatgcagattctgccagatgcatcatatactcagaagttgtttgatgatgagagagatatctgtaactaataggcccttttgggtacatagcttaattaaggacatattgagtaaatgcttatcatacgataatcgtttccgtattaaattgtttctataaaagaaaaaataaggttaaactattgtcatataaaaaactagaaaaaaaaaaaaactcgagactagttctnnnnnnnnnnnnnnnnnnnnnnnnnnnnnnnnnnnnnnnnnnnnnnnnnnnnnnnnnnnnnnnnnnnnnnnnnnnnnnnnnnnnnnnnnnnnnnnnnnnnnnnnnnnnnnnnnnnnnn

SEQ ID NO: 29716 - DNA, 785 bp, Glycine max
  Clone ID: TF_GmC119051_1
cactttcattgtgtttgtgtgcaccagaatcatttgtgggaggctaagagggggtgttgaatctcggatgatgtacgagattcaatcaagaattgatatggaacagaacatcatgttaatgaccctgaatccgatcctgttcttcttgatgcaatccctactttgaagttcaaccaagaggctttcagttcccttgaacacacacagtgtgtaatatgtttggcagattacagagaaagagaagtattgcgcatcatgcccaaatgtggccacacttttcatctttcttgcattgatatatggctgaggaaacaatccacctgtccagtatgccgtctgccgttgaaaaactcttccgaaacgaaacatgtgagacctgtgacatttaccatgagccaatcccttgacgagtctcacacatcagacagaaacgatgatattgagagatatgttgaacctacacctactgcagccagtaactctttacaaccaacttcaggagaacaagaagcaaggcaatgatcttagagaactaaaggggttgttctgctcaaaaagagaagaatgtagaatttctgcttctatagaggaatgcttctaattatagattggattcaaattctttgtctgtaatatggccttcatattcacttggtggtgtaaatatgtttccttttgtagcatatgcgggccaaggttttggtggaatttcttgcataccgatttgaagttcttttgtctatggtatcgcttactcaagcaagcacactgcgcttgttatgcta

SEQ ID NO: 29717 - DNA, 3278 bp, Glycine max
  Clone ID: TF_GmC281_1
tttggcattgccaagggaaaaaagaatactttcagttaatgatttaagttttagtcttgtagagttttcaagcgaatatgtttattagttaaaaggctcaccagggagtgatgtgttgaatacaagtagagataaatttgcaatttactggggagtgatgtgttgaatacaagtagagataaatttgcaatttagcatagtgaaaggatggtatgttggtcatagataagtttttgagaatgtgctatatttcacagaagtaagaaaaccaatcatttttttattgtgggttgttacatatggcaccgtgggatttgcataaaaagtaaagcacatcccaagctattattgttcactcatattccactctaaatcccttttttttatagaacccaaagcaatggtcacaaaaagtgcttgaaaactatctcagatatcataatcttcttgagcattacacacaaccaacattgttatcgatagattaagaacataccttagagtcggatatcaaactaaaacgtccaatgcaatttttcatttaaagctatctgcttagcaaaattttcatccaattcaatgtttaaattagacataaacaccagaagcaagtaggaggaacaaggacccaaaacccaagaagactgaagccactgcaccagttgtcagctcctgaacaagtgaacgacttttcctagaagatgttgcttcataaatgaagaaagaggcggttaagacgaggccgatggcgagggtgaagacggagagcgtggggtaccacgaatcggggacgggactcgttatcggttttggagccatcacagaatgcagagattagagcaccggatcttgcacgttccaaaacccctctttcgctccacgaatcgggttcgggactcgttatcggttttggtaccatcacagaatgtagagactacagcaccggatcttgcacgttccaaatttcaactgcaatttgcagactacttacctctcgcctactcactccctcgaatcgaacctctttgcaaagattcgatttagtactaaaaagatattctgatgctcactataaatactgccttgattctctcaaacaataaaatcaaggccaacgtatttttacagttctcctgtggccttcgattattgccgaagctgggtagacgattactctctgtgaaattggtcattatgtttctcagggtacacgcaacaatatatgtataagcgtgagaagagttgtcttagtgaaaccctaaatagcagatgctatgctgtttataaacatgcgacctgatgatacacataatcaattaaatttagttggttgttgcccagttcttcaaggaattaaatggctttttatataagatttccctatttttttgtcaaatttatgaccgagtaattacacttgtgcaacgtagaaaagggtctttaaagctgaagatcttggatttgcttagtatgagttgtttgggtaaaatgtgttgacataagagactcccatggtgtttatgttttagaaatttgagtagctatattttaggtaattctgtcaacttggatgttttagcccctggacaattgcacatccttttctcgagtctttacatatgcctctctgccctacttctttgttatgatggtgctcatgttgaatgtaacttgatatgatattgtattaaattcacagttagagaaatatgaaaaagcccgggatgttattctttcaggccttcaagttgatccttttagtaattctcttcgggcttctcttcaaaatttggaaagtgtttcatctagttcaagagggatgagtacacatggacatccagaacgtaatgatgattttgattgcactctctgcctgaagttactgtatgaacctgtcacaaccccgtgtggacattctttttgctgttcgtgtctatttcagtcaatggatcgtggaaacaaatgcccattgtgcaggactgttctgtttattagtcctagaacatgttccatcagtgtgacattgaagaacatcatacaaaagaatttcccagaggaatatgctgaaaggaagcaagagcacgacagtttaatcaaagctggtgtagatttactccctctttttgtcatggatgttgtcataccatgtcaaaggtttccactcaatatatttgaacctcggtatagactcatggtaagaagaataatggaaggcaatcatcggatgggaatggctatacttgattcaacaggttccttagctgagtttgcctgtgaagtggaaatcacagagtgtgaaccacttccagatggtcgtttttatatagagattgaaagtcgcaggagatttcgtatcatccattcctgggatcaagatgggtatcgtgttgcagaggttgaatggatacaagatattatgccaccagaagggacaagtgaaagagatactttacagcaacagacatataatgcagtcgaagatgctagatcatggatagcaagagctaaagaagcagcaagacatgatcaaagaaaacttgagagactcgccagtgttgaagtaatgatgccctcaccaaaagaccctgagcgctttagtttttgggctggctactctttccaatcggaggcctgcggaaagattggatctcctacgcataagagacactgccgagaggattagacggggcctgatatttctccgccaggaggaacaagggtgcagaattcagtaagacaagctgaggagggctgccactattattgcaattgaatatttgtttattgcaaattcatttagaagtctttcaacattcttcggcctcataaacaaccgttgatgaggtcatttttgctgtaacatagggttgaacagtttttctaatatatataatcatctacaacacattttttattggccaaaaaaaaaaaaaaaaaattcctgcggcccgaattcctggtgccgaattgtctgtaagttaaaattttgtgaatgtgtttgtaagctcagtgtcatgttggatagaatgctagtttatttgactataggcatgcatatgagatttttttttgggtgtataatggtggtaatggggcttaagattccatatactatcttccactgtttggtcgaccctagttgaataatgagatctttgtttgatcccctccagtgttcgtgtaattatttttattattcaaccatgtgttgtttattcgtttaaatagtccatgtttatgtcattattatagtctatctcatttgattatatgactat

SEQ ID NO: 29718 - DNA, 2143 bp, Glycine max
  Clone ID: TF_GmC281_5
ccacgcgtccggaaggagccacgctcgaacacgatgcccctaaccaatcatcttaacataaaaacattttaacattaaaactcttttccatttctcactctcttctcttctcttacactctctcccaatccaatcaatggcttcttctctttccccttctccctcttccctcgaccaaacccttcgcgacgtcgacgactacgttctggaaaatgggtcagaaggtttgtcaagggacacacttcattatgtgtacgagcttgtgaagaatgggaatgtggcatttcgagagaacagaatggaagaggcaatcaacttttactcaagagccaataacatcaaatcaggtgatccaatcatcctcagcaatcgaagtgcagcttatattaggattagccaatatttcatgcacagaacaccatcatcttcagaacgtaggccattgagtgggcttgaacccacaacacttgctgaactgggtttgaaggatgctgagaagcttgttgaactccaaagtaattcagcaaaatcatatcttttaaaggccaatgcttttctactgttagagaaatatgaaaaagcccgggatgttattctttcaggccttcaagttgatccttttagtaattctcttcgggcttctcttcaaaatttggaaagtgtttcatctagttcaagagggatgagtacacatggacatccagaacgtaatgatgattttgattgcactctctgcctgaagttactgtatgaacctgtcacaaccccgtgtggacattctttttgctgttcgtgtctatttcagtcaatggatcgtggaaacaaatgcccattgtgcaggactgttctgtttattagtcctagaacatgttccatcagtgtgacattgaagaacatcatacaaaagaatttcccagaggaatatgctgaaaggaagcaagagcacgacagtttaatcaaagctggtgtagatttactccctctttttgtcatggatgttgtcataccatgtcaaaggtttccactcaatatatttgaacctcggtatagactcatggtaagaagaataatggaaggcaatcatcggatgggaatggctatacttgattcaacaggttccttagctgagtttgcctgtgaagtggaaatcacagagtgtgaaccacttccagatggtcgtttttatatagagattgaaagtcgcaggagatttcgtatcatccattcctgggatcaagatgggtatcgtgttgcagaggttgaatggatacaagatattatgccaccagaagggacaagtgaaagagatactttacagcaacagacatataatgcagtcgaagatgctagatcatggatagcaagagctaaagaagcagcaagacatggtaatttttaaactataattatatgatgtttacctaggactactttgtactttggtgatagtgaaacccaagatatattggtaatttttaaaccatcatcagatgatgtttacctactacctaggacttctttgtactttgattataatgacaaccaagatatattggtcatcgcctttttcttttcccattttttttgggggggttgctgaacatatatttccagcacttataggaatctgttaattctgatgatgctttagtttttgttatcctatgtttctgaatgggagtgacctttttcctctttgcacctttacaaatgacaatggactgctgcaatactaaactactggaatatcatacagatcaaagaaaacttgagagactcgccagtgttgaagtaatgatgccctcaccaaaagaccctgagcgctttagtttttggctggctactctttccaatcggaggcctgcggaaagattggatctcctacgcataagagacactgccgagaggattagacggggcctgatatttctccgccaggaggaacaagggtgcagaattcagtaagacaagctgaggagggctgccactattattgcaattgaatatttgtttattgcaaattcatttacaagtctttcaacattcttcggcctcataaacaaccgttgatgaggtcatttttgctgtaacatagggttgaacagtttttctaatatatataatcatctacaacacatttttt

SEQ ID NO: 29719 - DNA, 1222 bp, Glycine max
  unsure (1)..(1222): unsure at all n locations
  Clone ID: TF_GmC7141_2
gaagtgcgttagaacagaaaagaagtgcaaacaaggcgcacataataatagtacccttcttcttcgtttcttagctctccactcgcctattaaccctcaccggaatctctgattcgatcttggttttcccatatagcacaagacatagagccgtgtgaatttgcgatatgctgggtaattgtcgccaatacccaatctcttgggtactcctttaccaacccccaccgccgcattaattatttttctcttggaatcggacaaaggttccactgagactgaaactttttaaggccaaaaaaatgctcgattcggttcttctggcgcttttcttgccgtgccttggcatgagcggggtttttatcgtctacatgtgccttctatggtacgccactacccgccgcaaccaaccccccattgacggtcaaccggtgaagcccgtaactgataagggtctatccgctttggagttggagaagcttccaaaaatcaccggcaaagaactcgtcttgggcaccgaatgcgccgtctgcctcgacgagatcgagagcgagcaaccggctagactggtccccggttgcaaccatggttttcatgtccattgcgctgacacctggctctccaagcaccctctttgccccgtttgcaggaccaagctggaccctcaaatcttcacttcccaaagcccttgctgaacaatgaaacattcgttattcaaggaatgaatgagggaggccaaattcttaattatctttattgttttctttcttagcgttctttctagttttctagaactcccgttacttatttttaatttattattattatatttatatttatgtgtcgtgtattgtggttaagtggttgttgtgtgttatggcctagatgaatttagctttagtacacgaaaaatcagaagccatggtttaatttatatattatgtggtttggactttggagatgtaattgtgaagcttatttgaatttttcgctttgtttcgtaaagtattgcttgttgcacgtaaagaaggtacgaatggaggagaagacaaaggagtggggaattgacgctatcacgtaaatcccagacacgtangtgagggatggttgaagcaagtgcgggtcgtgaactgaacgttggttacgtttgctttttccatggggagtcacagagtgcgcatggtgattttgattttgatcttatcaccccaaaacactatacagc

SEQ ID NO: 29720 - DNA, 1305 bp, Glycine max
  Clone ID: TF_GmC111084_1
tacggctgcgagaagacgacagaagggggcagcacagcagtgagtgaacccaccgtcaccacaccacaccacaccacaccaacaaagtagaaatacttgtaacatttgctgcaattacaactccatttgtggacaatttgatttgggtggtgcctttgcgaatagttggttgaacgagctcctttgcaaccatgagttttgtcttccgagggagtaggggagatattgaaagtggcttttcagaatatgttcctgaaagaaccttgatgcgggttcatccagctcgaccagttaatggcaattctctagcttttcttatcacagttattttgatattcatgatattaaactcccctcagatgttacatcattttttgctctgggttgtactggctatctttgtgatggctacaagtctgaggatgtatgcaacttgtcaacagcttcaagcacaggccagggctcatgctgcagcagcctctgggttgcttggccatactgaacttcgtcttcacatgccatcatctattgcgattgctaccagaggaagattgcagggacttagacttcagcttgcacttcttgaccgtgaatttgatgagctagattatgacactttgagagctctggattctgatactgcttctagtactcgttcaatgaccgaggaagagataaatgccttgcctattcacacttataaagttccagtcccaccaaaagatggctcagctggtttggcgtcctcttcaggtgcagctgagattaaacaagcctctggaggaacagaggcaggtgccaaaggttcagaagatgagctgacatgtactatatgcttggaccaagttaagaggggagagcttgttcgtagcttaccatgcttgcatcagtttcatgcaaactgcattgatccatggctccgacaacaaggaacatgtcctgtgtgcaaattaaggatagggtcggtaagtgggggaaacagggaaagcgagtccgatggttcagatattgcctagtttatggttcagatatggctgtaaactgcatgatgtgaggccttgagttatgtacaagtatatatgtatgtgtattattcggtattggcgtatataatgagattggcatgagcataagattgtagtccatgtttagtcccttctcttcaaaaagtatagctagtctccatatcccaaaactatgtgtaccgcttgatatataaatagcattaaaaatgttattaaagtggaagttgataatggtgtgattgtgatacatcttattttgtatacacttcaccaaaaagaa

SEQ ID NO: 29721 - DNA, 949 bp, Glycine max
  Clone ID: TF_GmC1390_1
ttcattcttataataatcattattttcttccacaccttcgtccgcttctgccgccgtcgccgccgtcgcctcttctctcgttcgcttccgaccaattcctccgccgccgcctctctcgacgacccgtgcctcgacccttccgtcatcaagtcccttcccacttttactttctccgccgccacccaccgctctctccaggactgcgccgtttgcctgtcggagttcgccgacggcgacgagggccgcgtgctcccgaattgtaagcacgctttccacgcccattgcatcgacacgtggttcgggtctcactccaagtgtcctctctgccgaaccccggtcctaccggccacgggttcagctgacactgaaccgggttcggtttccgaagcgggtgagggttgctcctcatcgtctttgcctccgccgattgggtgtccgagaaagccattggatataaatataatcatagagattccagaggtggaaagagggtctgattctgtaaccggagatcaagggttcagatggtcattgaagaggttttgcaacgtttaagtgagtgagtgcttttgcaacgaatcacaaacaaggcatagcaactcatggatgctaaaacaaatggacgacattttcgttttacaggcaaatgttattagttttttattaaggaaggaaatcaaacttgtaacttttttctccctatcttcttcttacccaactaaacttataactccccaaacaataggattgtatgataaacagaatatctattgcttgcaagagttatcacttttggtaggtgttactctatctatagaatctcaaatctcaaatctcaatctcaattgtgtttcaccttaaccattggattggtgtatttagttttaatctgtgtatgtttggacgcaagttcaggtgttacaatggtaatttttcactttttcattta

SEQ ID NO: 29722 - DNA, 459 bp, Glycine max
  Clone ID: TF_6964406
ctcactccactaaggcacgtacactaaatcagcacgagagtgtgctaagatgaatagatataagatgaagtatgggcgtactctgtggattctcgatcgtgacctattggttgccgcgcctggcagagctccgtctgagcagctgctcggtctcttcattccagagaagctccaagctgcttctgagatcatatatagtggaacgctcgtctgctcttctggggcttggtgacatgcgttgtcagataacctgtgcatatctgccaggaaccacagtcatggattctctgcatcagagtgccaagccaaccaggctagcgccactagcgaggaatgcactgtggcttggggagtttgtaaccatgcttttcacttccattgcatcagtcgatggctcaagactcgtcaagtttgtcctctatataacagtgagtgggagtttcagaaatatggccacta

SEQ ID NO: 29723 - DNA, 639 bp, Glycine max
  Clone ID: TF_GmC63868_1
cgaagcttctcttcctcgccactctctctctctctctctaagaccccaaaacaaaaccgtgtctcctatttattttccgatgggttttccggtgggttacgcggaggtgttcttcccgaacccgttcctgcacacgctggccctcctcggcctcctccgaaacctcgtattcttcctcctccacctcctcggattctccgacttcctcgaaaccgaggtcgcctggccggaccacccccacccctccgacgaggctgcggcggcgcggcccccatccgcgtcggcgctcctgatccgcgacctccttcccgtcgccaagttcggagactccgacgttggcgcccaacaaaacggcttgtgcgcagtgtgcctgttcgagttctccgaggaggaggaggttcggtgcctgcgcaactgcaagcacattttccaccgcacatgcgtggaccgttggatcgaccacgatcagaaaacgtgccctctctgtaggaccccctttgtgcctgatgatatgcttgatgattataatcaacgactctgggctgcttttggggttaacgagttttacgccgattacactttttccttttgaactctgaatttttgaatttcaatcatgaaagtgaattgtatataacc

SEQ ID NO: 29724 - DNA, 1087 bp, Glycine max
  Clone ID: TF_GmC646_1
tcggcagtgagcagttaagtggtgttatgcctgtgtctcctgctgaagatgacatcactcattctctaataaatagagatagctttggacattacaatatgggtggtattgcagaggtattattggcacttgagaggattgaacaagatgcagaactaacccatgagcaaattcttttgttggagaccaacttattcctcaatggattaaacttttatgatcaccacagaggcatgcggttggatattgataacatgtcctatgaggaacttttagctctagaagagaggatgggaactgtgagcaccgctttgccggaggaagcatttgctgaatgtcttaaaagaagtatatatcagtctgcatatacacatgagtgttgtaatgaggataaggatgatatcaaatgctgcatttgccaggaggaatatgttgttggagatgaagttggggatctgcaatgtgaacatagatttcatgtggtttgcatacaggagtggttgcggcataagaactggtgccctgtttgtaaagtatctgcagcactgtccaattcatttttacctcattgattgcattgttccttttcttttacttttcattttgtacaaaatacagatacagatgctcctcacctcatcttattgatccatatgtacatacatagccaatgtctccatccataaaaactaataacctaagcccccggcttgatggacactggaacttgctatcctgcgcatgaaaatagtcccatctttttgttttgtttttgtttttgttttttttgtttttatcggcaagtattagttagttttagtcccatctaagtacatctttttctttctttccttttcttttattgaaaagaaattgaaagagaagaaatgatagatgatgtatatataaaagcattgataccttggaagttattagctcgttgacttgaatgttcttgtaatggttggttaaataggtacgatacgagctaattatgccctgggttggggaagtaatcaatagcgtttagatgaatggttgtaaacttaatttaaatgttttttatgttgcagaattggttttggat

SEQ ID NO: 29725 - DNA, 697 bp, Glycine max
  Clone ID: TF_GmC2052_1
aaaccaggttcaaaggcgacttctagatgagtccatcgccgacgaaccttctgcagcagtttcaaagccgtggattgaactttattgtggtgcagtctcttcccacgtttcagttcaagaaaaacgagagagaacaagacaagacaattagtgtggagtgtgccatctgcctcggagagtttgaagaaggggagtggctgaaacgtcttccacactgcagccatagtttccatgtttcatgcattggtacgtggtttcagtcgcattcaaattgtcctctttgtagatcttttgtgcatcatcacatcctacagtgttctatagcttctcacacattgctacagcctttgaggagggaggactttgaaagggttcagagataaaagtagctaccctttttgttgtttgcttttagttttgatattttcgtgaggtgaagccttgttggaaaatagaatttggatgcaaagctaacagctaaagaaacctcattttaggtgggttataagagtgtctaagcgtacataacgaagcttctattgtgttttgtgagtattgtcaatcataaggcgtaggatgattatacaagatgtttcggagttcaatctcaaatttgtagatccacgaatcatgatcaacataactgttgaaatcaagatttagcatactttatagttacaacataaaaaggacgacc

SEQ ID NO: 29726 - DNA, 1418 bp, Glycine max
  Clone ID: TF_GmC324_1
tatcagtctctggtttggtggaattgttgttttcacaatgaagacgcacattcacatagccctattcctccttctggtgtcaccgttaatccccatcgccgtcgcgcaggcccaatcccagcccaatgacttctccgacgcaaacctcaaccagttcagcccctccatagccataatcatagtcatacttgtcgtcgcgcttttcctcatggcttttttctccatctacgtacgccactgcgccgattccccttccaccaccgttagccctctcactaccgcacgctcccggagggccgcgcgtgggcttgacccagctctgatccaaacattcccaatcctcgaatactccgatgttaagatccacaaaatcggaaaagaagcgttggaatgcgcggtgtgtttgtgcgagttcgaggacaccgaaacgctgcgtttgatccccaagtgcgatcacgttttccaccccgagtgcatcgacgagtggttgggctcccacaccacgtgtcccgtgtgccgcgccaacctccttcccaccgactccgaggatgctattgctaacggtaacgccaacggcgttgttccagttccggagacgtttacgcgagacattgaagcccaaaacgacgccgtgcaagccgcgccagagcagcagaacgcggaggctgacccagtcttacccgaaccggaagttgtttccctggacaaaacactgaaccggaaccgcacgcgagggtcgcggtcgaaccggccgcggaggtttcccaggacactgaacggctcactttgcggcttcccgaggaagttagaaagcagatattgcagaacccgcaactgcatcgcgcgagaagcctcgttatcttaccgagagaaggtagttcgcggcgggggtatcgaaccggtgaaggaagtagcagagggagatcgtcgaggcggttggaccgggggtttaagtcggaccggtgggttttcaccatggcgccgccttttttggtgagagcgtcgtcgattaggtcgcccagggtggccaataacggtggcgaaggaacttccgctgctgcgtctttgcctccgccgcctgctgtggagtctgtttgagttttgattcccccttctgcaagatttcaatattttattgtatttaccaattatttttttctgccgcgatttttttacgctagaatttgtaagatgtgtataatatttggcacacttgttttgcgtttgaagataaataactgaaataagaatttgtaaaatgtgtataattaataaggtagcatgtttatttttgtaggccggttttagaagaactgggtcatgatttcatattctctttgaggttgttaagctagttagttgacctcggattttaacatacagcatgtgaagaaaaaaaatgcaaaattatcttgttt

SEQ ID NO: 29727 - DNA, 1099 bp, Glycine max
  Clone ID: TF_GmC322738_1
cccaaaggaaacttcctagccttcattccattttaagccagtagctcaaatcggccccaagtttcattacaattacaattcaagggttcaatcactgacaattcctatttatcctctttttaaacattctaattccactttcccattactaaacattcatatttaaaggtcattaaaatcctctagaagttcctactttattccgtaagaatgaaagatagtaatataatacaacactcaagcacattgttttcccaatagctagatccccttgatactccgtattctacttataagataataattggaatttattgtataaaaattaaaaacttaatatttatagaaattaaaaataaaatgaaaatcaaaccaaatttgtcgcatcgggctcacggtgactcaggtgcgagtcaccgtctccggttttggtggtggtgacggcgatggtagcacgacaaatcgggcaattggagtggttgctgagccacaagtcaatgcaagaagcgtggaacgagtgtttgcacgcgctcagctgccggacttcttcgccgttggcgaacaccgacaaacacaccgggcactcgccgccgatttccttcgcgtgcgcctccttccggtacttcacttcggtgtcggcgacggcggcgatttcgaattcctggtggtgggacacctccgacgctacggagggctcgccgtaggagggttcccggcggcggcggcgcgacgggcagccgaaggcgaagatgaaagtgtaaattagggccgggatggtgacgacggcgaggagcgcgaggaggaattcgagaggggagagatcgacggagctgggaggtccggcgaacggcggcggcggcgggaagggtaggaaggtgctcgggaagacggagtttggagctccgtcgaaggacggtgggatggggatgacgtttatttgagtggcggggcgcggcggcggaacagcgaggacggtgggtgagttttgcattgtgacagagaaagagggtgaagggattataattattaataatattaatattaataatgtcatgtgtgtgtggttttgtttgggaacttttttcaattttctcgagcc

SEQ ID NO: 29728 - DNA, 1885 bp, Glycine max
  Clone ID: TF_GmC480_1
attggttcctgtatattaaaatggtttctcatgaaaagttagaacttgaagtctaataaatgcattgttttggacaaggtgctatactaaccacctacaaaattggtagcagctctaaacgaaagcaaaatagaaataagaactttttctttatcgctcaattcaattgggatctcttgaactctctctctctggtgtctaaaacaaggtcttgatcttctctccactggggttccctccgtttcttgagccccttttttttcttttccgggcctttgccaattctcaatggaggttccagaaatggaaggcaagactgaaagtcatatgacatcagcagcagcctttgtggaagggggggttcaagaagcttgtgatgatgcttgcagcatatgccttgaggatttttgcaaaagtgatcctgccactgtcactaattgcaagcatgagttccacctgcagtgcattcttgaatggtgtcagagaagctcccagtgtcctatgtatttcctacctatcagcaaccgagatgcttgagggatagtacaagtcgagaactgcttgaggcagtagagctggaaaggatcttgaatgatgaaacacttcgaaatttcgtcattcttcatcatgcagattttgaatattaggatttaccccagggtgtgaaggaggccgatattgaagagcgaataaagccgaattaaactgctgcagccccaatgaggagatctcgtcacctcagccggagggaaggccatcgaactaggccatctgctcatggccgtccacacttcttagtatactcaactcagcctagtgcaccaccatcagctgcaggagggggaagtgaaccagctgcaattcctgtaggaagtccatctaccccacttacatttgatggaaatgagcaatcatcactacagcagatcccccatgttcaaactcagagttcttctttaacttctgcctctactgtctcaacaacaaatcttcaaggagttcactctgatgatagaagttttgcctctcattcttttcctgcaagccaagacagagcacagccatcagaacaatcattctctgattctctgcgctccagatttaatgcagtatccatgagatacaaagattcaatttcgaagggcacaaggggatggaaggagaggctcttctctcccaattcttctatgtcagaacttggttcagaagttaggagagaattgaatgctaaaattgctagcgtgtcccgattgatggagcgccttgaaacaagagaaaataatagtgctgcaggaacttctttatcaaatcatttggtgaaccgttccattgcagagacaagcaaccaaagcaatgtggaagctcgtggagagaactctttgcatggcaataatactccaactactttttctgcaagctcagattcaaaatgatctctagtttgcttctgtgaaggcatctttgctcaacgtatcatgtttgaaggctaactgtttgctcagacatgacatgatgaggaatatatgctcatggcagttgttggatttcaattaaaaaagtagaatctgacacccgtgtgtagagctaaaaactttttcttttgtgtatatattatatatgcggggaactgtagggagaaagtatttaaggagtaatccaagggagaaagtgttctgaaattccatcagacttgtgtccacaatctgtccctgtgatttactttttggagtcaatggaaatatagatcaaggtggcaactgtagttcttggtgtttctaagctaaaacttcaagcttgattaggctaaaactttgttttgaaattcacattagggaatatgtgaagctatctcactgttggaaattaaaagtaaaatcccgctagt

SEQ ID NO: 29729 - DNA, 1315 bp, Glycine max
  Clone ID: TF_GmC5808_1
gaagcgaacaaattacgattttcttctatctataaagcaaagagagaagaaattacggattttccatcattccagaaccgtaatctccaaaccccacttcgtcagatactaaaaagaaaccaacagtttccatacttagtatttcttctctgactgactgatcaggttgacatcttgacattgcaatcctgccttttggttccccatttccatgtttgtggattcttcctgattcaaaggcaatatattgtgtcttcatagctcagtttttgagcctcatcagttgcaacttgcaacacaaactttatctataacttggtatctctaaaggactctcagcattgatcaaaatgggcctctctagtctcccagcaccatctgaaggagtattatgtgtccttctggtgaacactgtattgtcaatttccatattcaaaggcattgtaaggacaatcctgcacattgttggcatccatcttccatcatcctccacttcaccctcttcaccagatccctcccaagccgcacctgagtcatttgaattgcatcttagtccctcggagagttacattgaagagttcagaagccggacaccgacacttcggtttgacagtgtgtgctgctctaaacgacttgaacatgactgctctgtatgcctcactcagtttgaacccgaatcagagataaaccgcttatcgtgcggtcatctcttccacaaagtgtgcttggagaagtggctggactactggaacattacatgcccactttgccggactcccttgatgcccgaagatgacacaccttgctttcagtaagcaaaacaagtgagcatgccaataagagagagtttcatgtacagtgtagtgtacatattcttgagggtttttgatgttcatgcatctgagttctgccacctttttaagttttaacctttttgccttttatggtctagagtttgtggagggttttgctttcccttcttctgtctgtgctctttagcacaaatgaggggtatactttttgcttgcatgttatgtttgttcacaatgcccaccttgtttggacctcagagccttaattctatatttgggcattttgatcctaatttggaagcatggattgcagaatccatttgttttgcctttcaaactctcctcaccatgtatatattgtgtgtaaatagctttggttgccacataatagagtatattttgtttaatttattttttacaccattaaaaaagtgtataatgagtatgtattgaaagaatgaaataattttagactattattcaatttaaaaaaaaaaagaagg

SEQ ID NO: 29730 - DNA, 797 bp, Glycine max
  Clone ID: TF_GmC134317_1
atttagatataaataaaaaagcaagaaaagattggtgcattatagaaatccctttagactttagtttagtgttgcataatataattagccatcatcaccatgaaacctctctctaagctcttaaacaagctttgtgggaaaatgataatgctattagcatcccttctaatagagcttatcattctcattcagaagctaagggaatcacgtcccatcagcacccgccaatacatcaaactcatcgagaagaagaaccccacaatttgctacaccaaaagatttaacttgaaggcagagcacgctacagagtgcagggtatgcttgtccgaattcgagcaaggggagaagctgaggaagctcaaatgccaacacacgtttcatagggattgtttggacaagtggttgcaacagtactgggctacgtgcccactttgtcggaaacaggtgttgcctgatgatgttgtgttcaagcaccgtcagcatcagaatcaaccagaggctgcttctaatgggaatcatgacaatcttctctatcttttttcagcatttcgtggtggcaacacttaatttgaacagataacaaccctctctcaatcaccttcaacatatatatatatatatatatatagtagtttagtactatatagctaaaacaaaaccacctaattgttttttatttttagaagaaaaaggattaatttgttattcttcctttactaggattcctcggaagaatattactatggatgtacaccatatatatagttacagatattgaaagattgatgttaactttg

SEQ ID NO: 29731 - DNA, 723 bp, Glycine max
  Clone ID: TF_LIB5118-055-A1-PF1-D5
ggtggctgtagtttagtggtaagttaaacctcgtaaatcaccaaattaagaatcacattaagcaatttcattccacaaattaaccccaacccattccaaattttcgatccaagatgaacaatagcaccaacaacaaggggaacaacggttttgacccaagtgagttcacatatggagtagcttttgtaattggcttgatcttcttacttgtcagcatagctttggcatgtgtgcgtctgcgcatggctcgtggtcctaacatgctgaacattttggctggtattccaccatctcgccatgcaagatcatcagaagaagacaactcagctgaacaagggcttcatcacattgacaaaagttttgagaggtatccaaagctgctatactctcaagtagagaagggttcaagttcatcaagtgttgtttcttctagttgctccatatgcttaggtgactacaaagaaagtgacacgttgaggttgcttccacactgtgaccatcttttccatcttgcttgtgttgatccttggcttaggttgcattcaacttgtcccatatgtagaaaatcatctattcatgcttagtattggggatcacatctctcctttgttgttgtagaagatttgttatattagttaaatcagtatatatatatatataaggttgtaacttaggaagattaattaaccatatatttgatcgatcaattgttctgctgaattg

SEQ ID NO: 29732 - DNA, 1298 bp, Glycine max
  Clone ID: TF_GmC410_1
tacggctgcgagaagacgacagaaggactgttttcctttgtcccttttgtatcacagaatcttcctcgcatctctcgtattccttctccttctctctctcctcctttcccttcatttcctggttttggtttttctatggtcctgcctttccacacaatccactatagtttcttctataccttccttgtggatctgtcactatgacttcctcactcgtgaagatccaaggcgaacaggtcctcaccaacgattttcaggacctttcaatcaaagatctgagtgagaaagggactgaggcagagattcacaaggtggggtcttatggaagccatgggggaatctgtgctatctgcttggataagatagtgctgcaggaaactgctcttgtaaaaggttgcgagcatgcttactgtgtaacatgcatccttcattgggctacataccgtgagaaagttacctgccctcagtgtaaacatccatttgagttcctcaatgtccatcgctcacttgatggcagcattcaagattacatgtttgaggagagtgtgtgcctgctacttcgggcctcatggttcacacctttatctgttgaagaacatgtggttcatgaagatgcatatgaagacctagaagattattatcagtacgaggatgatgatgatgatgatgatatggatgaagtttactatggtggttcgtccagtcttcgggttattggcaaccgtagatggggagataatggttatgtcagggctggtcgtcaagaagctcggccagtccatcgtccaaactttcaggattcaggagcaagttcttcttcgcatgagccgaagaagaaagaggctgggaaaattatcacaggcagaagggcaaagagggcacagaaaagggaagctgctgacaaggcggcggaagcaaagcatcagcagcatttagtaaggttgggtaggaagtgattctattttatttatgtcaggccatggccttgaactttccttcccataagttaaatattttctttttctttacattttttttttcttgtacattgtttctgtgctctttactctgaagcatgtaatagatcttggggaaggtgttttagaataatggcttggtggggtggttggattatggaaactccgaactcactatagcattgaacaatttaggttttagttgttattatgctctcaatgcaggtctaagttgtacataatttccatgtgatgttgatacctcaacaatgttgatatctatctcaaagttaaaatttcaaacacaagaatagttaaagg

SEQ ID NO: 29733 - DNA, 732 bp, Glycine max
  Clone ID: TF_LIB5119-032-A1-PF1-B9
gttttattgttttccttgatccctttggcataacagcattattcttcagcatctctcgtattccttctccttgtgtgtctctccttgctttatctctcttaatttcttcagattttagttttctattgtatggttctgcgttttcgcacaactcactatagtttcttctataccttcctggtggatctgtcactatgacttcctcactcgtgaagatccaaggtgaacaggttctcaccaacgactttcaggacctttcaatcaaagatctgggtgagaaaggaagtgaggcagagattcacgaggtggggtatggaggccatgggggaatctgtgctatttgcttggataagatagtgctgcaggaaactgctcttgtaaaaggttgcgagcatgcttactgtgtaacatgcatccttcattgggctacataccgtgagaaagttacctgccctcagtgtaaacatccatttgagttcctcaatgtccatcgctcactcgatggcagcattcaagattacatgtttgaggagagtgtttgcctgctacttcgagcctcatggttcacacctttatctgttgaagaacatgtggctcatgaagatgtatatgaagacctagaagattattatcagtacgaggatgatgatgatatggatgaagcttactatggtggttcgtccaatcttcgcgttattggcaaccgtagatggggagataatggttatgtca

SEQ ID NO: 29734 - DNA, 1059 bp, Glycine max
  Clone ID: TF_700873011_FLI
tagagccgtagaggaacctggaaacttccacgaggttttcggtgaaaaccaaatttggggctttgcatcgcaagatttaccctttccaatcaaaattcttctgccttccccaaccaattgtctttctcactatcgatttggtttggttggcattgtaattgattttgtttgtgaagatctgagtgaggggttaggcaaatgacgagtggttttggtgaatcaacgagagcatctgcaccgagcccatcatgctcggggaacagttcaaacgatgctggcgatttcgaatgcaacatatgcttcgatttggcgcaagatcctgtgatcacactctgtggtcacctattctgttggccatgcctttataggtggctccatcatcactcccattctcaggagtgccctgtttgcaaggcccttgtgcaggaagagaaattggttcctctttatggaaggggcaaaacacagaccgatcccaggaccaagttatatcctggaatggagatcccccaccgtccttccgggcagaggccgcaaaccatgccgcccccgccgcctcccgaggtcaacccatttgggagttatgggtttggactcatgggagggttcattcctatggcaactgcccgatttggaaacttcacgctttccactgcctttggtgggtttatcccgtccctgctcaacattcatttccatggttttcaggatgccactgtctatgggacaacgtctggttatccctttgggtttaatggctttcatggagggaatgcgcggggttttatgcaggcaaccggtcaagtgcagcggcaggaggacaatgttttgaagaatctgcttatgttgattgggtttctcgtccttcttacggttatttttgtgtggtaatggtcgttttgtgttgaggttacaatgcttcttaaggagttgttgtgtgtaaatattttagctgacttcgtatgagggaattgtatgcttgagaaggttgccactttggctctttattaactgtattataagcattgcagtaaacttgaatgctgcctgtttgtcttt

SEQ ID NO: 29735 - DNA, 1110 bp, Glycine max
  Clone ID: TF_GmC543_1
gttcgcgaaccccaaaatactactagtaccttaataaacaaataaataaataaggtgagagaaaaaaaaaaatgtagaggaacctggaaacttccacgaggttttcggtgaaaaccaaatttggggctttgcatcgcaagatttaccctttccaatcaaaattcttctgccttcccctaccaattctttctctcaaccgatttatctgagtgaggggtttggccaatgacgagtggttttggtgaatcaacgagagcgtctgcaccgagcccatcatgctcggggaacagttcaaacgatgccggtgattttgaatgcaacatatgcttcgatttggcgcaagaccctgtgatcacactctgtggtcacctattctgttggccatgcctttataggtggctccaccatcactcccattctcaggaatgccctgtttgcaaggcccttgtgcaggaagagaaattggttcctctttatggaaggggcaaaacacagactgatcccaggaccaagtcatatcctggaatggagatcccccaccgtccttccgggcagaggccgcaaaccgcgccacccccgccacctcctgaggctaaccctttcgggagttatgggtttggactaatgggagggttcattcctatggcaactgctcgatttggaaacttcacgctttccactgcctttggcgggtttatcccgtccctactcaacattcatttccatgggtttcaggatgccactgtctatgggacaacgtctggttatccctttgggtttaatggctttcatggagggaacacgcggggttttacgcaggcaactggtcaagtgcagcggcaggaggataatgttttgaagaatctgcttatgttgattgggtttcttgtccttcttacggttatttttgtgtggtaatggtcgttctgtgttgaggttacaatgcttcttaaggagttgcttgtgtaaatattttaactggctttatgagggaattgtatgcttgagaatgctgccactttggctctttattaactgtattataagcatctgcagtaaacttgaatgctgcctatttgtctttaacgcttgcctgttgttttttctgtc

SEQ ID NO: 29736 - DNA, 1269 bp, Glycine max
  Clone ID: TF_GmC25299_1
tacggctgcggaagacgacagaaggggatatacatatacatcaaaacacgcagaagaagaagaacaacaacaaagggcttctgaattatcgtgttttgatcagaatctgaggagaaaatcacataatttcgaatttgagttttcgtgtataaaaaggaagagaagaaaatggaatcggaggatttggtcaaacaggaattggaggaattgcagaaacaattggggaagaagcaaaagtttgaagcttctgtttcgtctcttaaaacccttctccaacgcacttacccatcagcttccccggcgcttcgtaaatccttttattcagttctatgccgagttgctactgtgttgaagaccaggtatacagcaccaggtttctggaatgctggactgggcctttttgagcaggctcatttgcttgtttctgatccttctgagaaggagcacttgaaggcttgcattgctcaggccagggaacatttgcatctagaagacaacccatcacaaactttacgacctgcagataatcaggcaaacagagggtatctttttgagggccaccttacggttgatcctgaaccacctcagccgcaatggttggtgcagtcaaacctcttgacaacagctgctacactctttgctgctgaatcctctcaagcttcagaagcaaatgaaaccactcaagatgatgccacaaatatgcttgaagatcttctaaatagattggaagaagttgtgcccttgatggtggatgtaggtcctgtagccccaaaagcccctcctgccagtaaagaggttgtggcaaatcttccggtcattactctcacagaggaaatcctggctaatttggggaaagatgcagagtgtgctatttgcagggagaacttggttttaaatgacaaaatgcaagagttgccatgcaagcacacattccacccaccatgtctaaagccatggctggatgagcacaattcttgtcccatctgtcggcatgagctgcaaactgatgatcatgcctatgagagctggaaggagcgtgaaaaggaagctgaagaagagaggaaaggtgctgaaaatgcaattcgaggtggtgaatacatgtatgtttaaatgaccattcaatgtatggtttaataatatggttgttcgtgtaacaatggatttgaaatcttcatctggtgaatagttgtgtattctttattgtttcatgttatggagatatctcaaatttttagggatgctcaagggaaaaaaaaaaaaaaaaaccac

SEQ ID NO: 29737 - DNA, 1408 bp, Glycine max
  Clone ID: TF_GmC285_2
ggctcgaggcgagaaacggtgtgtgggttcccggtaatccggaggcgacaaggcacggacatctaaataggggtatttccttcatttcactcctcaccctgttcgtccgcactttccatccaaccaacaatggcagatgtaaccacctacctccgccaccaccccgactccgaccccaaccccaaccccaatcccaaccccaaccccaaccccgacgacgaccaaaccctaattccctttccctattgggatttggacttcgatttcgaccccgaattcccctcaaacactctctccttcaccgaccgcgaaaatcaggtcaatttcatcatggatctcttccaccagagcgtggagcagtcgcaactcaccgatcctctctccaacgacgccgttttcggcgccatcgatggaatcgatttaggtttccccgccgctgacgacttcttcgtcggacagagattctccgtcggatccgacgaatcgcacactcacccacacacgctcgcggcgaacgacgacggcgtcctagggttctgcgcgcattccaacgaaaacgacgacgttgcaagcatccctctctgctgggacgcgcttcaattagaagaaaacaacaacaacaacaacacctacgaggatttcgagtgggaggaagtgatggacgagagagacgttatcagcatgctagatgacaccgtttccgtttccctcggaattgaagaggaaacagaagcagcagcagcagaagaagatgcagaatctgaagtcagcattttggagtggcaagttttattgaactccaccaatttggaaggaccgaattcggagccttatttcggagatagcgaggatttcgtttacaccgcggagtacgaaatgatgttcgggcaattcaacgacaatgcatttaatgggaaacctccggcctccgcctccatcgtgaggagtcttccgtcggtggttgtgaccgaagctgacgtggcaaacgacaacaacgtggtcgtcgtctgcgcggtttgtaaagatgagtttggtgttggggaaggggtgaaggtgttgccgtgttcgcatcgttaccatggggagtgcattgtgccgtggttggggataaggaacacttgtcccgtttgtcgctatgagttccccactgatgatgctgattatgagcggaggaaagcgcagagatctgtaatgtgatgatgatgatgatggggttattattagggtcagttttttgactttcagtaatagggtaatggatgaaaacttgaaaaagtatagattttttttttgctgccgaagaaattgtgctttttaattttaaaaaaaattgagtctagggaatgatgtttctctttgaattgtactttttgggatacatcacagaaatgaatcatttttccatcaa

SEQ ID NO: 29738 - DNA, 1533 bp, Glycine max
  Clone ID: TF_GmC342_1
cccacgcgtccgcccacgcgtccgccaacgcgtctttcaactcgtccgaaaggccaaacctgggctgcgggtttgttttgatatctccaccatcctacgtcttcccttctcttctcaccttgttcttgcctttatcaccaggaggaaagaaagggaacaataaatcgaataaaaagcaccccatatccaagataggagctttctttccctgtttattctgagtcacgcataccgtgattctcctattagatcggcctttttccatttccatttcattcgggggtcgcaaatttctgggactaatcaattgacaatgctgcattagtgggattggtactgccgggttctttagctgatgaaagaggattgagcggtggtgcttgtggcttgggtggcttacctgttctatacgctaattcagaatggggagcgcattctatcgaaactcttgaaacagagaaaacactcggttgaaaaagggtctgagactgatgcagaaccctgttgtgtttgtcaggaggattatggtgatgggaatgatattggaacgcttgattgtggccatgatttccatagcagctgtatcaaacagtggctaatgcataagaatctgtgtcccatttgtaagacaacgggcttggcaacatgatgtatgtgactctctgtcctcaggcaaataccatgaccatgaaggaaaaaaaaaattggcacaatttacccaggaaattctggttcttggtgccttgtcttctgtttctgtttagcggacagtggcagtgatgatagtcaacatctggagctccctaacttaaacaagtctagtgggtcagcaaacgagtgtataccacctaatgttggatctggttcttttctgcttccttctggaaataatgccttcctggtagaagatactgatggtaggcctagttgttctcttgatactcggcgggtctcttgtaaacgaaaggctgttgaaggaaataatggacaatcgtcagatgctgggagttctagctacagtcagcatacggatggtagtgcttggcacaccattcctactcaggataatgctggaagcagttcgagaagatctattccctcagaagaggtaaacgcaagacttggcctgggtatcggggatgaagcatctgaaaatgtttctgattcaaaaactgcaggatgctcagaaagctttcacaggaatttccgtttgaggttaaatccttcaaacccagcaaattctgttcctcccaccgcattctcaactgggagcatgattaggcattctggtgtctccatcctctcaagtatcccaaagacttcattttgttgataattctctgaacttgaggtcagcaccaccgatagataatgtggttcctcaaagccagccacttgtaatccatgttcctgctttgcctaggaatagacaatcatttagatgctctgtcaaatttagtgcctgacttactgctttattgacggattcatttcatatatttaattatattgagttgggaaaatcaatatatt

SEQ ID NO: 29739 - DNA, 636 bp, Glycine max
  Clone ID: TF_GmC989417_1
atgaaggtgagccaatatatgctcctggtggtcctagtttggcattcttcattatgtgcgaatgcacagtggaataacccaataaactactctccattcgacgagacaaacaaaggtggaaactactccaaggtcacatggagtgtgtcgctgtcatgtgtcttcgttagcatcctggtgtttattttgtttaagctccgcgcgtgttgttgttgttgttattcttcttcttcttcccaacgccataacacaaagctcgtggcagccacagaagctattgaaaagtgccccatctttgaatactcgacggcgaaggagcttaaagtggggaatggggcagaggagtgctcggtgtgcttggtcgagttcgaagactccgacaccataaagatgctcccaaaatgccaacacgttttccaccagaattgcatcgatacatggttaccctctcgcatgacctgtcccatttgtcgccagaaactcacgtctcaggataccgtaatcgacattgatgatgatgatgtcgtcccaatggaacaactagaacatgatattggtacagagattacagagtcagaggtggcagtaactgatgaaactgacactggcactgttgtggaacaggttttggtttga

SEQ ID NO: 29740 - DNA, 558 bp, Glycine max
  Clone ID: TF_GM651B23rgnG1.C1.o45.ma
atgaaggtgagccaatatatgctcctggtggtcctagtttggcattcttcattatgtgcgaatgcacagtggaataacccaataaactactctccattcgacgagacaaacaaaggtggaaactactccaaggtcacatggagtgtgtcgctgtcatgtgtcttcgttagcatcctgctcgtggcagccacagaagctattgaaaagtgccccatctttgaatactcgacggcgaaggagcttaaagtggggaatggggcagaggagtgctcggtgtgcttggtcgagttcgaagactccgacaccataaagatgctcccaaaatgccaacacgttttccaccagaattgcatcgatacatggttaccctctcgcatgacctgtcccatttgtcgccagaaactcacgtctcaggataccgtaatcgacattgatgatgatgatgtcgtcccaatggaacaactagaacatgatattggtacagagattacagagtcagaggtggcagtaactgatgaaactgacactggcactgttgtggaacaggttttggtttga

SEQ ID NO: 29741 - DNA, 1916 bp, Glycine max
  Clone ID: TF_GmC3662_188
tcctctagagcggccgcttttttttttttttttttttttttttttttggaagcaacaaaattctggaattagggaaagaggggcaaaagggaagaaaagtccttttctatagtaccatagagaagagtctttattacacttgaatcaaaacttaacaagaaaatcaccatcagtatcagttgcaccaattaaaatcattctggtctccctaagagaaccaaatcaaatataaatgactgaagttattcagttccatctcatcttcatcctagaaataactgagataaaaagtttaaatattgttaaaacccaatcaactggtctttggatcaggcattggaaagaggccagcaccagcaccagcacctcttggcggtgcaaaacccaagaacttctgcaaatttgttctgatgctaatggaacacaagaagtacagaaatgccatggaacaatcagttgggtcattaccctgcaagcctcgatggctcatcttcataataagcccaaaaggtttgaagggcaatttggcaacaaccttgccttcgaagagtgaattcagcaacccaaagaccacaaagagaaccagagccaccacacccccagacttgaacttgaagagagacaagtcgcgactcgattctttgaggcttgtctcaacacggtcaatttttttggtcttggacttcttgatgttgattttattgctgtctgtcttcatggtctcaagtttcttggaggctttgtcaatggaggacctaaggtttttgtaagaattggtccgatagataagaacccatgagatagcctcacagacaatagctgtgcagaaggagatacccactacagtgaggccatctgagtacttgaaatctgagaagggatacgccatgggaagaccgttacaaaaaaacgacgagaaaatgggaaggcaaaattggatcttgatcggaattgtttaagcgtccaaagccagaccaattataaccgcttcccttcaagtctcagttttcaatataaaagcctatctaacagccttctcggactcaattcgaagtcgaacacggtggctgggctcgccggtcgcggtggtgcttctgggtcttgtggactgtggtctcgtcgctgccgaacgcgtgggcgaacgcgtgggcggacgcgtgggtgcagaatcccgtgaaccatcgagtctttgaacgcaagttgcgcccgaagccattaggccgagggcacgcctgcctgggtgtcacacatcgtttaaaaaaagaaaaaaaaaaaaaaaaaaaatacaatgactctcggcaacggatatctcggctcttgcatcgatgaagaacgtagcgaaatgcgatacttggtgtgaattgcagaatcccgtgaaccatcgagtctttgaacgcaagttgcgcccgaagccattaggccgagggcacgcctgcctgggtgtcacacaaaacatcattaaaacccaacaaccttgatttgtcacacacacactagttaaaaatccaaatgaaattaattgtactcttcttcctcgtagcatcatcatcatcatattcatacgctcaatcccctgcagcaccagcagtggctcatgtcccttccaccagagcaacgcttcccatgttactcgtgatcttcctcttcgccctcctcttcaccgcattctgctccatcttcattcgctactgctcccacgaagaacaaccccacgcgcttccacaagccacgcgcgccacgccgcgcggagtcgacccgcgcgtgctcgccacgtgtcccgtcacgtcctactacgcagtcaaaatgaagacgccgcaaaaggctgcgtttcagtgtgcggtgtgtttggcggagtttgacgacgccgacgcgctccgcttgctacccaagtgcggtcacgtgttccacgcgcactt

SEQ ID NO: 29742 - DNA, 1659 bp, Glycine max
  Clone ID: TF_GmC730_1
ctgtcgtgtatttgtagagagaaacaaagttctcttctacttctttctgtctccagcaggctcagaatccttttgtaactattctctgaatttccattcattctatttagtttcctcttttgttttctcttctttttccttgaagcaaagtgaacttgtggtgtatctttccaattgaagtgaaagagtaaggatgtcaagtgggacaacatactggtgttacacatgcaggcagccaatctggcttgaagggagggaagccatttgcccctactgtgacggaggctttgtgcaagaacttaatgagctgcgaggagttgcgcgccaacacggcttctcatcgcggatggaagatgctcatcaaatgcctgacattatggatgctgtaagagctgttatggagcaaagaggttctgaaccgagaattcgggttagagatgctgttgataactttatgaggcagagaatggctggaagatacacaaactttgatgttagaaggaggtctggttctggttctggttctggttctatccttattcctgatgagacttggggtgtctttagttctggtccttatttgatatttcatggtcaagcaccaggattcaccaattctaatggtagctcaagaggtggtcctaggcgtgttgattttggtgactactttctgggtcctagactagaaggactaattgaacaacacatttcaaatgaccggcttggtccaccccctgcatcgcactcttcgattgatgcaatgccaactattaagatcacacatgaacacctacagtctgattcacactgtccagtttgtaaggaacgatttgaactgggatccgaggccaggaagatgccatgtaaccacgtttaccactcagattgtattgttccatggttagttctgcataactcgtgtcctgtgtgccgtgttgagctgccaccgaaagaacatactagttctcgtggtagacgaatttggggtaatggcagtggtagtggtagtagcaatgatatctctaggggaagagagaatagacagatgaacaatggaaggagaaatctgctatcttatttgtggccattccggacctctagttcaagtacttagagtgtgtttgttttatcagaatcacactttccaaagcatgttgaacgtgatttctatgagattgattttgaaggtgattcaaagccaaaccaaaggcaaccttaatcattgtgctgagaccggggaatctactgttttatatctctttggccagaacaatgacagaagttaaaaagtttcctttcttcttcgagacaagtgtaattagctgtcaaaaaatgcttgtaatttaaatgacatgaagaaagtttctgtagattgtgctttgagcttgatctcatagatcatagaagtatgcgaatatctttgtaaatacaatattcttaaaaccaacttttgttttacattttcagtagtttagaagctttcactttggtgcataaggaatccaaggggaaggaaaggtgaatgatgaaagaaaactatggataaatcctttcccatatttagatattaccaatttataaggaaaggaagagttaaacgtttgataataatgtaatttaggaaaaaaattatttggtaatctagaactaacacaaaaa

SEQ ID NO: 29743 - DNA, 824 bp, Glycine max
  Clone ID: TF_GmC107734_1
gcattttattggttctattgacatatcacatatctatccgagtcttacactgtctatacattgagaacctcacttgttgtacattttatctatccatccactcatttggccacacaatcatacccttcgccctctaccacaggagtcccgccctctaccccatgactccctctcttcagtccaaaacccaaccaagcaccacgtcatctactcatcacaaaaaaaaataaatcacaaggccccgactctgggcccccctccccccctcctcatcgcgtgtgaggtgactacagtaagaaacaaaataaataacagtacaacattaactcacatttaaagtaacgttgtttctctcccgctaaggtacgagattaatcaattagaaagatactctaaccatttataaccgctagatgtaaaaccaacggtggatatcattgttggatgcaatggtggttaaagaaacatcataacatatgtttaagacaaaaataattttatctactaatcacaatcattatttttgtattcatttttatccactgcaacattttcaactgacctatgaatcttttgcagtcattttaaccaagacttcccacagccgttggatctctccgaagacatcatcggacggcaaccgaaacctgcagcaaggacacgtgttccttttccccatccacggcaaaatacacatccaatgaaacaagtgttgacatggcaactcgcacacgtcccttcctattcccatctcctccttgcatatcacgcactccctcccgtcgtgcctcacctccaccgacggtagcgccaccattattgcc
